United States Patent Application Publication US 2007/0042382 A1 - sequence listing, part 3

SEQ ID NO: 8716 - DNA, 405740 bp, Homo sapiens
ctggcctcctgaattggaagctttatgtgtcataaattacctcaagtaaatttcttctgttagatggtaagcaccatttagagtatgggttattgtcattgtttttgttacctttattattataatcaaggacttgaacatgtcagaagagaaaagaaatcctgtgatcctaacaagaccctgctcatttgtacctaattccaaaatctttaaattcacactgatttgggcacatttattaaaggaacagttattatagaaatcttactctaccctcattctatctccccagtgtttttctggtatttactttaaagacagtatcaaattaccagaaatgtaaagcccacatccctaatgtgtatgtgaaaccaaactacatttgattgtagttgaaggaaattaatccagcaaacagtctggatttcagtttgctgtttacaatatttgtatttctgcatcttcaattctttcagaaactgatttatcttcaataggttatgtaccatccatgatttacttctcttataacataaaaaaagaaatacaatgaggaataaagacaaaggccgggcgcagtggctcacacttgtaatcccagcactttgggaggccagggcgggtggatcacctgaggtcaggagttcaagaccagcctggccaatatggtaaaaccctgtctctactaaaaatacaaaaattaaccaggagtgtgcccataatcccggctactggggaagctgaggcaggagaaatcacttgaacccgggaggtggaggttgcagtgaggtgagattgtgccactgcactccagcctgggcaacagagtgagaccccatctcaaacaaacaaacaaacaaaaacattaagagttggaagaataataagaaaaaaagtcagtaaggagtggagagacaatacagatggagcaggcaatgaattaatgtggctttcagatcctttacttcagttttttggtacatttggcctgatgtagaatgtcctacgatgtaggatataattttgaacatggcaagggacctagtatgtgatatccatcatctgtcatccttgtctttcctgcagttcaggatgccacttatcccatttcctgttttcatacagtgtagggctgaagcaagatccaaacaacactgtgatacaaaagagaaacagagggcagcctgctcatcttggagggcacggaaagactagcgagacacacacaaaaaaagcaggccaggcgcggtggctcacgcctgtcatcccagcattttggtagactcttgtgggcggatcacctgaggtcaggagtttgagaccagcctggccaacatagagaaaccctgtctctactaaaagtacaaaaattagccaggcatgatggtgggcgcctgtaatcccagctactcgggaggccgaggcaggagaatcgcttgaacccgggaggcggaggttgcagtgagccaagatcgcaccattgcactccagcctaggtgacaagagtaagactctggctcaaaaaaaaaaaaaaaaaaaaaaaaagaaaaaagcagatcttttttcatgtgactcttatgcctgttacaagtaatgctggcaaatccttcctgatcttttcaccaccagaaagacaggatagaaaggcagagagggatggagggagagcaagagggttaacatagcttgttcatttatttactcaccaaactaatatttattgtttgtcatgtgacaggcaccaaggttggttctgggaatttgaagatgaatgagttaccacccttgccttcaaggtgtttcagtctagcagggagaacgatgtttaaaccagtaattaagcttgatacggcaattattttaatgctgagccacagctctgaacagaaggggcgcagatgtggagacacaagctcatccttttattgagttccctaataaagagcaagatgcttaactctgttgatctctagcttcttcattaaaatgggtgggagagcatcttctcacttgcagacagtgcatgtaaagtgcccagaagagtgcttgacacatggtgggcattcagcaaatggtagagtgtggatgtactacaggggctatgaaggactcaagggcagtaggaccataggaggggtcctgaagtcacacgtcagatatgcaagaaagaacttcttgcacaccgcaagaacactaggtaccaggattagcaaggagttgccactgatgagttggtccctatttcccaacttgccttcactaggtggaacatttcctttaaggttgcaaagggaggtcagtgcgatagctcacacctgtaatccctgcactttcagagaccaaggtgggcggatcacttgagttcaggagttcgagaccagcctggccaacatggtgaaacccccatctctactaaaaatacaaaaattagccgggtgtgatggtgcatgcctgtagtcccagctactcgggaggctgaggcaggagaatcgcttgaacccagcaggtggaggttgcagtgagcggagatcgtgccactgcactccagcctgggtgacagggccctgttccctgcactggaccccactccctctcccttgtcctccccagcctctgcctcctgctctcacttactgctctgatgaccagccagggcaggcctggaggccgaggtcagtggtttgttgggacaagggctggttcccaaaaagccccacaaaaattaaccaggtgtggtggtttgtgcctgtagtcccagctactcaggaggctgaggctggagaatagcttgaacccgggaggcggatgttgaagtgagtcgagatctgctgcactccagcctgggtgacagagtgagactctgtctcaaaaaaaaaaaaaaaaaattgtaaagggaaaagactgtaattttttcctttagtaaggataactcaggtgagaagcccattgcatttttattgcaccaatttctgacacttaaatgtctttcacatgagtcacctattggcacttagctccttgtttacgtgaagaatcccgtgtctccactaaactccttcccttctaggccttccatatattttcctgttgcctttctatcaaccctgtggtttactatatttggaagcattatgttttgaagtcatatattatatacagagaagtgaaatagaatatttggtcgttgttgccacttgtgaatgaaaagtggctactattgggtaatatttattgagctctaattatcaggcaccacacattctatgcattgtatcagtgcttcttggcttttgatggaaatacatgggatatggagatcttaaaattcaggttctggttcattcagtatgagagtagaggccaaacgtctacagtgctgacaagttcaagggtgatgctgctgtccacaggctgcattttgaatagcaagacattgtaccatttgatcctgacaacaaccctattagttagaaattacttcttatggccaggcacggcggctaatgcctgtaatcctagcattttgggaggccgaggtgggcggatcacgaggtcagaagatctagaccattctggctaacacggtgaaaccctgtctgtactaaaaatacaaaaaaaattagccgggcgtggcggccggcgcctgtagtcctagctacttgggaggctgaggtaggagaatggcgtgaacccgggaagtggagcttgcagtgagctgagatcgcgccactgcactccagcctgagcgacagagcgagactccgtccaccccccaccccaaaaaaatttcttatttcgtatcatggaaactgaaccgtagagaatttatccaaggtcatgttgctagaaagcagtacagctcgggctctaaatccagatttgcgtcctgggatagtgtatataatgtggattttggaaatattctccaacatccaaaggtgatctgatgctacctgaaaaaaattcatagttttagtttaaattttgacccgtttaatgaaatttctttttaatttctctttatgaaagactgtgttaaatggtgattcaaatgtgttggattttgcttctaaaggtatgtagagtttagtatgatttatttgccaaaattatggcctagraaatgtcgtgctattgatggaatccgcattgaacacaagaggaaattgctagggaaggatgcgtgtgaggaaaggaaatcctcaggctgatttattgttcagcgctgagtgtaaacagtgtgctatccttgtcacagccaaacgaaaaaggacgcaatcactatcctgaacagatcattcttttaaaaataatattttggcctgcttataaagcatggttcgtaataaaaaatttgggctacagaaatataatacaattaaattatccaaactcccatctttttgtttgtttgtttgttttttgagacagagtctggctctgtcgtccaggctggagtgcagtggctggatctcagctcaccgcaacctccgcctcatgggttcaagcgattctcctacctcagcctcccgagcagctgggactacaggygcgtgccaccacgcccggccaattttttgtatttttagtagagacgggttttcaccgtgttagccaggatggtctcgatctcctgacctcgtgatccgcccgcctcggcctcccaaagtgctgggattacaggcgtgagccaccgcgcccggcctattttctaattttaagtgaatgcatctcaaaagggtgacgaaggaccacattcctatcgaacagcaataattcactgtggcaatatcttgccacaaataatttaaacattaattgtggttttgaggggcagtgtgcagtgggagtaaaaggggtagggtttagagtctccaaaagatttacttaagaaacacgaatgcactgcttgtgcactgcgcaaaagttctggggtcaagttccaactttcactaaggatcccagaacagcccggcaggagctgcccagggctaacgcgctttgctctcaaacccggccgccagtcgccgacgcatgcgcagtctagcaccgtggcacaggcctttctcaagcaggtttttgtggggtcagcaaaagggccagaacagcaacggcaaacagttccgagcctgacagtgcaggggcaaaccagctccaagtgaaaatcacctcgcgaggaaataggctcagggatcggggcggtttccgcaggcgtctccacacacgcactctcactcactttgagggtgccaaaacaccactaggggcaactaggaggaataggctgaggaatcagctatagagaatggaggggatagagctgcaaggggcgagggggcgacgatctctaaaactttcagcgccgtgctctactgatgctctaggcacttttttcattgctctggggagtctgggtgccccaattaatccgtcgctcctttgagcatttgttgtttagggggtcctgggggaccccatcgtattacagtattcagccacactccccgcaaagccgggaagccgccccgagagaagaccccaggacgccgggggctgcgtgagccccgcaaggctgcaggcgggggcgcgggatcccctttctggccgccgcccccctccgccggcccctcccccgcgccccgccctcggccacagaccccagccccggccgccggcgcgctcccacccgcgcgtctggggacttgcggaccgcagcgagaccggccggcgtgctgggcatgctcagtggcgggccgggcgctggagtcggaagcctgtgcgcggcagccgccgccgagccggccggggcgcacggagagcgcgcgggactcgctgcagcggcggccgggtcgcggcgcacccgggccgggaccggagccgagcctagcgcggcgcccgcgacccgtcagccgcggctcctgctccctcgatcccgcgcggggaaagggccggcggctgttggcgtcggcggggcgcggaggaaccgcggcggcggcggcggcggccgcatccttgccgcccgccccggcccagccgcgtcccggagccgtcgggcatggagccgtggaagcagtgcgcgcagtggctcatccattgcaaggtgctgcccaccaaccaccgggtgacctgggactcggctcaggtgttcgaccttgcgcagaccctccgcgatggagtcctgctctgccagctgcttaacaacctccgggcgcactccatcaacctgaaggagatcaacctgaggccgcagatgtcccaggtgaggaggccggcacgggcgccccgcctccagccggcagctcccattaatcatgcggctaatttctttgtgtaaatgcaaacgtctaggtgcgctgagcttgccctgcttcccagccttctgctttgggaccacttcggcaccactttggcgtttcctaccttggcttgaaatggtttagctcctcaagctgaatgcgaaagctttgcgtccggagatggtgtgaggatttcgtaaaggctttctgtgaggcgggaaagaaataagttgtcttagggtgcccttcacctactctgcgtgtgtgtggcgcgacaaagggaatttgatcaagctcttctataataacgaaggggagggacgaaacgakgtgatggggtaatttgcctttagtctcttcttttgctttgcgtcttgtactcatgttttcctaaaagaggaaccatgacatacatgaggactcgaggaagtgaagggcgtttggtcccgttatctgtccaggagtgacattggtcaaagggaagaacagggagcagaacccggaggccgcccccagggcccctgagctggtggccagccggcaagctcccgtttacagctcttcctaagccatgtgagaaggagcgagtccagcctctctcagcagcgacaggaaatgagaagtttcactagagattccgctttccttcctgcagtgccctgctcaggtgctgtggtgccggtcggctcctggggctggagctgcctctttgagggttaagccagacacctctggaaggttgggtgcaccctagagtcagctcaaaagtcacagttcagtggaagagtagtttatttgtcctgtcggaaaatttttgtacagaaggatgttaaactcggttcagagcctctttctctttcagaatgttaaaacaaaacaaaaaaccaaactgctttcaacttaaaagggagaggacagagccctctccctgacacatttcagcactaatcctctatgacgcagagcctcagctacttagcaaccagagcagcgccttttaagaaggaacggactttatatgatttaataagtatgtatttaaagttagagcacacacagtcatctgtgattcttggtgtcagtgtttcatcagggtcccctgcacttcagattctgcattccttgcctgtttgccttcaacctgctggtgggcagtccctaagaaagaacaggcatggaagtggggagagccatacgtatttaaaagtgaggtaaattattttatacccccataaacatgcatggtgattgctacctctmggtaccccttcagagttgtctcaactctggaaattcctttgaggggtttggcagacttttctattatggtgggagctgcagttagctactctcacacatccccattttccactttgcctgtagcctcaggaggcagcgtgggtcaggatgccttggcccaccagtagggagtacagtactgtgcacatttcctggaacttgtttcctggaactctcagcagttgctctcaataatcacgttttctggacagctgaagacctttttaaacctcgaagcctttatttgaatgctaacaatggatgagaatcgttttgaatgtgtttcactcttctcctcttatgttagatgtaatttaatctttctgatgaccaaagattgtcattataagcatcattaatgaaaattgagcacatacaatgctctaagagttctgttccctagtgggggtagcaaaatgagcacaccaggatacttgccctaaaggaattattacactatgctatcagatggtaaatcactgggttataataaggtaagtaggacagctaatgaccttctttgtgccgttgcacttttgagttcttaagtctgttcaaccttgaggtttctggttccaaattaagtacagtttctcctgtaatgtcctatgagagggtgcttccctcaaatgtgaatcctagaaggctagtacctgagcctggtgatgtctgtttttgctttcctcatggttcttggcctcattgcagagaggcaaggctgctgaacaagtggatgctaggccgatgagtttgtatcwtgcaggttgtcattaaatcctttaatgagacttatgaaatgattttatgaaacaacttgacgtatttaacatgcttatagtgcctagcacatgtacttaataaatgtttactattagcaaaattatgaaaaacattttttctgctattgttatattaagagtaataggttccaatagaaattttaaaacaattgtagaggcctaccggttcctttgggctgataaccctagacattttgccgctaactactcatctctttcttgggaaaggttctagctgtagtgaatacactattaacctggtacaaccctgtcatgtcccagcagaatgtattcccctggagttagagatgtcattactagtacttgtggcgttttggtatgtctgagagtcgttctgtctacttagattctgttgaagatattaatttgaaatagactattttttatagcacatgatctcctaacctgagaaataactggaagctgtcacttctgacttttgtgacatattgagactgtaaagagcagatgttgacaaaagaaattttaatttattgatgttttgtttgtagcctgtttagctttcctgaaagaggctataaaatgaccagccttttaaaatgagtgtttattccagtgagtgggatgcctttctattctctgttagccttctgccttgtttgcatttaaaaaaataaataactgcaaataatgactgctcaattataggtttgaatcttggaatcttaataagttagttgattatctttcaaaataaaagcatggatgggatcccagttttcttacttattgttctttctggctgttgacatcagtttgtttttgatcttgccatcttggtaagaggatgatcttcagttcaaaaataagtatattttttcatgctgatttagtgtttgtttttatttatgataggttaaagaggtaaacattaatcatatttagttayacatttaacatgttcctcttattatataatacagttaaataaaatgcagttggccagtgaatatctaagaaatttggtgtctgtatatgttagattttagtgtctatatttgagatttatttttcatctgaaacagtattctagccaggacacaaagcatgtgaatgattctggaagagaagagcctactggtgatagctgtactgggtgggcggcacatgctggggttggggctgggggtgtgcctgtggaagggcatgagttattggcttgatgtcacttttagtggttaagaagatcttcatgaatgcctataaccacccctagatctatcatgaatgagagtaccttagtcttagtttgaaacttaaaattttgctttatactatgctttatagtaggggtaatacagtcaatgagtttagtggccactatggacagtgtatgtaaactttgaattgtttaaatgaataattcagacttcaaggattccttcaatgaatatttacttggtcctactatgttccaggcgctgttttagacactgtcttggacaaactcaacaaagtccctgccctaaaggggtttggattttagtagagttgaaccataaataaatgactgtataatttatttatatatttatatttttacatacaatttattgtatataattatttatatatttatctataatgtgctatgaacccatttgaagctgagttaggaactagagagaaatgtaatacaattttatagaaggtagtcaagaaagtcctctccaagggagtgacaattaggtgggacctgaagcgagtraaggaacacaggaatgtcamtgtttggaaaaaagaatattcctggtggagggaataccaagtgcaaagctcctgaggtcattaagtggcaggcatactggaggaacagcagggtcagtgtggttggaggagagtgagtgtgggaaagagtgggaaacgtgaagtcagagagaaaatggaagctcgatttttaggacttgtgggccactttaaggactttggatttcactttgagtgaaatgagaggtcaacagagggatgaggagaggagtgacatggcctgatttacctttcttttcttttctttttttttttgagacggagtcttactgtgtagcccaagttggcgtgcagtggcctgatctcagctcactgcaacctccgcctcccaggctcaagagtttctcgttcctgagcctccagagtagctgggactacaggcacgtgccactactcccggctacttttttgtattttagtagagggggtttcaccatgttgcctagagtggtctccaactcctgagctcaggcagtccacccgccttggcctcccaaagtgttaggattacaggcatgagctgccacgcccagccctgatttacctttcctacagttactttggctactgcattgagaacagactggagagcagcaaggatagaagtggccaggctaatacatcattcaggcaagagatgatggcggcttttaccaaagcaatagcagggcagatggtgggaagaataggctctgaatatattctgaagatggagccagcaggggtttattgatggactagattagggatatgagaagagaggagtcaagtatgtctccagaatttttgccctgagaaactggatgatgaagttcccatttactgaaatggagaggactagaggaagtatggtgttggggtgtatgtggggagaggggaaggaatatctggagctagttatgattgaagtgcctagtagacatctagatgkgtacgccgagcaagttggaggagttggagatgtaggtataaagtttggagtcatcaaggtgaagatggtatttaaaatcatgagactgggtgataccacacagggagtagtgaagaaagaagaaaaagtctgatgagccattggagcatgcctgttctcgagggcagagagatggggagaacctgtgaaggagttgagaggcaatggccatgaggtaggagggaaaccaagtgaacagagtatttttgggaggagcgatgacatgtcaaatgctgctgatcaagtgaaataaggactgaggatagaagatttaaacaatataagtttccttggtgaccttgacaaaaacagatttggtgatgtggtgggcaaacacctgatagtaggagagggttgagacagcaagtatagacagctctttagggagtaattttgctgcaaagagaacagaaaaatgggatagtggctactaggggaaaagaaatcaatatatgggttaattaattaattaattaattwatttattttttagacagagtcttgctccgtcacccaggctggagtgcagtggtgagatcttggctcactgcaacctctgcctcctgggttcaaccaattctcctgccttagcctcccaggtagctaggattacaggtgtgtgctaccacgcctggctaatttttgtattttagtagagacggggttttaccttgttggccaatctggtctcaaacttcagacctcaggtcatcaggccgccttggcctcccgaaagtactgggattacagctgtaagccactgtgcccggcctagatatagtttattttcttatgacacaattcttattttatacctattgaaagagctctttagatggacagattttctcatatggtactcttgtgtatatgtatttgtatgtgaaaagatatatctatataygaagaatgagaacatatgggcacagggaggggaacatcacacaccggggcctgtcgggggttggagggcaaggggagggataacattakgagaaatacctaacgtagatgacgggttgatgggtgcaggaaaccaccatggcacatgtatacctatgtaacaaacctgcacttgcttcacatgtatcccagaacttaaagtataatgataaaaaaaaataagtaaaatttaaagtgttttaaaatcttctttttgttcagattgtgactattctgaataccacttgaacttagagtcattgattgccatgtgttttcatacagtgttgccctttgaacatctagtgttggtgatgcagcattcctaaaataattcatcactattgtctgtgagatttccttctaagctgagttttgatgctgctgttattattttaaagagttagtttctgctgtacacaaccatacattgtttttaaaaactatgatttagttttagcattgaggcatgaattccaaatacatgtctacacactccctcctcccatacaaggtggtgtgacttacagatttttgggttatacaaaagggaaggaggaagaactgttatttcccaaaaagaatggtgtgcctagtaacatttttagtcagttcattcagaataatatcattccttagtcttctcagaagtcattaacctctttgccatttgttaggttattctcttggataatctgccagcataattttaaactcaataccaatcaggatcttttcatgtaaagtagttgtggcatctttaggcatcttaagcacttgttctgtctgcgtgattggtggcttaacctaggttctctggaaagcagagcctggggtaaggcactgaagtactgaaaccctcttggtgaggtacaatcccatggcttgccagagtgaggaaatgagatcgtgtctttttttttttttaagatggagaaaattataccatgtttgcaatacaaatggggttgatctagtatagatcaccacatattttctaattttcaaatacagtggattgtttttattatttttctcgaatcccctgtagcaattgatgttactgatcatccccttctcctaaaactctctcttccctttactctcaccacaccatattctcctgattctcttgtacctcttattattccttctcagtttttgtttgtttgtttgctggcttctctttattgaaacatatcttaaacattttagagttttctctttagttgtgttttgatttcatattcgcttccctgtagcatctcatgacatctgtggtgttacctaccttgctggatcccaaattcatactgacagcctcagtctgcctgttttacacccctgcctctataattacagtggctccataggtatgaagcctgatcattgtagaaagttcactcacaatagagaggggtggattggatgggacaaaactaggcgtgagcaggactggtactgaagtcattcaacagaagataaggccagagaaaggaggygaatagagggatagagaggaacaaaaaagattaaagtgataattatgagttgggatggctgggactttgcaaccttttagatacagagaaagagtggaaagtatctaggttgagacccaggtttcagcatcaggtgacagaagtgtcataaagaaggggcacattttagtgagaaagggaacacattctgtcttggactctgagttggaagttattaccagttaccctctctcttctcagtttcatgcatcccactctcttaatacccctttcttttgggtttgttctactaatacctaaaacccaacaatcctttgaactcattgcttctaccacctcttaacttcctgattcagttttcatttccttcctacttagcttaaatactatagccattataattccttgacgtccctcgatttgtcctgcttgtttggataaacaaaaccctggtaaaattcaacttgttacttattccctgcttacaactgagctgctgaatgtaatggaggaaaacccgcaccgtgctgactgctctcactttaagttcatgatccctaacctcaagtgggcaccttgggccatccagtcatctgattatatttctttaatgttctcaaagtatggtctggaactactggcagtccctgaagtgcttttacgggtcctacaatttcaaaactctctttatggttttatttataatcgaataataatagattatttgccctcattctcattttctaatgtgtatatagaggaattttccaaaggctgtgtgatagtgcctataccgttgctgtggctgactgtagcatatatgcttgtgtacgtttcaaaggcttatcagtttagaattctagtatgttaaacattaatagctgtgaaaccccaaacaaaagctgctgaggattctcaatcacgttttaagagtggaaaggggtcctgaggaaaaaaaagtttgagaactgcccgagaccatttactttttgactctccagatcactctgtactaccttttcttctttccttaaacttaacttaatcacccgtttctcccttctttctctcaactcgtaatcttacttcctgttccactgagagaaaagacaaaattggaggagagcttcctcaggctcccaccttcctgcatctgtgctcatagatgatgccttctctcctgcactatgagtgagttaacagtgctcctggccaaggccagtttctccttcactcttaccccgatgctcttctgcatcatcagttctcacttggatctttcccatttgcatgcatgtatgccgttgttcccttcatttgatgtgagatatattttcagagtagagatagaaacatgtggatgaacattgggtgtgatggagagcgactaaggatgcctagggtttgatctgagctactagggcagatgatcagacaacctccttataactttagtggttcctgatggaccatgggataaaatccaacctccttagtatgcaagagctcatggtcttgtgctgcttcatctctcaaagctcttctccactttgtactcctgaccttcttgcagtttcttgaagactatgctgttaaatgtctctgtgctgttgcatatacctttttgtctgcttgaagttccctttttcatttgtctacttgwagattcagttcaagagtcatctttgtattgtcttccctgacttttctcccaggtgtggctgagcacatgctgctttgtgccacagtgtctggtagaatgcagcatttcttgctgttttgcrgttttttttccttatccgtctcccttccaggctttggcttgattgaggatgccataggctagttcctttatatatggcactagaaatggacacagggagtcatacctaataggcatacataaataggcatagattaaattcatcaatgggatgaaaatggtgactctttactaccttttcaaacatctacaaattaaaaaaaaaacatagccagcactgactgtcattaaaaaccaaaaatacttaagtgccattactaataatagcaggtaacattacttcaccacttaccgagtgactctcagaaagtgamtaaacctgtctatctgtctgttctttagcttcctcatctctaaaatagaccaaataaaagaacctacctcctagggttcttgtgagggctagctgaattaattaatgtgactggcttataacaagtgcccaatagatgttaactattttttactataatgattatcactgcttctgtggaaacatacaaggcagttactaaagctttccatgcattatctcatctaattgtccaacaccgtgaggcaggcactgttatttatccccatgtggtggatactctctgaagmtaagaggggtttagtaacttacaccaacaagtggtttgtggtagagccaaacttagaataagaacattaagagcgaactgaattcttgtcagcgaggctatcggcctatctgaatgtgaactgcgatgaggactgcaatgaatttccccccctcccatggtattttcctgttgtgtggggctcccttggaggagtgttctgattggccttatggctgttgttaatagcacctccttactagtcagatattgagttaaaattttgcctcaggacaggagaatagcttgaacctgggaggtggaggttgcagtgatccaagatcatgccactgcactccagcctgggcaacagagcaagacttcatctcaaaaaaaaaaaaaaaaatttgcctcaggatactgaatctggatgatttcatacacatttatcacactattcagtataaaatgggtgttagacttttgacaggtatataatgggaaaaggaaaggaaatcaggaaaactaaggaaagttaatgaggggaagagagaaagtgagtgtagctgttcctttttrgccttttaatactgtgccttgtgacagctggtctcaagcacatggtttaatgctctgttctggagtcaggagtgcctacatttctctgggaagcaggaacactgttgtttaaaatgatgtgctttgatagggcattttttttctattataaatattctttttgtaaattcacagacaacctattgttagctattatttggagcattattttatcatgtttttcatcctctgttaacatagacccttcatggtgttaaagccagtcacaagttgacattctggttttccttaatcttgggcatttagtggatagaaccatgaacagcaaagtagttccttttgatttccatgtaaaattatttttaaattgtattttgtgctgctgtctgaatgtgctttcaaaatctgtgttacaagaagtgtattcagtttttgagttgcttgcttaacaggaagccagcagcacatgctactcacatgagagttctttaaagggtcaattaatatggaatatttaatgatacacttgatactcaccttccatggttttcagagtgcctgtcttaaaatagatctgtaacagctggtctgaataaacaagcgtcgtgcttccctatgccttttcctgggagcatgggggcagcatggtttaatgggaacacttaaggtcaggagtcaggagacctgggttctagtcccagatctgtctctgacaggctgtgtggccttcatgtttccttctctttgcctctggcttctgtacttatagcaatagcagcggatacttacatgtgcaataatatactaaatagcaactaaaatgttttacacatatcaaggcagcattatggtttcatgatcagggatcaggcagaaatgattgaatcccagctctggcacttaacaacactgaccctgggaaagttactttacttattgaatctgttttctcatctgataggcaagaaattgtggaatttctttgcaggattatggtgagaatgaaaatatttaaatgcctggtacatggtgggtacttggtaagattatttccttccttctccccactgcctccccaatcctcatgtctatgagacaggaagaataagatcttatcactgctctacagaggaggaaatggatatgtgccctggctaaagggcttttctcaaggtcacacagacaggaagtggtgaagacaggacttgagtccaactgtcctaattccagattcggtgaagtttcccgttcctgctgccaaattcagtggatagatggcaaattgcatgaggaaatgactggaaaagtgctttcaaaaaacaaggcaggccctagaaatgtaaaatgagattgtattattttgaactgaaagttgttctatttaaaatgaaacatctaaaacaacgaaatttctgttattttttagtctgattagtttgtggattatttgctttttggtaattttatagcccctctactttctgtttgcttctgttttcatgraaatttgtgcaagtgaagcaattatttaaatcatcacattgtctgctcaatgttggactttgtrgtagatgctgggtattcaaatgtgaatgaaactcaatccctgaccctgtgttgcttttagtctatacagtacgggttttacttcatattttcccttataaaacagtggatgggaagggagcygtttgggttagagtgaatgggcatggctaaagtttggtaggtgggtaatgcttttctggatacatagttaattttgctcatgtgtacattataccactaatgtcacaaaatggatttatttatgtgtgtgcatggctcaaggtatttctctcctgtctttctttttttaggttgaatttatgtatatatatatatatatatatwtatataaagttttgttataagttcggggcacatgtgcaggtttgttacataggtaaacgtgtgtcatgggggtttattgtgcagattatttcatcacccaggtattaagcctagtacccattagtgatttttcttgatcctttccctcttctcatcctgcactgtctgataggccccagtgtgtgtggttcccctccgtgtgcccatgtgatctcatcatttagccctcacttataagtgagaacatgtggcatttggttttctgttcctgcgttagtttgctaaggataatggcctccagcgctatccatgtctctgcaaaagacatgatctcattctgcatagtattccacagtgtatatgtaccacattttctgtatccagtctatcactgatggacatttaggttgattccatgcctttgctattgtgaatagtgctgtagtgaacatatgtgtacgtgtgtctttatactagaacagtttatattcctttgggtgtatatcctgcaatgggattgctgggtcaaatggyatttctgtctttaggtctttgaggcatcaccacactgtcttccacaaatgttgaactaatttacactcccaccaacagtgtataagtgtttctttttctccataatcttgtcagcatgtttttttttttgactttttgataatagccattctgactgatatgagatagtatctcattatggttttgatttgcatttctctgaagatcagtaatgttgagctttttttcatatgcttgttgactgcatgtatgtcttcttttgagaattgtctactcatgttttttgcccactttttaatggtgtttgtgtttttcttgtacatttgtttaagttccttatagatgctggatattaggcctttgtcagatgcatagtttgcaaaaattttcttccattctgtaggttgtctctttactctgttgagagtttcttttgctgtgcagaagctctttagttaattagatcccatttgtcaatttttgcktttgtatttctctctatagacatttgtacagggcacaaaggcatagagataaatcatatgaagttcccacttttagggggcgaagagaaaatggagttgatctgggagtcaggcttttgcaagaatgcagaaataaagttattggatgttataagactggtgcaaaagtacatgcagctgggtgagagagatgagaccaagaagaggacagagacatgaatggttactacagaggaagaaggtttgagaaataaaactgagtagagagagagttwtgtgagatgaagaatgtgcaaagacattgagatctcagtgatgtctctaacaaaaatctattctgaacgatgatgtaggacccttaataacattagtactggaaatttggccataccatttgcatttgtcaggaaagacattgaagtacctatctttggtggataggctggagcatgagatgatggtctattctcttgaatatcttgaaagttcagggagcaaaaactatagaatcaaaatacttaatggacatctaaagtactgaaagtaaagaggcttgctctctctcctctctctaacctctagacttgctacttctccctccctcacatctactaagccattatcctccctgtgctctttagttgactgatatctcctcctttcctggtccatctggtcttgactgtgtactctcgagtcctgtcagaatttatgatcagcctttccatttttactccaattcccttcaccttctgtaacatgagatatgccagtcacctgactcctagagcaccctccttctcaggctttgctgcccttgcccgtgagcagcagagagctgttggagaaagtggcttaccaccttgcttttactgtctgtgttcactgcaacttgcccctgctttcattcacctctttgcagtgcctcataacaacaccctcttggctttctgtcattcccctggtcatgttccaacgctccaaatcccagacaccctgaatccctaactctcgcttagtaccagcaagctcaactagtcctcatcattaccacccagtcctcctgaaccctgacttgtcctcagtctgtcccattccacacactacaatggtgactattattattgttactagaagtaacagtagcaactgtgccaaactttacaagttacatttatatgcacatttttgccttctgattcccagagagagttttgggtcttgaagtagatgtttataaaattagaatctcagagagaaccaggtgctgtgagaactttgattctgagaagttggacactatacagtagaagtacttttttttttgttttgtggtttccagaayccaggggtgtgcttggagagcrttatcgatgaaccagaagctctcaagtcacgtttttcagttcccagcagcacccaggctgtttgtcccctcttgcaaccagctcacagcatctgcttatttttgcaagcctgttttcagtaatgttatgattcagtagtacaactttcttttaatcatataggcaatacctgatagaaaaagttggtctagagtaattctgtcacttatcaatactccacaatgtaggtttagcagaaaactttcaaatatgagaaagcatttgttggctaaggaaagttagtaaacttagttcagtcagccacacaagaaatgcataagttgagattattatgacaaatagaactgtgtgtgtacatgtactttgggattctgtaaaatatagcaattaattcatcctcactaaggaggaagcaggaactgagagctctggagctcagaatgagtggtaacacaaaagatttgggtacttccagagacactgtttaagatgataatgttcaggcctataatcccagcattttgggaggctaaggtgggaggattgtttgggcccaggaattgaagaccagccttggcaacatagagcttatctctacaattatttttttaattagctgggcactgtagcacatgcctgtactcccagcaacttgggaggctgacgtggaaggatctcttgagcccgcagggtcaagtctgcagtgagccatgatcatgccactgcactccagcctggrcagcaaagcaagaccctgtctcaaaacaaacaaacaaacaaaaataaacaaaaagaaaaaagattgttcataagtaattgttgaaaaataaatgaattatatgtaaaaaaaaccagaatgtgacataaaatgtttcttaaactacatataaatgcaacaagctaaacttcatttatgcaaatatttggagagtttctagattctgactttgagcctaagggcttttaattaatacactattctaataagcttgtgaggcagcatggtataatagaaattgtagtttccattccttttcattaagcctgtttaagtctaaggggatataggttgtaagttaaaatgggaatgaagcatagttgaaagttaaatttgcagtagtaaacactgtaaaacatggattcagtaattaaaaaaccatattaatcttggactagaatggtcctatttgaatgaaccattgtggcaattcagtttattgtttttgtttgtttgtttattttttttttgagatggagtctctcttgcccaggctggagtgcagtggcatgatctcagctcaccgcaacctccacttcctgggtttaagcaattcttctgcctcagcctcctcctgagtagctgggattacaggcacataccaccackcctagctaattttgtatttttagtagagatgggatttcrccatgttggctaggctggtcttgaactgctgacctcaggtgatctgcccacctcggcctcccaaagtgttgagattacaggcatgagccactgcgcctggccagctttattgttgaaagagttatatacaattatagtgctgaaaaaattgttacagataattctagttcagcaacttggttttaaaaatgagcagtccaggtcctctgatatgtatacaatggtttgaccaaggtcacttggtttgccagaaccagtctaaatgcaggttttcattacagaacactaatgaccctcaagagaagtttaaatcatgtttattctcttacaatttttttttttacaatatcaggaagtacttcagaatttctcatgtgaagcacttactatgaagaccttattttctctcattcatgtatgtttttcattttttggatgcagtagtttaggggaatccgtaaaggtgagggtacagagtctcagactttggagcttagaatgttctgggagaattgaaaaagcattgaaaaatgattaatgaaaattataaaatcaaagatctgatgcttaaaggagtaaatccacagctatccaaaacttagccattcagcattactcagttcctaggagagcagttttgctattttaagccaggtaacaaaaatgtgtcccaaattcccaacggtatgagtattcatgtatgtttaggcrtcaccataagttattactcctaggttgtgagttccatgaaattagggaccatttgtttgtcagtttcctgttcttggctcagtacctggcacagggtgactgctcccatgaatggycattgagtgattatttaatgaatccttcacattggccttaatgttggttagatgagaatgctagatattttttaatcctaggatgaaaaaattataatattctgccagtagttctgcagtgggaggcagcatgttatattgaaagaatatggactttagcattggccagacctcggttcaactcatgcaccattaggtgaatggctgtgggcaaattccttaatctctcagcatattaattttctttcttatggagtggggataattcctactgcagagtattgtgaagagtaagtgaactcagatgggcaagatacctagcacagcaccagagatgtagtggacagttggtaatcatgtgagattctttccmttctcctgtcccacaccatcctctgatcttctcatggtatagggctttcctcacagttcttttgggaactcttagaactctataacttcgcttgtctatggcaaacttttcttctctgttgtagtcatctttgtgcagatgttttatttagattcattgaatataagacttggaatattgtggctttcaaaaatgatataattggcacatttgaatctgtcgatttgtctgttggcaatttcatatgtgtaacactctacccagaattgggagacctgcattccacatgactccattgctgataaactcagtgatctctaagtctccattttctctgtgatcaccagtgggtggcattttatagcaaaaaggttataggctctagagttcaaattttggatctgctgctaattagctggatgatctagggcaggctcttttccctctgggttcccttggcttcctctggaggacaccactgtctgtgctgtaggctgctgtcatgatttgataagataaagtatgacaaattcctgcctcagagctttgaatgttgtaaactcttaataaaagagtggcaaaacaccttccactaaatactattatggttggtgttattaatgtctatttcccttgggtagttgagggatccagtaatagaacataactattatagctgaagaattttagaagacactgagcaatttcttcaaggtcacataggaagtgataatggaatagcatgtagttgtgaaaatgaggaatagtccatcttattaatatgctccttatttgtggaatcagttatttggattattttcagtccttctcttttatggatagcatgactgtccatgtccttgtgcagattattttccccctttggattttttccttcagctttgttttccaatgcgaaatttctaggtcaatggtcataaacatttttgtagctcctgttaacatattgccagatagtgtgcagagaaacagttctagtggacaaaaagcacagatttccaaagtcttggttaaaaacaaagacttgagtggcatgtagattttattccaatctcagtcacttrtttgtgaaatgactttgtacggattacttaacccctctcaatctattttctcatctgtaaaatgggataaaagtagctacctcatgatactggtcaagctattattgcagggtgtttatagtgctcagccttcattatcttgaatccatgtctgctcctctccactctccatctttcacttggaccactgcctcctaattagtctccctatgtgtattctacctcatgccaatccattatcccatctacattgtcagtaatcttgataaatagccaaaacattaatcttatcgagtgaacccctttgtaacccttagaatgcttccccatgcttggagtatggaccctgctgccctccccagcctcaactccctcctctcgctcattccataaacagccattcccagaatttatcacaccatttttttcttctggagttggaacttgccattttcttttgtttcttggtttccaaataccccttgtatacatcttatccttttaaatattatttttgtgactgtttttcttttctttcctttttttttttttttgagtcggagttttgctcttgtcactcaagctggagtgtaatggcgcgatctcgattcactgcaacctctgcctcccaggttcaagcgattctcccgcctcagcctcttgaatagctgggattacaggtgcccaccaccacgcctggccaatttttgtatttttagtagagatggggtttcaccatgttggccaggctggtctcgagcttgacctcaggtagtccgctcrtctcaacctctcaaagtgctggaattacaggcatgagccaccgcgcctggacgtgactgatttttctactagatctaagcttcacgatggcaggggccacttatatttttattcactgttgattcctggggatcagcacaatgaccagcactagtgctcaataaatatggaggaatgtataaataactatataataactgttattagtagcagtaaacaagagggaaataattttagatatttgttaaatgcctttgtaagtttaaattgctctgaaattaaatatgtaggtgtttttcaagggcctctaaaaaattcaaatgtatcttgtaattaaataagatcttgtttttttcttatataatctttcatgttaatgagggaaagtctgaagagagggcaaataaacatagtttaatatctatcagcttttcatcttagccagcattcttcacccaagccctataataacattacctaaaccatccaggtggctgggcatagaatcatcttgagccaaatagcagaaggatttaatgatgaagctgaacattcttaaaagattagattatgcctggtacatttcctttcatccgagacctcctgccattttggtttgcatatcccaaaagtgcaagctatttcatattacactcttaacttccgcaggttcaaaactgcattttgtggctgggcacagtcgctcattcctgtaatcctagcactttgggaggccgaggcgggcggattgccagagctcaggagttcgagaccagcctggrcaacatggtgaaaccctgtctctactaaaatacaaaaaaattagctgggtgtggtagtgsacgccaatagtcccagctactcgagaggctgaggcaggagatttgcttgaacctggaagagggaggttgcagtgagctgagattgtgccactgcactccagcctgggtgacagagtgagactctgtctcataacaaacaaacaaacaaaaaactgcgttttgttcattcagaaatagagttcattctttcattcattcagcatttatttcacccctacaatattcaaagccctcattaggcactgaacatataacaaagaattcaggttataagagaggtatattttggaggatacacactctccctgtatctcatgtttacctgtggaagaacttttgttagaatattagcatatacctgggtatgtatatgtaacttagtttcttctgggtcttctctttgagacttacttacctgcaaagatggcagtggttttacagtctattctcatttttatgacaagctaagcagagtaggtcatgtctccaagggagaggcttaccacatggggagagggtaagtagaagatgagagggggtccggcatccttaagccacagtttccaatatatgttaagttttgttaataaaaacacctacatttcgatctgttttctgtatctttgctccttgggtttttcactcagtaggaaagaggagtatttattattttgaccttgggagactgtgaagcttatggcagcctagcctacaggcaaatgactgtcaaaaccaggcacagctgtttgtgatgggtgtttaggccttagcaagtgcaggatgcactggtcctggcaagtggagccatgctgggctttgtgggtgggctttttgggttttgtgggyacagcttggactcgtgttgcaggtgaggcttaggaaggggtttgacatttttagtcatttggggtggaatagcatttgctgcttttactgtatttcagtcaaggctctaggccacgacttcaaactgtaaaagccacagagttttgttttgttttgttttgttttgagacggagtctcgctctgttgccaggctggagcacagtggcaccatctcggctcactgcaacctctgcctcccaggttcaagcgattctcctgcctcagcctctcgagtagctgggactacaggtgtgtgccaccatgcccagctaatttttgtacttttagtagagatggggtttcaccatgttggccagatggtctcgatctcttgacctcgtgatgtgtgtgcctgcctcggcctcccaaagtgctgggaagttttaagagtgctattgtgtgaggttctttctttaaattgtgagagacaagccaaggaaatgataaattggcttcaccacattcacttaattttgttctaggccaaatgaaggccctggagggactaatcttatgtaattttgtagtttatctacaaatcttaataggccacctgtgatatgaccaacctcaactgactaatcaagagcagaccaagaaagcatcctctgtatacgtatatcaaaacatcactctatatcccataaatatgtaaatttattacatatgaactaaaaataaaaaggaaaaaaagatggccagaagtgactggccaccaagactctaagagtaggagatctggtgtgccaaggaaaaaggaattgaatcagaactaagtcaaaaaggaacacatcctctctgcagagaagcaggtctcaaagacaagacctgtgagaagctgaactctacactgcctagggggaagaagcattgttctaataccccaacagaagttcctctacaagaaaacgtgagttttgtttgctctggatttcataattaagttctggccattaggtcatggaactgtagctgtaaaagatgttggattttgttatttagcagataaaaaggaatgggggtggcccttaagaaatatatggcatattcttgggttgagatagacaagcaagtcagtaatcttattgcaaaccagaaagttaagaagatgattacaaaggccgggggttggtatggattctagagatcaggttttcttagaatatcaaggagaaagtagaattggtttgaaaaataagttttgttatgatcagaaaagaagcagtagtagactgaaaagactaagctaggagaaatgttcacatttcatgagaggtatgaagggagaaatgagatcttaagtcaggatacacagatataaaaaggaaaagagatcactctaatgattaccaattagaaagtgtggtgggcctgaagaagtgagacaagatctgaaatttttttaccaggttcagaaaatgttgccaagtgtccctttaaagatgtagtgagagtctgaagtatgatttgtaaggccaagggctggatatggtcttgcattttgtacactgagtaaagatttctgctagtagaggttgaaatgcaactgctgtcttctcrctgtgggatctcaccagggtttacatctgccctggaggggtactttcttctagtttgtataaaatattcatcatctcactaggctagtgttggtgaccctgggatagcaatatcaagtggttacagaaaagttgcatttgcaggggaaagcccagcgatgccagcataacatactgaagaattcactgagtttcaaggtgttaacattactgtgattgggcaggcaggtatcacttgcacgctgaaggaacattctcaaagttttttggagttcagactctaaggggaggcaggaraagatgaggggtattctaggaggagacagtctagggctggctggatgtggcctgatgagagtcacctcctgactgggattatgtaacttgggaagtgaaggttgacaagatttatttaaataatgcattttttttggtaggggagatcatattcagaaccttaaaattctctgtcatctgggagattttatgataaaacattgagraatatgttagaaaatcaaatatctgktgcaggaagttaaagagaaagtaagccatttatttctacccaacagtgatagctctaaagaggaagagacaggaagatgggaggagcctctgaagttttctcaaaagaaaatgggatcagtgtatgaaaatttaacatgagggatataccctacttctggcaaaacaaacaaaacagaagtactgaggacctggtcattaaaatgtacagaaactctaatcttttaagtgtccataaaaaggtgtagctcgtcacaggccccgaaggatgttggcctcggaaatggttctggaatcaaaagaagttctcgaatcttctagagttcacttggaaaaaatgagaggactaagagatgaccttcctcaggaagcagtttttacagcccaaagcaattacacagcaaaaagccgttgcaacagatgctgttgcccaagactaaaaatttctgcttgtaaaagattgtgaagatgatgactctactacgcagagaccacattcagtttagtcctttagtactagaaacatgggactcagaagaagtagaagataggaaatttagaatgtgcgggctgggaaagaaaggttctacaaatagggcctggagggactacggttgccaccactgcaaatttctgaactttgaaagaagtgagtgatgctccaaatgccaggctttgagggagaagacactttgcaaagtcagattttttcctgccagtatgcatggggccaaaattaacctcctgcttgaagatttcttctagttgagggttttttttttcaattgtgctaaaatatacatagtataaaacttaccattttaaccatgttgaagtatattgttctgtggcattaagtacattcacactgttgtgcaatcatcaccaccatccatctccagaaccttttcatcttccccaactgaaactctatacattaaacaacaactccccctgaagcccctggcaaccccctttctactttgtctctctgaatttgactactctagatactgcatataaatggaatcatacagtttttggccctttgtgactagcttattttatttagtttaatgtcctgaaggtttatccatgttgtagcctgtgccagaatttctttcctttctaaggctaaataatattccgttgtacagacaccactttttgtttgctttttcattcattgatggatacttgtctcccaatcgagttttaagctttagaaaattggcatagtttcgcaggcatcctggcaaggctgaaaccaggaggactttgtttttatttgtagaaccttctctatctttcaaatgtcctggagtttctgctgttgtctttggaagcaattacatggctctgggttatgccaaattctggattctgggaacactggcttgcttgttgtggtagctacttcatggcctgaggattagctttccttttaaatattgtgggtgtggggcagatgatagtcttgcctgaccttataattctttggtctctttaaaagtggaggatgtcaaagatttgagataacgttgactcaacatctgaggctctgaaggaactatactttcttcattacagcttgaagctgtttcaaaacaaacaaaaacaacaaaaacctctacaattctacccaggcatcaagagctcctccagctggtaatatagaatacgaaatttgagaggatgaatttgacctttaatattgttggactttgtattggatatctttcctccatcacttcaaaatcgtcttgcttggcctcttattgcaaccacagctgcagtagacagttccatacaagcttccaagaacttcatgggtacatctggagagcacctcacctggggccacattctctacctktcctgtcttactcttcctcctctgggcttctttctggtgcatgggggtggggggagatattaagtattccccaagagcaatggtcagtttagtaattcgtctttgtatttttcttccttccttccccrtttttaatctgctcctcaggatcacttcaccaactaaatcctgcattcaggattttgtctaaacttctactttctgggaaactcaggctaagacagactatataaagatgctccatgacttagatggggttatgtcctgagaaacccataagttaaaagcattgtaagtcaagactgggtgttttgtagacatgatgggatgsaaaaccaaaaaacactatatccaaaaaatgctggcatcacagttacattgtagagtattggttgtttaccctcatgatcacttggctgactgggaggttttgcttgctgccgctgtccagcatttcgagaaagtacggaactgcatattgttagcctggggatagatcaaaattctaagtacagtttctactgaatgtgtacctctttcacatcatcatgaagttgtaagttgaaccatagtaagcctaggaccatctgtgtaaaggcaagaaaatttgagtctagaatttaattcctttagaatttaacatttttggacttgcaaggagatttagtttctagtctttaatatcttaatggaaaactaaggtttatatttaaaattggcgctgttatcttagtgtttagaaaaaaaaactagacaaatttaacacagtttaatgaagccaagaacgatttgcaaattgggcagcccccagaaccagaataggtccacagcgattctggggctgccacatgggaggataacatttatggtcagaaaagggaaagtaacagaaaakggaagtgaggtacagaatcagctggattggatatagctcagcgtttgccttatttgaacacagtttgaacagctggccacctgagattggctgaaactctgtgattggctgaaactctgtgattggtacaagagtaggttatggtctatttacacatcccattaggttacagttcactgtgtccatatgtgcagataaatctttaggccaaaattcctttttcattgttcttttgttctgtaagtgctcattaaatgcccagtacattaggagcctttgaggtaatcaaagctacttgttgacatgagaatatttgagtacttcatgggtttagtgtcatgagataatatcacataaaccctttgggtttaccaaaacaggaaacatggagagaaaggacaaccaagtcatccactgggcacttctggattgttctgacatcctaattatgtccctaggctgcaagctcttccctccatkcctgcttcctcttccatttctgcccctttcttatctacagacctgtttctacagggaacagatatttcagtctttgggaatttatccctattccctagccccccaaaaaacccacccctgtggtcctgatagtttcctcccttgagaatctagatccctaagacactcctgcctctcgccttcttggtcccatctggcggctccttcctcctcagctttccttgagtttagggctggcccttgaccttagtgcctgaaggatagaaggtggggacatttctcgaagttggttagcctgttttctggctcggggatcgcctcctcttctgtagggtaattgtttcccattttcattcttacccttcccaccacctgtttatatatgaagggtcaagaatacctatagccctgagtccatcctccctggctccccaagaaggttaggcttgattccatgccaggcatgttgagaagactgcagacatgctctgtgtgacagagtgcattttatgatgcttcaaagcaaggaggcaaagataaaatgatttcatttttctattttcagcttttttgagttgagggttgctggcctatgaacttgatcacaagagccttatttatttggaaaaatgtattctaaattctaaggactagacatgttagtgtactacattctaaaatttttcttaaattggggcctacctatagtgtatagatattaatgcagtcattatattgtgttaataattgggactacaagccttaaccagagtcttagaattttatgaattttaatttataattttattttaagggtgccactagaaaccttgtgattaactttaagggctttttggctgtaatgactgtaattaggataattatgcatactttctttagcattgtgtcaacatgatagtgagggcataaacagccaagaagcagttataggtattccctgctcattttgcattcatcacacattcattgaatgttttgtacttatctcaaatagtagaggataccaatggtgtaagtttaagaattacatggttcttgtcctccagaaaccatggagtccagcaggaaggaaatgacatactggtatttggcaggcagagatggaagtttggtttgaagaaaaccttttgtgctgatgttacagctgctgcagtcactagccacattcattgtgcaaaggctggaggattccacagtcagcatggaagggaccaattagtcatgcgtgggtttcatccttgcctctataagaagtaacatctcaatagtcatggtggtgttttgaatttaaataatcacacattatttcttggtatgtttttcagatcgccaaatattgtggttttgtgtcacatgtgcattatttgttaaaacaggattatggtgtgaatgatggagctgtttttttggggtggcggtggagggtgttatgtttagactgtcactcttgctaggcatcctttgcctgactgtgtgtaaggtgtggcaatctcagtagtcacattggccctcccatttcccgtagtctttggaaatctgaccggcagcattgagaagtaagtaaaaggggtgccctctcagatgtcccttccttttaaggaatgatgtgtatcaaatcacaagatcggtcggggaaggagcagcgtgacacaggtgtatcttttctgtggtttgcgatgaggcataagtgcataaattccaaccaggaaaggaagtgcagggaattctactctcaggacatccttatggtcctgacaacttctttggcaatgtcagcagcccttggcattttgtcatgcattcttctccaacttgaaattcaggcttagtgcatgcagtatgccacagtcaggcttgtggctactccaggaggggagctgtgactcattcttgagtcacttggccagctttggtttcaattaagcaaatgaatgaaaacaattaaaaacagaagttgccgactaaggctaataaaagggcagcagtaatttttgtctactgtcactgttgtttctctagattgtcatatctttaaaaactyggtaagacaaatctgttagtgtttgattttagatttcttgtttataatctaaaaatcagacccagaatctgatttacctttttggttctaatctagttatattgtaattctaacactatgcacaactaatttatatattaaatatagaatttttcattggctaaatgcactttcctcaaatttgtaagaggttttccactattcaaaagtgttacatgttgcattaagtcattgttgattattcaaattattttcagatttattttccaagtactaaaaaaaattgtgggtgtattttcaggatgttttatctatcaattcatatttttgagcccctcctctcccttctcaattcacattttaaaaattattagttcatcaaatctaggaactgtaataatgtcctacgtttacttttctccccaaatcataaaatttcagtaaagtttccaaaaggggcataaatgtgtcctcatctctcacacactgaaaagcaaaattcttcaactgatggggtattttcacctctttgatgtctgtgtgcctctgtcatcggtgtagttcagagccttatctcccttccattagaccatcacctgatataccatggtttctttcatctccttgtcattgtaataggaacacctttccctttgctggttaactcctatttctctgcaaaatacagcataggtaatggccttggttggcctgtctgtttttggtgcctctcctgtgtgcctccctagcacttcccctttgtcatggtgcacaccactgcaccctattgtccctttgcctctgcctaccttgctgtgaacttattcaggtcacggatggtttcttactcatttctgtaactgcaatgagtaagtgagtgaatgaaatgttcatcctcattctgatggggaaacttatttctaattttagggactgaggaccaaatttgtgtatttgtcagacctggcttttcattttctccaaccactgaacatttcagtgctcgtaacactgtaggagagagtagaccctgtggtctctgtgcagtaggtgctgctgctcctttcttcctggagaattatatatttacttctttgatataccttatcactgtgaattttatttgctgactggcagtgtaaactctggctttctagaggtttatcttaggaagaactcaatatttattcacttgaatgaaatcaaataacatttggcttaattgctttaaaatgaaggaataattagaagcaactgctttgctttggagaactgtaggaaactgtaatcttacagctgtaattgcccccaaatggagaagaccttaggaatttatgttgaaagtagaacactgccaattgttctcattggcaaattggctgatatgaatgtttgccaaccggaaacttgccccatcagttcgcgtaatctgtgggaggtgaatatattttatgaagaaaagtgatagagggaaattagaggctattgttactagtgtgtgatgggttcatgtactaccaactcttctcctcaaagctgcagatagcctggtcgtgcaagaatttgtttcttgtagcacgtctcctctcatttgcctcgctgtgccgctatattttgtttagcatgtgcttttctcttaataacaacacagtgattcacaaaattccccagagtgtgtgttcagtctgaaattttctgaatgtgatatttgaaaatgctaaatacagcatataattaaaatttcagtggttaagttttcatcataacttatttttggaactaagagtttccttttcgagacttttgatgtgtaagaagggtacagtttttaacagagctacctgtgtttgttagaactatacttttttggttagaactatacttttcataggagccgttcctcctggagacacatctttgtctgaaatatttaggaattcttaagtaattgttgctaatactcatcttagttaaatggcttaaaaaacaattccacatatgaaggatgcacacacacatacacatagcctgttttgttctgtttctgttttcacaggaagaaaaagagtggcaaaatatatcttctgctctgttctaagggttttggtccagatcacaagtctcaggattcttagcagcagaagagtttatgattctaagtagaggtgcatctgtttcttgttgtaatattaatagatgacatccaggaaagtcttgggttttgcaatattttcatctagccatttcacagaatagagaatttatccttattctaaaggrtataattatttaaagaataaaccatagagttcttataattccaagataataagaatagaaggcacttttgaaatttccttgaataaatcctaatttcttggattagaattaaacagctttttgagtatggtcactgataatgtcagaaactgttttgcattcaacaaagctggccagagaccagtggtagtgctttcatcttttggtctgatcactattgtgagccaagctcctgctaagggccaaagaagaaactgtaacttctgtactcctcttatgactgtggaaacattgctttacctacagatagcatgctttttaaaatcgcaattttcaagtaatgagatttaattttttttttttttttttttgagaagggtctcattttgttgccctggctggcatggagtggtgcaatcatggctcactgaagccttgaattcctgggctcaagccatcctcccacctcagcctcctgaggagctggaactactgggtgtgtgtcatcatactcagctaatttttaaatttttttgtagagatggggtctcagtgcattccccaggctggtctcttaactcctgggctcaagtaatcctactgccttggcctcccaaagtgctgggragattcaattttcatatgtcaattaaatttacagaatttgcaaatccaattgcaggaaatgggtagatgagctttaactttttttctccttctaattgctaaccttgaagtgagctaattaatgtagatggactctgaggacatttatattcagaatttgaaatggtcagattttcaagagcaatgagtctaagatatcctttgcttataaagggtagaggaggaccaaatagtttctggagaaaggttatcttttgtactggaaaaaaaaaaacacaaaaaaaccaccacaccaccaccaaccaaattaaacctaaacctctggcaaatatgagtattgtaagcaaaacaagacaataaaataaccacaaaactgaataatttagaaagaaaatatttacactgtactgtcatttaggcctcggaatagtaagaggtttttaatatattcacacacgtttcattatttggcataaatttcttatacataggcatatttattggggagatatattccttaacattgggatatgtattagtttcctattgctgctgtaacaaattatgacaaatttagtggctgataataacccaaattcagtattttaacagctctggaggccaaaggttcaaaatcagtttcactgggctaaagtcaagatgttggcagaactagtttttttaagaggcttcaaggaggaaattaattttcttgctttcttcaacttccagaggccacctggattctttgccctgtggccccttctttatccttcaaatcacatcactgtaatgtctgtttccatcacaacattgctttctcctgttctgtggtcaaatcttactctgcctcctttttataaagacagttgtgattatatttaggactcacccaggtaatccagtataacctccctatctcgagatctttaattatgtctgcaaaatcccttttaccataataaagtattattcattggttccagggtttgggatgaggacatctttggaggctattattcagcctaccagcatacttacaggtccttgcagcatagaccctatggagctgtgttctgtaaatcatactgcatagttattgctttgttcccatcaaatcacctgaagtctcacatgtttctgcatagtctctttcaggttttgttcatgcaaactaatgtcactcactcctgggcagaggacttctgccagtttctccatgactgctacataaatcactgaattatagtctcttcagctaccacttctaaggtgtcattcaccttgaactcctgagaagtatgtcttaatgcccgctcttgaacttgtgtggcatctctcgtgctgtgatttgggtaccttttgttagctgttgtgatgaattaacattattaccagcacataaagtaacatcagataaagtaaatgaaccaattgacatgccactgaagccggggaaaacacaagtgtgggcaccaggaatgcccagtgcagtgtgccaggctggctcttgttgcctgtatgggtgtgagagctatcgttgtgctatgctggttggccataagaaaaacatttattagctgtactgttaagaatgtaatagatttctatattttttcatatagaactgttctcagattagtttcataaggaccatgcttaatgttcaaagcacaaatttgaaataaaatggtgaggtattgaattactgagagttagtccctttgctaaacccccaaatctgtggtttggaattagggctgcttccatagtgtaatgctagttgttgttactctcagcatgagctgactgttaataatggctgtgtaattttgagcagaccacttaagttctctggtcttcattttctttatttgttaagtaaggaataatttgactacaattctttatgacaatatttcaatcacgtgttttaatatccatggataatctaaaatatgtaaagtataatctgtatcatttgaatagtctaaaactatttatgttggaaaattttaaacatacacaaagagaatatgaactgtcatgtacccatcacctggattcaacggttatctaggttatcacatttgcttcaactatacccctttattctttaaaaatgtatattttttatttttaattggcatataataattgtgcatacttatagggtacaatgtgatattttgatacatgtattcaatgtataattattattctgcctaagtattaaagcaaatcccaggcatcatgctgtttttgtccttacacgctttgatatgcatctttaaatttttaaagattttcctaaatagtcagaatgccattatcacatctaacaaagtgagcaatttcttattataatctaacatacagtccgtattcagatttcttagattgtctcaaaatgtttcctctacacttggctccaaagaaggatccaaacaaagcccatttggatccttactgcatttgaatattacctgtgagtcacttttaatttagtggtccttttctctaggtagtaacgagatcaggaaacctggtcacttgtctcgtagactatttcacattctgtatttgttgtcttgctttctcatggtgtcattaacttgttcctctatatattataataccttaaaattgaatattagctctgaaggcatgaacagattaatattcacctatttttgctaagatacatcatagccgatgcagtgtacttcattttgttccacatcagaggtaaataatggctggttgccccacacgtagatttgctaagattgatcggtgggtttaggtggtgacagtatcatctcttcaatataaagtttttcattgacttttcatcaatcatgtcatttattattaatctttgcctaaaacaattttttaggacttgcaaaatggtggttaaaaaaatgtcattagttctttaacattttttgactggaattcttttgtaaagaagaatcttttcttatcgactaggtaaccctgaaagtgtaatacatatgggaagggcagaagtagttaggtaattattttcctttgattaccaattttcagagtatgtcatttctagtaatgactaattgatttctttttggaggggaggggcagactttctattgttttaagtctcattctgagctagtrggtctttatatatattcaatgtgttttttatcaaggtactcataattctttaaaaaaattttttagttttaatttttgtgggtacataggtatacatatttatggattacatgagatattttgatataggcatgcaatgtgtaataatcacatcagagtacatggggtatccatcatgtcaagcatttaagctttgtgttacaaacaatccagttatactcttttagttattaaatgtacaattattttttactacagtcaccctgttgtgcttgcaaatagtatatcttactctatttttttttgtacccattaaccatccctacttcccctccaaccacccactactcttcccagaatctggtaactatccttctattctctatctccatgagttcaattattttaattttttagctcccacaaataagtgagaccatgcaaagtttgtctctctgtgcctggctcatttcacttaacataatgacctccagttctgtccatgttgttgcagatgacaggatctcattttcctttatggctgagtagtactctgttgtgtataagtaccacattttctttatccattcatctattgatgggcacgtaggttgcttccaaatctactttaagctgataacaaaactgtttgcacaagcaaacaaacaagcaaaaagaaaactaataaatttctacactttttaacttcgtccctccactttttaactctttattatttctgtttatatcttattgtactgtctgtctggaaaagttgtagttattatttctgattagttcatcatttagtctttctacttaggggagtttacttactatagttacaatgttatataatattctgtatttttctgcgtacttactattaccagtgagttttgtaccttcagatgatttcttatttctcatttatgtccttttctttctgattgaagcttttaacatttcttgtaggacaggtctggtgttgatgaaattccttagcttttgtttgtatgagaaagtctttatttctccttcatgtttgaaggatattttcactgaatatactgttctagggcataaattttttttttttttttttttgagacagagtgtcactctgtcacccaggctggagtgcagtggtgtgatctcggctcactgcaagctctgcctcctgggttcacgccattctcctgcctcagcctcccaaatagctgggactacaggcgtctgccaccactcctggctaatgggcataaatttttctccttcagcactttaaatatgtcatgtcactccctcatggcctgtaaaatttccactgaaaagtctactgccggttgtactggaattccattatgtgttatttgtttcttttttctttctactttttggatcctttctttatctttgatttttgggagtttgattttcaaataccttgaggtagtcttctttgggttaaatctgcttagtgttttagaaccttattatacttggatatcgatatctttctctacattgggaagttctgttttattatccctttgaataaactttcttccttatctctttctctacctactctttaaggccaataactcttaggtttccctttcgagctgttttctacatcctctaggcatgcttcattgttgtttattcttttttttcttttgcctcctctgactgtgtattttcagctagcctgctgtcaagctcactaattctgcttaaacaattctgataaagactgttgcattcttcagtgtgtcattgcatttttaaacttcataatttcgacttaacctttgaaaattatttcaatccctttgttaaatttatctgatagaattctgaattccttctttgtgttatcttgaatttctttgaatttcctcaaaacagctattttaaattctctgtctgaaaggtcacatatctctgtttctccaggattggtccttggtgcctaatttagttcattaggtgaggtcatgttttcctggatggtcttggtgcttgtggatgtttgtctgtggctgggtattgaagagttaggtattgtagccttcacagtatgggcttgtttgtacctatctttcttccaaaggctttccagttccaaaaggacttgggtgttgtgatctaggctgtatctgcattargaggcaccccaaacccagtaatgctgtggttcttgtagagttgtagaggcaccgccttgatggtctttgataagatctggaagcattctctggaccaccaggctgaggcttttgttctcttcccttactttatcccaaatagagtttctctttctgttctgagccacctggagctgggggtggagtgacacaagcacccctctggctaccaccaccgggactgtgctctgaagccagtatagcactgggtctcacttaagacccactgtaaccactccctggctactgctgtgttctttcaaggccctggtgtcctaccatcagcaggtggtgaagccaggcttgtatccttcccttcagggcagcaagttcccccaggccccaggtgggtccagaggtatcatctgggagccagggactggagtccaaaatcttagaagtctacctgtgttctattgtactgtggctgagctggcatacaaaccacaagacacagttcttcctactcttccctcccctttccrcaggcagaggagccttaccccatggccagcatcacaggcccacagggagtactacgggactaccaccaatgttttcttaagggccaagggctcttcagacagcttgtcattaatgctacctgacctgggactccccttacagggcagtgggctctctgttgctgggcaggtccagagctaagcctgtaattggagaccccccagagcccacttggtactatatccccctgtggctgagctggtacctaaggtacaatacaaagtcccctttgctatttcctcttcttttttcaaacagaaggcatctctctccatagccaccacagctgggaatgtcgtgagtctcaccagaagctagcaagtctcagagtctgatctgaggcccatggtgtactacctgggtattgataatggttattcagggaccaagggcactttagtcagaaggtgattggtcctgccagaactgagtccatcgcttcatggcagtgggttcccttgtggcccagggtgtgtctagaaatgttgtccaggagctagggcctggaaagggctcatgactgtgatgtcctatcctgctgtggctgagctggtatccaagatgcaagacaaggtcgtctttactcttccatcttctctgctgaagcaaagggaaggattctcttttggagctgtgagctgtgcagcatggggttaggggaggggtgtggtacaagcactcccttagttgcccagctggtgtttcagtaggttgtgttcccccacagtcccctggctctgagcccagttcaacactaggaatcacctaggagttgcaatccctgtggtctagactgcctttcaagtttatgttgggccctagagcactttagcctgtggtggtgaggcttgtgggacctcaagttctgactgctgagatggaaaattcccctctggccagggctggtttaaatactcccttcatgggcggacttcagctgagttcagcctggtttggatttctgctgtgatggggcaacactgagttaaatgcaatgcctcgcgcttgctgcactctttctctaccatgtgcacagattctctctctctaccacacagctactaccaggagatggggggaggggtggcatccatgattcaagactgtctttcctatcctcttcagtgctgctttcagtgatgaagttaaaaccaggtactgtgagtgctcacttgatttttggttcttatgaaggtgattttttgtgtagttagttgttaaattggtgtctttgaaggagacaattggtgtagccttctattccaccatcttgctctaccccctacccattattctttttgaagttcaacttgtcctatgtttggccaatgggagccccttgttgattctttttgttttgttttgtttttgtttttgagacccaagtctcgttctgccacccagactggagtgcagtggcacgatcttggctcactgcaacctccactcccgggttcaagtcattctcctacctcagcctcgcgagtagctggtattacacgcacctgccaccatgcctggctaatttttgtatttttttagtagagatggggcttcaccatgttggccaggctggtcttaaactcctgacctcaggtgatctgcccgcctcggcttcccaaagtgctgagattacaggcagccaccgcacctggccccttgttgattcttgtaacaattttttacattagtttttaaaagatgcaagagatacatctctgtttatatatacgtatgttatatatgtaacatatrtaacatatatatcatatatgttatatatttatatgtgacatatctgtttatatatacatatatggtatatatgtaacattttttctttgatttatttttaattacatagttcaatagcattaagtatgtgtccacattgttgtgcaatcatcaccacaattcatctccagagctcatcttcccaaatgtaaactgtgattctgtaacattaaacagtaatttcctattcccccttcccctagccattgacagccaccattctactttttgtacctatgcatttgactacactagatacctcatgtaagtagaatcatacatttgtgcacttgtgactagcttatttcacttagcataatgccttttaggtttatccatgttgtagcatatggcagaatttccttcctgaaatttaaggttgaataatagtccattgtatgtatacaccatattttgttcttccatttatatattgatgaatacttgagtttctttaatcttttggccatcgtgagtaatgctgctctgaatacgggtatacaaattcaacttttaaattaaagtgtaatattggtttgtaccttctttaaataattatacagcttactgaatattcacaaactgactctcctatgtagttagcataggatattaccagcaccctagaatctcactttggtccctccctcaggcctcaaaggtacttctatcttgaccktcaacgctaagattagtttttctgatttcttttttttaagtgtacgtaaatagaatcacacataatgcactcttttgtgtctggcatcttgtgttcaatatcatgttttgagacatatccacattgtcccatgcagcaatattttgttcatcttataaatgtaccatattttatccatttttctgcttccaagttttagtattacaaatatactgccttgaccatcctgtacatatcttttgctgaatgcgtacatatcttttgggacacatttctgttgtgtatagaactaagagtggcttttaactgtgtcgctctagctgtattacacagcatttgccagagtttccctaaatattcttaatatcgttgtgttgttctatgtttaatatttaatatgccaagggttctcagggaacatatggtcacmgttttttttcccccaatggtgtctgtaaagaaacaggataaacatttcaccatagcatcaactttccaaatagatatgaaggcactgtttttagctactgtcagttaaatcagtttggtcatgtatgcaatgcatttacagtttcttaaattttcttagtgtgtattgtatttgcatgatcagaaattctaaagccatagatatttttggtggtggtatgctgagaagttgacaaaagttgagaggtaaccaggaggtaatatttcctttttgctgatgtggccacttctatgtcattaaagccctgtcagccacccagaaaaccagctatttcttttaaattgagtgtttacagggttttttttttttttgtcataatatcgactggagggtaaaatttgttatcaagctgacatcatttagtaacattcaaaattctttatgtggaaacaatttataacaattgatttgtaatttaggcatggacatttagttttaaaatagcgatgacatagatttacttatttttaattctttgccttcaaaactgcaatgggttgttgacaaatttctgtcacttctcaccaatwagattctatagggaacgggagagaagaaagaggttgtatccatggccatgtcccttctccagaatatggaattacatgttctaaaaactgttctaaaagctccagagtgaaaagtccaaaacagtactgttttggttgatttgggctgctataacaaaatactgtaggctggggagcttataaacaacaggaatttatacagttcttgaggctgggaaatccaggatgaaaataccagcagatgtggtgtctggtaagggcctgtttcctgatttatagatggcaccttctcattgtgtccttacaagatggaagggcaaatgagtccccttgggccttgatatggttaggctttgtgtccccaccgaaatctcatcttgaattgtaatcctcagatgttgagggagagacctggtgggaagtgattggaacatggggcagtttcacccatgctcttctcatgatagtaagtgagttatcatgagatctgatggctttataagcatctagcatttcccctgcttgcacttatttttcctgacaccatgtaaagaaggtttttgctttcccttcaccttcctccatgattgtaagtttcctgaggcctcctcagccatgcagaactgtgagtcaattaaacttcttttctttataaattaaccagtcttaagtatttttttttaatagcagtgtgagaacggactaatacaggcctattttataaggtcactaatttcattcatgaaggctctgttcgtatgacctaatcacctcctaagaggcctcatttcctaataccatcaccttcagggttaggatttcaacttatgaatttagggtgggaggaagacacaaaccttcaaaccatagcaaattctgtgggtaggaagatcaggcctgatgcagtgggactcattattagttgggggttaagcaattccaaaacaaaacccaaacgcacagaaatataccatatgagtccatttatatacagttttagaaaaggcaatttaacttataatgacacagagcagattggtagatgctagagacaggaagggatggaagacagacatgaaaaaagagcataaaaaaactctgcaagctgttgagggtgatggaaatgttcactcccttgattgtggtggtggtttcatagatgtatacacctgagataactcatcaaattgtgctctttttttctttttcttttttttttttgagacggagtctcgctctgtcgcccaggctggagtgcagtggcgcgatctcggctcactgcaagctccgcctcccgggttcacgccattctcccgcctcagcctcccgagtagctgggactacaggcgcccgccaccacgcccggctaattttttgtatttttagtagaggcggggtttcactgtgttagccaggatggtctcgatctcctgacctcatgatccgcccgcctctgcctcccaaagtgctgggattacaggcgtgagccaccgcgcccggccaaattgtgctctttaatatgtgcaatttattgtacatgagtcacacctctgttaataaacagcaatgatgtaaaatgtttcctcttaatgttcttaaaaattaagttgatgatggttaggaaattactattttttaggccatgttgcaagaacaaaaagctcagctagtatactttatacaatataacttgtatagatatatattcatataaaactttaaaaagtgaaagtcacaatataaatctcacagtgtactcaggatattgctatttctgttagataatagactttcagtttttaactttggtaaaatatgcctaaaaatcccttctactgcctggataaactcagtgattttttttttctggatactgagacacaaaacaagacattaatttcctccttatggaggtttttttggcagtcagttatataaatatatattatgatacagcttgatgtggacagcacttgaggtgtgtgcaaggtagagtgatagatgagcccagtggaggcaactgtcaaccctctggctggagtgaggtgatgtgatatatgagggactggttgttttcctgaatacagttttgacagatcaaggagatacataatctaattcatgcatttcacaagcactgaatcttcctcagaagaacttagtgtctattccttgggtcatgtttgtgaggcaggttgaaggcctggtttacacaaaaaagctgagaagacattaaataactaggttaaggttatcctccatgaactagtgtaatagcaaggaatagcactaacattttaatttctcatacttttaataccttttttcctggyttttacagattaagaaaatcaaaacgatatatttaatgccttcttatttgcaaattttcttagaatgttacagtagataatttcactttagaactaaagattgggaggatttttaaataataaaataatttcagatgttaagaatgtttaccaccataatttccatttaaaacattttcctctggatgctttgttgaaattaggaaatgcatctctaagggatggctggttatggagtgatgacttggctgtcaggcaggtttcatgtttgagtagaataaactttcctaccactttccagaactttactgtgtccaggccgtatgtgtagttctgggatttagctttttaggcaaacattcttacaggtggtttctagctttttatcaccaggaaccttcttacaatttagagggggaaaaatagccatgtttacctttccccagttccttaccctctgcaatatgagaagtgctgtagggaaggcataagtgaagtattatgcagtgtgtttcactaaagtatgtgatgcagtttaaagactggagtagagtgttgatacctggcaattagcctggtggatcaggtcgagagtgaaggcccagaggaaggatacatagatccttaaggccaggctttcggatatctgcagcaagcgatgagagagcggatgggattgcagtagccgtgtatgacacgcagatgaacttgcaggaagccactgaaggattttaagtaggaaaataatataattggaattttgttttggaataatcttgcaaggagcagagtgaaggtgaattgcagtagagagggaaaccagttaaaaagctttatgatagtatctgtacaaaatacaatattaattaaaatactaataagttttattttatgctatttgcttattttgtatataacacatgtgagatgtgaagagaataaagtataaataaggcttttgtctgttctcagctagcttaaaagctacaaaggagatatatatatgcctcatttatacacacacacaaataatcgtaagggaaaatgtgctgatcactgtaagaggtacaaacaaggttctaggaaattcagtagggggaggatcccctgtcactggaggagaaggaaatgtttgtattttctttgagctcactttaattttttaaaaaagtatttaagaaattacataaaacaattttgcaataaaatataaggaataggtggggagctttttcatcaaagaagtggtttggagagttcaaactagttgggtagaatttcctgatttggaaacagattatccagagatatacacatttgtgagatatcatcatttcatattgttttagatgagcaaaatgccctgtctctccctccaaggcaatatttggtggaccacccgtaagtttttgtttggtttggtttggttttagcctcatcatttaggggagaagaattttgtccctatttgccccgaagtttcattagtggatggccgtatttataccctgtgtgtggtaatgatgaactcctatgcattttatctagcttttcaactattaagtgaagcttggtttaagcaaatctttagatggtagcattgtgccagtactgttcccrttttatcacatgctatacgttagtctagttcagcagagcattatgctacattcccttctcagtgagttatagatcttgaagttttcacacactatgttctggaaagaaagtataactgtttcctgtgtggttgaaatgcaaactaaagatatttcaactgcttctgtaataaggagataaggtcagacattatgaaagaaaagattaccaccgatttttttccccttttattcaagtgatttcaaggaattattttgtaagaaagtcacctcaactgatgaaaaccagtgttaattttctctttcattttttttaagttacctttattaaggtaatgttttttatgtttctgagttctgtttctgggacattgattcttttytttaattaattttctttctgttcttattaagataccacatggtttatggtgatttcataagatagtttaactgttaagaaattgtttttacatatttatggaaatattctataggtctttatataacatgttagtatttatatgtttacctgtataactrtaataaaatataatgcttacaatggtttataatacttagaggaaattatgcataatatatatattcccctctctatcctcctaccggtccctccatccaaagttcaggtgtgtcagcttgggcaagccatttaacttctcctggccttactttctcatatttaaaacaatagtcttgtagaagataaattcttagactttttgtacttgtctgatttatccagggttttagacaactttccagtttatattaagaataggctaaaacgtaaaccatcagaacttawcagccacatggaaatttcattaaaataggctcactggagccatgtaatagaattagtccagattcaatacatttatattactttcctctaaatgtaatcacatgcttaaattgatgagcagtagtataatagttccatagtgaatttgattcaagcaatagttatattaaatttctccacaaaaatttataaccattcaataaagctttaatatattgtcatctaaaggtaaatgtaagttttgtttttagaataactattgagtatatttcaagtcattgatttgttttttaattataaatttataaccaatgactaatttattaattttatgaatggtaaataaaacatacattggagaataacttgagtggtaaaatatgccttggtccagcggggtggctcgtgcctgtaatcccaacactttgggaggctgaggcgggcggatcacctgaggtcaggagttcaagaccagcctgggcaacatggtgaaaccctgtctctactaaaaatacaaaaaattagctgggcatggtggtggrtgtctgtaatcccagctacttgggaggctgaggcaagagaattgcttgaactcrggaggcagaggttgcggtgagctgagatcgcaccattgcactccagcctgggcaacaagagcaaaactccatctctcaaaaaaaaaawaatatatatatatatatatatgccttaaaaatatatatatatatgccttaaaactactttttactttatggttcattttcatggagtggtttattttttccatcaaaatacccaattaatttggatacagtgagcaaatgcttctgaaatagaatgtgtcaaaatattcttggtttctttggcctctttcatcatttacccacagcccctccccattcccctaccttcattgacctcggcttggtttgcaayaatccaggtttacatttttgaaacattaaatactctgagagagttaaagacttgtctgtgttgtgttcagatttgtagggacctcctgagctccacagtcccatttaccaggtctgctgttggtaaaataattgccacctgcactctggtttttagttccattgctttgttgaaatcatgatatttgggtttttcatctcattctgtaatattttcatttccagcatgtccctttcttactgtgctatctttcccaaccctgcctgtgtgtgttcctgttccccaaaggtgcttttcacactgtatgttcggacctggacatacatgaatacccttccttttggccagtctgaaagctattggagagcagaaactttgttttatttccttctgaagttagctttgtggttcccataggaaaggtattcacagaatatttgtcgattaaataattaactgttattctattctattactaccctttttcagttaattcctgggtctgtgcatctcagtccttaattcatacaggttgagcattcctcatctgaaaatactccaaaatctgaaacttcttgagtaccaatatgtggctcaaaggaaatgctcatcaaagtattctggatttcagatttttggattagggaagcccatgcagtatgtaatttgaaagtattccaaaattgaaaaaaaaaattcaaaatttgaaacatttctggcctaagcatttcagatcagggatactcagcctatattccaactttgatcttagrctttttcatttttgactgtctgctgggcaattctccttgactgttcttctgtaacttcaaacatagcatgtttgagactcaatgtctttcttgtgttctgtttttaccagtggtatcatcattcttttagtcaatcaggtttgaaaatgtctagtatttttttaaaagttgtggtgcccctttatgatccaggagtatggtgggtcagatctgtaagctgagtcagatagaccaatggctagaattctggcagttacctaacttgttgaatcttagttcccttatctataaaattcctacttcttggacttgttttgaggattgtgtcagaatgtccatgaaagtgcttagcgtggtccctggtatgtggtgaatgctgagtgagctgtctgtaatttccagtgtgtcatgaggggcttctgtgatgcttttcagctgcctcactactttggtgaggccgctgctgatgcttgagtacaggttctcatctcttgcgtgggttcttgcagcagtggcctctgctctggcccatgcaggactctaccagtagattttgattatttccttctcttcagaaaccrtgatgactttctgcacccagcttgatcaggcctgtgcacacctcagtttgatatttaaatttttggacaatctgatcrtcaccaacatttctagccttagtttggtctcctctgccygaatttccagtcactgccttcacactttacatcccctcaacttgtcttgtrcgtcacacagttttctcccctctcctttgtgtctagttttccctaaccatcatttgtggcccctgattcttgctgtccatgatgtttctcctgaatccttcttgtgacattgttcttcctacttaatccatgaatcgtattaattcattyattcactcactgccttgtaaggtagtgattctagacacttgttctagttataggtacttgaatacactggtgatcaaaaaagagacactccaaccatcccagaacttatgttatttatcagtatttattttacagggaatcatgtgttgtgacatctttgtataatttgcatttatttattgaactcctgtaaaattttttccctgtacaaattgtaaattacttgataggtattttaaagcttttaatatttcctttaatgtcttatttgatattttacacagagaaggaactcaaatattagttaactttagagggtcacattcagggcttgaggtttgaaactacaccttcaaaataaaatattacttgcaatatatttgaaaccagatttgtacgttatgcttcaggtatatgtttctttttaagaaaggtctgtaacagcatagattgattgtagtaattcatatttttctgataaaaatttgaccatgagtgaacagtatgcttctattcttaccagtggtaggtagaacacatttgatgtcacttgaacttaccaggaagtttttttcttcttttcatatatatatttttttgtgtgcaacactccccttcccttttaatgtgatgtctggatcaatgtttgaaaaaattctatatttagagcaacaggcagttaagtattaatagtttttgttactgtggacaataatagaagtaattgatgattgtcacttgcatggcttgaaggccttctctgaacttctacgctgagttaaatgctcccctcattgctctcaacatgcacatcccctgtgcttccttttttttttgtgatgctttccagtgttgttattatttgtatagtgtctaattttcctactagaccacatgcttcatgagggcaggagctctttctgttttcttcacaactcaattgcccggacctagtaagtccacagcacatataatgagtgctcactaaagatgcattgcagtaaatttgacattcattcactaatcaaagacttactggattcctgtagatgtcagggactgagctaggctctgggtttgcactggagaataaaacacagcccctgtccacagggtgctcatcaactagcaaaatgtgctaaatttgccttatttaactgacatttatatatggcttaaagtttctagattttttttaagcctcaaaataactctgtgaagaggtattgtttccctctatagatgaggacatcgaggaacagatcaagtaacttactcagtttcacataggattgggacctgcctctgtctggtctccaaatccttcacctgagacctgtgctacttccagccagtaaatcacatgggggtgatagtcataacttgcacctggtttatcagaaattaaatttgtttctcttggctcatgtgtttttgggtttgcattaaaagctggggcaaggaattatgatgtggaaatgagcccactactgattgaggcttttgcatctcattaaacctttaatagtcttattttctttgagactcttttcccattaccacaatttttcatggtgataattttgtttgactttggaaactgactagtctacattttgggcctattggattaagtttaaaaatcttttcttggtatttgggttctccatagtctgaaaaacttctgctccttttaacccctcactattcaagtgagtccctagttgggcctacagatacattcctacctttatacctgtctttaggctgtctctctctctaatgccttccacaaacttttggccaattaaaataaaaaatgagttcttccctttagttttcaaagtaagttccacctgcagggtttgcccttcagtcctgtgctagcctccaggccttgctgctgctttatgtgtgctggttttgttccctagtgagacttttaatttctggagcaaaaggaccaaatcttgtttttcttttctgtctcccacagtatttagtacagtgctggctataggaccatgcctactaagtaagcactaaaatgagcccattactgattgaggcttgaagtaaatttaattatagagtttgtacttcctaattataactgaaaacctcagtgttttccaaacattatggcacactggagaaaggcagatggaggaggcacagtcttttataagaacagagatacttcccgtttgtatttgtgcaagacaggttacggattgctttcatgggcattagctcacttaatcctcaagctaattttatgggagagaaattgtttaatcctcactggggagtgatggcattaggactcaaataattcacctataaatcacatggctgaagctaggacttggtgccaactcgtgtgactctagtgccctgccacaggagagacaggagcaaccaggctgcgagctccagaaggcagggcccagtaatgtttattgcacgtcactgttgcgagataaaactgaggttcttgcgtcagctgccctttgaattttctcatgggtacatttctgtctggctctgctggcacagttgagtttgtcccctctattgctgggatttctgtactcattagccatttacattcatctgtctgtcatctatctgcctatcatctctgtatgtttgtatataaacaataagacatttgcagttatataaaaaccaaccatctgaagtcttaaaaataatttgtgcactttgggaggccaaggcgggcagatcacctgaggtcaggagtttgagacctgcctggccaacatggtgaaaccccgtctctactaaaaatacaaaaattagctgggcgtggtggcaggtgcctgtaatcccagctacttgggaggctgaggcggaagaatcgcttgaacctgaaggcgatggttgcagtgagctgagatcatgccacttcactccagcctgggcaacagagtgagactccacctcaaaataataataattaaaaaaaataataatttgtgaagttgtaaattaaaatttttgttagtgcctccttaatactccactctgccaaggttgatgattcctgtgtataggttggtgcataactgtattgacagcattgggctggagaatgcaaatattatgattttgagaaagagagattattttgtgtacttatgtatttcatgattgtttcaaagccctgatcatctttggaatttgtccttggaaatttgtgaatacttttaaggtcaatgcatttccttccttttgcctcatgaattgagttcttgctatgggaaaggaacatatttttccagttatctgattataatttagagcatttaaartttttattgctgttgctgtgagcgattagcagtgtactttcaattttgtactcttggttgtgtatacactctgggcacaatggcatgccagaggatcatcaaactggatagttcacacttaaattgactacatcttccaaatgggcattttatgtctgtggccttctgacatttctctggcaaacattagcttgtggaattcatcttaaacatttcctttgctttttgtctgtataatctgatgccagaaccatttaaaatatgattaaaaatttaaaacattaaatatagatatggattgctgtcgacagtatggactctataaagaaaagacagtcttatatttgtgctcttgataggataaaatctatatagtttttaaaaaacctacatgaaaaagattacaatagcttagtttagaggtagtataaacatgagattgccatcttcatattagacctggagagaaataaacgagaaataggcatgttgacttccttgatcctaaggatatgaccactgtaccaagtggttttgatgctgtggaaagtgtggttgtggaaaaagtgtctgagatttttctttcagttcaaccagagatgagtagttgagacttctttttcataaaggaatctgctagagagatgtggttcctaagggtcaaccaagtttgcagttgcctagtagtgcacctgctgttccagaagaggtgcagatgcaggtatctagtccctgacctggaggagctagttaatattttggtaagaaaaaacttaagaaaattagatctaacttacatggtgcttaatatttgtgaagtgagagatcagagaagggagagagtagtgtaggtggagaagccagaatgataggttgggaaatcggatctcaggcttttctctctaccatttgtcccagcaggccagagtcctggggtcctgtccactctcaacacatgcctttaatactcttacaattttattttctaagacctttttaaaaatcagaggataagcctttaagttgctggtatagggttgttagggaaaaaatcagtgatgcaaatattaaatattaatcactatctgcccttggtggtgttttcttatgcatttttaaaacctgagcttattggaggtttcttcctcaaaattacaaagcaacaaagcattagttttgtttagtattttttaactgatagattctcttttgaaaacattagtctgcctttgaagttgttatttttttgtgtcagaaagagatttttgtcaaatgtctgctttttagaaaatgatagtcataggtgtgttttctgtatgtgctacaaatttcacaaagctttcattcttcataggaaactaacgtaaacacgcacacacacacamaaacaaacaaacaaaaaacacttggtatttactttcttttaaacttccaagtcatgtagtccctgcctggctgytctgtgtcattactacatcatggcacttgacacctttatctatattcactacatttttgtttaaatcagcgctgtttgcagtaagtctattgtgtttgcctctagataatgtaattgatggacagaggaatctaaaggacctgtccaattgtctgtgctaaatttgtgggtcagagtgtttaaacacaggctgatacgaactctcatttttacattccccttgatgttatatcccagttgagaacctgtttctttctcacttggccagtttgctaacagttaattctcccctggcagataatagtgctacttttcttgctctagcagcagtctctatggtggcccattttcccatagaacattttttctttaaaatagaatgaaaatactgagcatacctttaaatgacttgatttatgttttatttatctgtcttaattattctgtagatttaaaaatgatttaaatcattttcagagtgggttaataccctgctatataacacattcaaaatttatctgcctccagttgtgtttatgggagacacagcatttttattctattaggcatcactacatgggtgacctactatcattttgaatttttctcctgtgttgaactcataatttctttgtctgcaagttacttgtattaagcttatgttttatacatagctcataagaaagaaaaaacaaaggaatacaatacacagatatatacatgttaatgttagtaaggttgcaggtaacttttattttctaatttatgcttctttgtattttccagcttttagaagcttggaaatactcttttcgtaataggaaataactgtttaaaatttctaaccttatgtgctattagaagttgggaggcgaagggagtctgctttatttttaggataataagcaattgagtaacattttatttgtctggtggtgttgaatagagagagattatgactcaagcctaccttgctttttttttcttttttttttcttttaatgagactgagtcttgctcttcagatgrcccagcccagagtgcaatggtgtgataccggcccactgcaacttccgcctcctaggtttaagcggttctcccatctcagcctcctgagtagctgggattgcaggcatgtgccattatgcccggctaattttagtatttttagtagagatggggttttgctatgttgcccaggctgatctcaaactcctgacatcgggtgatttgcctgccttggcctcccaaagttctgggattacaggcatgagccaccacgcatggcctcaagcctaccctttaaaagctgagattttaaagttttcaaacttgagaagaaaaccttatgttattagtattacatgttttaaaatccattgtgatgaaatacagcatactgaattgattttgaccttatcctggaatcagggtcattactgtgaccttcaattattgtacttttggcctttcccttgctgtcagctgtcactgcagcaatgctaattggggcttttaatcatgtagcttagtgaaaacaaatagcatataatattttatgtagatagacttactaaattctgaagaatcgtctgaaagcttccttcttggagtgaaaagtatgtgattgtcttcttcaggacacggaagaggggattttatcacttatgttcctgtatttgttttaataactgatgacccatggcagatgtttatttttgcttttatgttcttatccgtgtatggaaaagcttagattgggtattggtaaggccttggaattagataggcctggatacaaattccactgatatctcttagtagctgtgtaatcttgggcattcagaataacctcttcaagttcatttcctcttctgtaaaatgaggataatcatgctttcatcgtagagttgttgtgaggattaaatgaagaattcatgcagtgtgctagcatagtgtctgcacatagtaattgctcaatattatcaataatgataactattttcattactaatttggatttgactgatgtctgccacttcttaatttcattgttcaaataacctgtaaccgatttggaatgtgaagctgagcaagcttgatagttgaaagaaaatattattatgaaatatttaatgtattcttcactgattagaaagattttctcaccttcccataaagaagataacacaattaaagaacatctatacatggcagagtctggatacctgcattacattatgatatttaaaggaatcattgcaaactacctcaaagaatcctgagaggttaaaactgagtttataattatatagacttggtaatttgttaaatgcagcaagaaaaataagattacaccataagtttttcggaaatttcccattttaaataaaattgtcaattctatgctgtatgtgatgggtatggaatttgtgattaatctgtaccaattggattaaaatgggttcagcaggtttttaaacttattgttgataatggaaatataaagctcgggaaaaattgtgaccatttttttttccattgtctactcatctttcatttaacttttattgatttaaaatcctttagtgcagttaactgctattataaagtctattgaagtaaatactcatataacatttttttacttatatgacagttgcttttggagtagctggaagagctgtgaggtactcatatttcatttttaaccatttggagaatagttttctatgtgtgaaatgtccacttaatcagcaccatagctctttttgctaagagtcttagaaatgaacaagatagtataaccactgaatgaaaaattttaaagatgttactcagtgaaaagtttctaaaataaaaggcaacacatgaattactctgaaaaagttatttttagatagcaaataaatatttttctttcagttatttgtaggaacatcaatctatcaaaacttttccctcatgtctttaacaggatgtaaagtatataatttaatggaataattaatatgaatagcagttgttgtacttatgtagcaagtatttgttattttgctgaggtagagaagtttctccctatactgaatgcttccagaatatgttttatattgtgtgtgtgtgtgtgtgtgtgtgtgtgtgtgtgtgtgtgtgtgtgtgtttgagtggggcgggggtgttgggtgatggtgatgtaaattttaaaaaacaactgctttttcttactccttttctatcagctgtcacatcttacccctgttgttacattttcttcagtagtcctttccttttaacatggaaaacaagtaatgaaggtttttaaaattgtgcaagaaaagtatgcataatttagttctcaccaaaggcccgaagagtgaactaaaaatctcaaaacctcctctcatgttacaaatgcagtacacatttattttaaaaagccagaaaatgttaataagaataaaaaggtcacttatcatctcacatactagagatcatttcttttttaagctaaaacaggaaaagataaattgctacaggtattttagcaggaagagcattgatatagggaaggaagattggtaataaccgatcttactttgaggatatcaagaaatgagagaatcataggaagccaccacctatgatatcagccacctatagccctacagtgggtgattatcaggagctttacccagaagccatgtatacatcaccctaacatctatccccacttctaccagccactgctgggggaagaatatggttgcttctctccagtgttcttactttcacatgagtgcctttcatccacagaacctaagccaaaatcctgcctacaagggatctgggaaatgtagtttccaggcttccaggcactgtgaaagagcttgaaagtatagggatgatgttgaaaattctgtcatcaacagataatataccctgcagcatccttccgaattcattcctcaacacacgyatgctacttacaactgaacacttaatcaggaccatagctagatatatgctgtttggtaatttgcttttatcacttgatttagtataacgcatatctttctaaactctgttactgtctatgtttgttttctgctgctgtaacagaatacatagactgggtaattgttaaagaacagaaatttatttcttatagtctagagactgagaagcccaagatcaaagggctgcatctggtgaggaccttcttgctgcatcataccatggtggaaggtggaaggtggaagggcaagagagtaagaatgagagagagagagagagcgcgtgtgtgtgtgagagagagagagaacgcacgcacacgagagcaagaggggtcagatttgcttttatgacaactactgtcgtggtaatgaatccactcctttgataacagctttaatccatccatgaaggcaaagcattcatgacctaatcacctcctaaagttcctacttttcagtactgttgcattggggattaagttctcaatacgtgaactttgggggacacatttaaatgatagcagttatacatatatcttaaaatttttgtgttaaaaaggaatatattaatatttttggtaagctgcttttatcacttacgatattgtcaacatctttttgaatggctctttagaattctgttgttggatttattaaataagcacccagtgctagacaatttagatagtttccaacttcttgctcttatatcagtgatttgctctgcatctttttgactaaaactttgtatatgaccatttattcttcagggaaaattccaagaaatgtaatttccgagtccgattgtgtggtccatggccttttctgacttgtattttgcttcttcctaaattctttttgcttacttccatttctctggtaactggatgccagaaagttgttgtggagatataaaaattcaggatggttttaacacttaggcccttttgcattgagagtccttaatcctcaatcatataagatacttggacctccacccatgcttcatataaacactaaatgtgctttaaactaagaaagcctaagaacttctgctaaagattaattctaactttccaagccagggaacagtaggttggaccaagggtctctagagactttacctctttcattttacacttccttctttccttcttccttctcaccctgcttttctccctttttcattccattctattgtgatcataaaaagtcattaaggtatttagtatttagagatgatctgttattttatttttattttattttatgtattgtattgtattgtattttaatttttttgaaatggagtcttgctttgtcacccaggctggagtgcagtggcgcgatcttggctcactgcaagctctgcctcttgggttcacgccattctcccgcctcagcctcccgagtagctgggactacaggtgcctgccaccacgcccggctaattttttgtgtgtttttagtagagacggggtttcacggtgttagccaggatggtctcgatctcctgacctcatgatccgcccacctcggcctcccaaagtgctgggattacaggcgtgagccaccgtgcccagcccgatttgttattttatacaagacttcccagttgtgaagcttatgttgacatgtgttccttgctggccatttcagcctgggtgacagaatgaaaccctctctcttaaaaacaaaacaaaacaaaacaaaacaaaacaagccttggcttagggttgtggcttctggctacagttacaagccttctgcatttctgtaagtggctgtgataaacagggaatgctggaagatctcctccttgggggctcatcagtggatctgccagtaataaggatttcatcactggcaggaagaccttaggtaattggaaaatgatgagcaactttaaatttaggagatttttcttttacaatataggcacagttccttggtaatctcaacattctggtggtgccctttgcttctgaccttatttaatagactcttcacttgtgttgaaagcaattctacaaataccagcttttatctagtgtttacatgggcagtcctgcttgactttgaatttatttgttagttttttgattattacatgtatctttaacattttctaactagaatagaatacttttttcttttagaaatggcttagttttattaggaagataaaatattctatgtcttagaaagcaatattgaagccagcagcaaaacttaattatctgaaatgaaatacagatgattaaattatttcctaaaatcaataaaattgaatcaactgaaaaaatcaatgtgctatataaataatgccttttaaagtatttcccatgtctttgtggaatattggctcagaggtttgcaatctgggcagcaatgtaaagtttcattcataaaaagtattctagattttttttttaagatgtcagaggtctttagcaktggcttccatgaacagttaccatgggtctactatgtatagggcatgttgacaggcactggggaagcattatggctctagagagatttccaatttggtcagatatacaaggaagacacatagctagaaagaacaaatacatgtaaatatatggtcgcatataccagtctttaaccatgtgcaaacaggagtttagagaatttgatgatggccatgatttgggatgggaaatcttccttgagaaagtgttgtatgaagtgaagggcaacctaaggcaagtatggaggagcaggaattctaggtaaggctgacttatcaggttgtgcaatacacaaaggtcctgtataaaatatggaaatgttctcattcttgccagatgccatagacttgtatacattttataacagtttcggatagataatctgacttctcaagccaccttggctccttgatattccttgattatccgaggaagatttcttccttaaggctttgcactgggttgttcttctatctggaatgcttatccctcagatatttcctatttacttcaagcatttgcttaaatgtcaccttcatgatgaaacttaactagtgtaccctatttaaaataactatttccctcacctgcatataaccatgctatagcatttatcaatattgaatataatgataattacatgtaattaataagttcattattgtgtgcctctctctccaccctcttaccccaaaagagaaagtctcatgatggtagagaaatttttcttctatgcatttttagtttactgatctatatcccaagtgcctagaatatcaccttgctatgtagtaggtactcagatatttgctgaatgaataaaggtgygcatgaatgaagttgagtaacatttatagaacagaaagggcaggaggcaaaactgttacacagtggttgggggcagaaataaatgcaggagaaaatattatctgaagactgtggaaaaagacagtgaccacagtgcagaaacatggagcagtcaaataagaaaagaaataaaaaaattcagtcatcagatttggcagttgagaggtcgttggtgatttttgtttcagttggataatgtagatggtgagatgcatactagaaaagaaccaaggaaatgaagacatcattcttatgtaagactgttcatgtttggtacccgcctgctggacatcattcagtcacatcatacgtatacatttatctagagtgacagcttggcatctagcagtaacatggcattctttaacaaaatcagcattttaactcaattgaggaaggaaggaagggtgccttttctgattgataccaaagggtcatttggccagtgtctacgtagtggccctgagtggaggcaattccacaagctcttttgggaactgatgtttgatggaggaggaagaggaaatgatggagcacgtaaggtggaaagttatagaacaggtaatgggtaggataggttagccaggaagaagccaaggacagagagaccaagtgttagagtatccagctgcagatcgatgagggcatgggagtggtaggcaaaggagtagtatgaggcaggcggcagagggttgagaggagctgctgatggattgggtgtgaccaagagaacaaggggtcaagaatgacttcaaggccataagtgtgggaggtgaggcagattaatttatttacacaaatggaggtgtcagttctcagaaaatataaatttagttttagccatgcttaatttaagatggctggggaatgttaagataggaatttctggtagatggagtttttcaacaaatataaaggggaggactcagttttgttagtttttagtgaaaatcctgcagtggggataaagatgcatactcagcttctgtagtgagtatcttaggtgaatgcccttattactgtctttgccacactttgagaatggtattcttatcatttctacctgaagttagagagattttatcatttatctggcatcttgcagcttatgaatgatagagttggaggtcaaatgcaggtctctctgctgccacagccctcatattccattctactttctgcttgtaccctcagaggtcacatttggggatgcctaggaagtctgggattgagtagcgcatttctggcaaatatgatattttttatagctgtgttttacattcattacttcaaagattatttggtctacttggatcaaatgtttgttacagctgcagaagcttcctgctctctgaatcctttttggaggtgctggttttcttctgaaagttttaaggtgcttttttcttatgaaccaactgctcagatttttttaaaaaattaaatatcctgctacctcattttttctctatagcacattcccatgtcttaacttcgatttttttcttttctttttgtgtcacctgactttgttgagaaggctggagatacatttcaagcccttcctagtccttaaaattatttctttcacactagcagattatctcatttcaattctgcctttatggtttaacgaaaacctggtttaataatccagcaatgttagccattgggattcatcctttggtataataacatcagtatccatggctgggaaattattaggttctctatgtgttatggcaaatacgggtatggatatagataaatgagttgccttatatcaagagactgcacaaataagtctgtaagctttttttttaattctttaattttatttgtatcctactggccttcgctctccttcccctctcttgttgatacatagatatgatttatatcctcatggcaggtgtcatactttgtataacttcataaatattttcttaaaggtttaaacatgtaggacctcaggttattctaaaatacgtaaaagaacaaaacaaaatcataaatcaatgtaaagaataaatgcatattatggagaaaattacctaaaaaactcctacataagactatctagcggtacttaggtgcatggcaatagtgaaagggcagaaaacaggggatggtaccaaaaatagatgcgttattcttccagaatgtgaaacattatataattgcttacaaagcaatcatcatatgtagacaaatgacacagaatggaagatgaataaagtcaatgtaagattaaaaaaaattgaaacaattacatctccatctgttacactgataatgtaaaaagatattgtacattcaatcacagatggccttttaatcactttagaaacttagcacagaaaactaggcaaagtctgtagagacccttggtctagcctcctgtcctttagcttggaaagttagaattcatctttagcagaagttcttaagctttcttagtttaaggcatgcttaatatttctctgaatttttttttatttttttattttgcaggccaaaacaataacagtttttgttgttgttttttttgtttttttttttgagatggagttttgttcttgtagtcaaggccagagtgcagtggcacaatcttggctaactgcaacctccgcctcctgggttcaagcgattctcctccctcagcctcccgagtagctgggattacaggtgcatgccaccatgcgtggctaatttttgtatttttagtagagacggggtttcaccatgttggccaggctgatctcgaactgctgacctcaggtgatccacccgccttggcctcccaaagtgctgggattacaggcgtgaaccaccctctccagcccagttttgtttttaagtagttatctctaagcaatttaataaatatttatgtcccaacaacatagtagttggttgaaagaaaataatacaagtacattgaaaggaaaaatatttttatttttattttattcttaaatacccacaattattactaatgggatgtgtgtgcctgttgggcactacataacttctcaaatcttggaataagattacacaccaccacaccctcattttttgttttacattgattgttgtaccatgtttagttgttaaccactgcatctgctgaatatcyagcttcacaaagatacaccattaaaaggaacttagtgggatctaatgttaaaactacacagtaatttgagctagtaattcatgcagtatcagatgctgaatattcttgtgatttttttggtgaaaatttaaaatatcctgcagtgtctctgagtttgctgtggtgttccaggataccttggtgtataatttaggaaccaccaaccaataatcttaaactagtaggttatgggacacaggccagaaattatttgcttcctagtgctttttaatcacataggtaaattgtcagctacaatacctgggacatagcagctccccagctggtgtaaattatttttcccttgctatactgtcagcatttatagccatatctttccatggtggtccgatttatatttacagtccagtaatctttagtaagtacagtctggcatatcttattgccaattgtttgattttatgtggaagtgggtgacacagttattactgagtctctttataaaaatcttatttacgtaaaayatacaaggtaaggaaatgcattcattaacaactgaagactgagtgagtaaaaaaataacttgtggacactattttcttgtataattgaaaattatgcaccactaccaccactaccacaaatagttttgtataagatatgtctgttaagttcmgagaccacaaagtccctattgtgatgcartaacctcggttaactgagcatatcttctccatgtcctggtgaggatagctatttcagaagatcatttataggaccatttacaaaaatacagtatcaatcacactgcttattttagcatgcttcagttgtggtttacaggcagtgatccctctgtaaatggactgcacttatcaacatgctctcatggtttacaatgatcttgacagcagatttagtggattgaatatgggtctgatatggtatggccttctcaaagtctagactttataaggtgtaacatttcactttgcacgtggaagagaaacttctcatgttctccctgttaagagttgaaggcctaaaaacaatttgcaagtactgtgttgatgatttagttattagcacattttccaaaagcatgtagagaaaatatcaaatttgcatgcagtggtraggggtgcataaaggtaacttcctcctgacgtgtggctacaaagtatactatggatatactttgcggctacactgtaccacgttttcacttctcatatcctgttaattttcagtaggtttcctaagtgtcgaagcttgtagtctatgtagcaaatgtatttctatccatgtgtaactgtttcaaattatggaaaatatcacaccttgagccttgagctttactttgtaatgtgtttagtgcaggattgagttccttgaaaagtgaagaagaagagataattttagtgagctacaaatgcctgctgatatatattaagtatgctgaaagtgtatgaatataaaaaaaggaattttatggagaaagaatagttgaaagacctaaggagattcttgaaggggtcaggtttcaggaaactaaagagccacccagctaagatacagatcaaagtaagccttatgtttattgcttatctgttctgggaaaagcagaggcagccaagtaagacttctgatctgctttcaaaacctaattcaccagttattattagtttggctttaggcatgttacttcattctctaaccacacgtacctcacctagaacaatacccaggcgggaatgggaacaatacctatttcataaaataatcctgaagattagatgaagtaacactgcaaaggacttcactcagccttgatacatcattctgccttagaaaattccaatgaattcattctctttcctgtcctacggagctcacatgtggctggctccttgtttcttaaaccttccctcaatgtgtagttaactgtgccatcatctgtgcctttgtagcccttcacaatgcatcccattatagcacgtatcaaattgtattatttattcctgcttctctttgctagtgggctgtaaggtcgttgaacatgagggaccacatcttattcagcaccttgcgcagaacctaataagtgctcaaaaatgacatgcagtgaatgagatgattggatggccgcttaccgctgttggctcagcccagacatttttttattaatatatctctatgactgtgcccttgacactctcttctatatttctagatgcttagtaaaagaaatagatactttcataatttatttttaggaaataataactgcattgtgaaaaaagtcatctaggaaacttttctgcccccacccttgtaggtaggacaaccatttttattctttgtgccctctcagaaccacatacatactttcatcatcttcatcatatacttgaaccatttattgaactcatttgtttgtttttctaatgtatagtaagcttttggagagaaggcattgcatctagttcatctctacatccttagtactcagagggtatttgttgacaaatggactgagtgtatccctttcttagactgagacattattatttttttagaatgaagaaccttcccattacttaaaatactttgtttttaaatggaactacattgcttagaatagtttaaaagrtgttttgttttttatgttcatgtatagtatataatctgttgcatgaatattttacttacatattttatgggatatgtgttttcagtagatatatttttataggagatacatttttaaatacctacaaaaatcccagtactgtgaagtatctgtgtcattaagtgtaataaaacatattacagtaacagtaatctgctgaatgcttcctattaccctgcagggaccctagagattgaaagctttattttggaaaagtcatctttatggtaataatgtaaatggatgtattaagtaacagagcacttataaagagatccttgtctaaaggcttggtatgtagggcagaaaaccatgcttcactcagaaggccactggctgtggtggaaacttgctgtttcttcatggagttgataacaaatattttttcatgttattttttctcacatttatttttcaaagtaaaaacatttatttttcatatttgtagaattcttctatttataaaagtaatttctacttatgaagagagcagaaataagaggaactctcactacccagaaataaccattgttaaatttgttgtgtgtaattccctacatgtatacatgcattatatatatgtattcacgtgatgatactcgttcccccatattttccaaaatgaggtcatagaacaggtgctgagttttgwtctgcttccttttttttttaatttaataatgacattctttgcccaaaggagtaataaaacctatttttatctaaaatctctggagaacaaaacattttacctaatagttttcaagttaggtaagggttttcatactcatattttaaactttttagcttttcataaaaaatcttttaagatgtggcacactctagtggttatgagactttgggttttattgaacagtgtagggaaaagagcaagaggggattttagaaagtaaggtacagcaataaaatttcataaaatatgtcttaatgtgtactatccctttcatttcataaaggagaggaccgattctagcaccatacatgaaggaagagtataatctcagaatgccaggctgccattcaggaagtaccagcatgctgtctcagataagcggttctgaggaactgcagtctatggtttatgcacttactgagttaccgtggtgtcatgggcagggtgaatgcacctgaggtggtgcaggacgccaaatagtgtaactagaagtcccagaggaggctaaagccttcttgactaaactgcgaccctggtgctgtgtgggtagctcctttcctgcctcacttcctccttttccttccctcgtggcattctcagctttccatatgccctttctgggtcctggttgctcctgttccctcccctgttgctcctgatactcacctcttcttgtcttttctctctttctccctctactttttcaattctcatggttttctctgtagagaaaagctgatcttttaagacacagtggtctttttgtatgaagtatgtaaatgcctttgactactacatacatatgcctacatatgaaagtagtagtaggcatatgtatgtagtagtcaaaaggcatttattaatttagttgttcaatatatatttactgctgtgtctctaggcaacagagatgcaaggccaagccaaacctcctcccttgggaattctcaggacagtggcagttactttgggtctttagcacttatggcaggtgtcagtgctgctccggctccttgtgttgccatctgggtactgtttaaaccttattgtggactgtggatttctttgggtgaaagtctgtttttctcacccttctatctgttgagtgctgtgcagtgtcttgtacagaatagatttattttcctgtctatttctggagaggggctttttttgaagatctgatcaatgattggagtcaaactctttagtcccacatgtgatccattgtaaactaactggcaaatgtttcatatttcccctctaatacataacaaaaacagtttaagtctgaaaagtggtataaatggaacggaacatgacattcctgtagccatttttttaatacagattatatccctgattaataacaaaattgccagtctttttaaatataaaattacaacaaccatatagaatcacacacctccaacctctgctgatcttgatcttagtacatgaggcttgggttgcgattagatttattgtggcaggaggttttgtgtttgaggaactaaaggactttctagtaaacatagatgcaggagagcaaatttgtgagtaaataccttaaagtctttatataagttttttgtagttaaagtcactaacacagaacaataataacagtacaataaatacagagaatgtacgtggcattttagatatcaagttggtaataatggctgctgtgcgattaatttgatgaaagaggacagtgatgatcctgattggaagattgatagctcttgggtggggtggggatggggagaggcactccacttgcttttcttaaggacttgctcaaagtaagtctgtgtctctaagtggagagctttatcaattgatttctttttaacatttgatatatgtccagtatgttctgccaaatgcaggttgccaaccagtaagttacagaaatggctccatggttctgcagtgctctggctgcctaaattgaacattatgtatctgtgttgttctgatggaattagaatcctgcaggtgcttgtggccatgggagaaagtgtgtggcagcacctctggcacggagagttacttcctgcaagaagtccaagctgaaaatggatccccgctgggccacatttctggtgccacttcattgagcactttctgtgtagcagcagtttcctggtgttactgctgaattgtttcaggggtaatttcctgtgagttcagtatgcatagtaacaataaagaattttcatattgctatgtgattaatgtttattaagtataaaatttcacagttgtgtaaaaatatgcaaaatttataactaattcatttttgagcaaggacacatgattggggtgggattactatttaataaaaatgctactctattatttattgtaagtcttttacaagtgtacagaaatcagtgacgtggccaataataccagtttttctttcctgtgtcactgggtagtctaaaggcatagtgaggtgtttagtaacttcatagtttagtaactgtgaagccaggctgcctcagtttgaatcctacctcctctaactattggctgtatgacattgggcaactatttaacatctctctacctctgtttcctcatctgtaaaatgggggtagctgtgagaactggataagattgcttaggatagtgtctgacagagtaagacctttgtaagtgttagttctactaattattatttttcagattcctgcattatttttataacagcagatgacaagcartgtgaaaaagtaccattataagtacaatgtaagtggaatacaaatgttagccatggttttctacacctttgaggaaataatattgatttttgttccccactcacgtcccatgggtgagagtccgattccttctccaacaagtttctgaagccttggggcttaagttctcatgatcattgcagccctgtgttcctgctcctgcttcccatagctcttttttttttcctcttcgtcccaaactgacttggacaagaaactcagtcccttcctcttgatttctcctcattcccccagcttctctcattaagcatttgggtgggcaacagacttcatgggaggctttggcagtggaggtgagaggggctgagatctgttgtaaacaatttatagcaccttttgtgttaaagcaaacatgactgcctgatagaatagaaagcagaatttacatatgataaagaaattctagctgtgtggtagactgggccacttcaggcaaccagaacaccaggaatgtgcatttattctcctctgtcattaggggtacttctatgggggaaatgtttggggaagtacatttgataattgcatcatatagtgagcaaacagtttgaaatttgtctttcagtcactgttctacagtttgcaggtaacaccctataatatttatatctgccgtttttaaaagttaagaattattaggaaagcatttattgtctttaattatagagagagtaatgtaaccatattgtctctttatctttttctttttgggagctgcctgccaagatttaggaatcattttgtttttctaaacacttaatttcatcataatgaaatttcttgtctaatgagatttatatcactttccttattatgagagttcagcttgttttaattgtgatgtctgagaacttatactgaaacttgccgtagtcaggaagacacctgtcctaataggaagacattttacttaatgagttgatgccagtttaaatttctgccttgttttacttctaccttttcttctttgagtagtgaaaattgcatttttatctagctttaaaatttgctctctgcagtgagatctactacatgaaatcttttctcaaagtgatctgtgtgaaaatttaaattaataaacatataccattatttggaatatgagctttaatgaaaattcttgcccgagtaaacagtgtccatttacagtcaactataggaaataatttaactatttacaaggatgcttttgagggatgacattggtagtcattgattgttgcagccccaatcagtattctgtgtgtgctttgactggtttggtgctacttaccttcacatgccaggggtctttctttacagaaccgatgtgttgatggtgaatcatgatgcactgttcttgcacagaggtrgccctgacatttatttcatgaaagagttttcctattttgggatcttgtggggatattcatgaacataatagcctacccaggaaaaaagttagatatggtgaagaagaacaatgccatatttaatgcttgatctttaaaaaataagtttcttataactttggtcagaagaacactgatatagtttggctgtgtccccacccaaatctcatcttgaattcccacatgttgtgggagtgacctgktgggaggtaattgaatcatgagggcaggtctttcctgtgctgttctcatgtgagtgaataagtctcaygagatctgatggttttataaaggagagtttccctccggaagctttttttgcctgctgccatccatgtaagacatgacttgctcttcctcaccttccgccatgattatgaggcctccccagccacttggaactgtaagtccattaaactcttcttcctgyataaattacccagtctcaggtatttctttatcagcagcatgaaaatgggctaatacaaacacacaggcttgtaaaagtagattacttttaagtaaacacttttaccctgtgatttttattataaagttggagatgggtacttttgggaaaagtattttcctagatgtgtaaaaatcaaactttaaaaaggagcaaatgtttaaaattgagtctagtaaagtatttatagaaataattttaaatgttattatataatcttgctgaaaaataagtcactaaataaagttatactactaaaaatgaaaatgttcgtgacagaataactggctgtaggaacatctcactgaggattattatttttgtaagttgacactggagctttagcaacttgaccaagttttttactckawtttttaattctttcattctctgattttagttgacctcttttagctgtttccagaatcatctagaagatcttttgtattagtcatgagctggaggccaggtagtgctcagcctaatgttaaacctcatacaaatgggcacatgagaaaggagtgggcagttattgttgaaatattattgctgacatttaaaatggttatagggatgggggaaatctaggccaagaaaaaggttatctttgtcttcttcagacttgagggcatggagagtatgacatgagcaaacctaatacttgattttcagaaattcaggggaaaatattcactgacaaaataattttagaatgtctataatttttagtgaatatatattgatgtagcaaatttattgtagtctttatatatagatagagaggagtccacatcattttttttttgtaactaattttttggtttttgcctaaattcaggtagcaaagatgaaatgttggttaaagaaactaaaaataaaaaaatagaaaaaaggggaaggagaattagaaaaatcagaaaaggaaatttacaggggagtgaagagatggcagtgatacgtgcatttgtacaactccttcaggttaaaagctgctccttggactgtgaactccttgggaaaaggcctgtcttctctttgtatctttagcatctaatcttgtactcagcgtgtgcttaaagtggtacctagtacgtaatgggcactcagtcagtgcttaatgaatgaaatcaattaatgaaacttagatttctcatgggttatttcacctgatacaagtcctttaaggaaaacgtaattttccccatattataaaaggacaaaccaagactctcatgggttaaatgattgccaaataatgacaattctgctaacaatgacatgccattatgacatattaatcacataaaattagggatatatttgtatttcatgatttataatttcattattattagcagtaagtaatatttagtgaaagcttattgcttcctaaaattatgcttgacatgcaaatttcactagactaaatactatcctgtaaggaagatagaatcatctacattttatagtctggagtttaaagggataggttacctttcaagtttacctagctagtggatgggtgacttgaaagcagcctggtctgacccctgagctcttttttttttttttttttttttttttgagacggagtcttgctgtgtcccccaggctggactgcaatggcgcggtctccgcacactgcaacctctgcctcccgggttcaagcgattctcctgcctcaacctcccaagtagctgggattacaggcatacaccaccacatctggctaatttttgtatttttagtagagacggggtttcaccatgttggccaggctggtcttgaactcctgacctcaggtgatccacccgcttcggcctcccaaagtgctgggtttacaggcatgaactaccgtgcccaccccaactgagccctttcttaatgactacactaagttacctccttctagtcacacagttcttgatggcagagccaggatttgcatccaggtcttttgttcctagttttcttcccctgtatatcgtgcgtgtgtgtgtatttcatttgccttgtagtaggccatgatcagggcatataataatgaccaaaaacctgaattctgttagtatagaatttggtagattttctgaaagatatttgattaaaatgatataacatctgagaggagagaatgactatcactacctggagttgccatgcaaggcttgacacagaaatgtaatggcgtgaagaatgaggaatactccaggtagaggaaaaagatgaatgactatgcaatttattgtccaaatcagatttttttttttttttaaagaaagggacactagcaataattgtggtaggacatcagggcttgaaccaggaccatctgtggaaaccaggccagtggtctttgtacagaaattctgttttaggcagaaggagctatatatacaagtggctatttaaaattcacataatatttcaaacagtgttagattaaaaaaaccaaaataataaaaccctacaccacatctgccttataggagtaaagtggcaatgaataactactgaagaaacagcttataaatacctaattagggagaagagagttctagaatgatctagcacagtctattcaggaagttgtatgatctgaaagtgtcttccatttttggtagaaaaatggctaagtttggtgcagatttgcagagcacagaaattaaggtatttactagagttgggggtaaagaaggataaaacatttaattcattgaaattaatttcactgtgaacatwtgactcaaagaaggcagactaaaggtgtctggttgtgggaattaacagaattcgagttagtctatccatttatgtttccttgttagatttttctcttcccactggaagtgaaacactgttaattcactattgagccccagacagaaatagtgtgtatggtgagaatgtggtgaggggtaatagagattgtttggattagcaagtttctgaacagaatacaaactccttttgatttagagatggcagtgtttatgggaaggctaagacaaggtgggaaaaagaaaagaccaagaagtactttgtatacttaattggatatacttcaacctggttagtattctatatggctaatattttcagaagaaatactacatagaagtagtggtatttattaagaaaattacatatgtttgtatgtgtaaacatacagataacaatatatatgatatatgtacatgagccatagtgtaatggttagcactgtggactccgatatatgtacacaaatctgactcacaatttactacttcttgctgatacggtgattttagtgcaaaacctaagcattgatactaagaaagaataaaattttatttttataaaattaagattgtgaaatagtgagcagagctaaaatctggagtataagccgtaaataagtttctcaggtaataaaatcaaaagcaggtaatacaataaagaaaaaggatagattatctcaaattctgttaatttccacagccagatgcctttagtcttacttctttgagacaaatgttcacagtgaaatcgatttcaatgaattaaatgttttatctttatccccaagtttagtaaataccgtaatctctgtgttctccaaatctgcacctaacttagtcatttttctgccaaaaatggaagacactttctgatcatacagcttcctgaatagactgtgctacatcattctagactctcacctctctaagtaggtatttataggctatttcttcagtagttatttattgccactctactcttgtaaggcagatgtggtgtagggttttatttgtttatgtaaaatctaacactgaaatgttatgtgatttttaaacagccataatagtatatatagctctttctgcctaaaccagttttttttttctgtaggaagaccattgtcctggttcaccacagatggtcctggatcaagccctgttgtcttaccacaattattgctagtgtccctttctttaaaaaacatctgttttggacaataaattatatattcattcttcatttctgtctacctggagtattcctcattcttcatgccattacatttctgtgttaaaccttgcgtggcaactctgggtagtgatagtcattctctcctctcagatgtttactatttttatcaaacatctttaataaaatctacccaattgtatagtattatacaataacagaatttggaggtttttgggcattgttatatgccctgaaaatagcctgctacatggcaagtgacacacacacacacacacacacacacacacacacacacacamtctacacaggagaacttggaacaaaagtcctggatgcaaatcctggctctgccatcaagaattgtgggccataaggagataatttactgtagtcattaagaatgggcccaggagtcagacccacccactggtgctgggtaggtgaatttaggaaggttacttaccttctctaagccgccgattgtaaaatgtagatgggcctatctttaaatttatgtaaaatttggagatgatgctaaattcagaggagtgtgcgtgccgagaaagaatatcaattaggtagaaatatagacagaaaatagaatgtaatttagtacagagaaacagtgactgatatatatgagaataattttgtttcaaagtgagtcagggtaggcccggctcagtggctcatatctgtaatcccagcactttgggaggccgaggcggggggatcacttgaggtcagaagttsgagaccagcctggccaacatactgaaaccctgtctctactaaaaatacaaaaattagccaggcgtgttggcgggcacctgtcatcccagctacttgggagtctgaggcaggagaatcgcatgaacctgggaggtggaggttgcagtgagcctagattgcaccattgtactccagcctgcgcagcaagagagaaagtccatctccaacaacacaaacaaacaaaaagtgtctcagggtagagaagaagcctgctgaaaggcattgagaaagaaagtggtgttctcctttgtagttggggaaaggaagaggggagagtaggttgcctagtctagcgctacgtgttttgctgatctgagctgcagtttaaacactgggtttgttggttattgctacatagaaattatataggccaactttttctgaagttgaagtcacttgtggggaatgttgcactttgtttttagttgcactacagattacctctttcaataaagaagatatcacagtgtggggttaataacagtgttctctgatgtattttattatgccagtaagaataataatacaagattataaagtaaccattaatcctttctttttactttatgtagaagaattaacacactattcttaagtctgatcttaaagatactttacaaaataacccccccccccaaatttttggatagaaccaaaacagcctggttggaggccagaaaaattgttattttgtaaaattaataattatttcaagtttaatgatgcatatttcctacttaattgtcacaaaaatgacaaagcagaaaatgaactggaaaaattaaagaggtgccagaaaaattattatgtatttagtttgggtaaggagatcaaagcacctgtgggtcatgaaacatcagagagggccaaatatctgagcagggggttgtgttggtgtatgggttggggtatcgtagtggtaccattcagaagtggcacttatacaccctggctttctgtgaacagtaaccaagggtttagaactgaaaattaagacgcatgcattgtaaaagatttttaaaaactttctgaatatgaaaggcaatatgagggatgtaatttggatattcaaatatgggtattctggggacatttatcacggagatagaaggacaaaatagtggaatttacatttcatagaagattcataaaaagccagaatgaatggttgcagattttatgtgttgggcagatttctatcccaaagaataattcttgtgatatttgatacaattgtgatacaatgatttaaaatcagattacatttatttatgagagtattattgatattgctgtttttaacaacatgcactggtgggtcactgtagycaaaggaaaatactaaattcaatccgtgattgaagccattaagatcaaagctgacttcctggagtttgactgaagtgtgtctgccatgcgggtaagagcgcagtcctcatggctactgctcgctgccaggttggacggagcattggtgggtaaagggtgcrgcctggggcttgggttggcccagagccttagggttgaagcaaaccatggagaagttctctttgactagtaaaaacatactaacaagtgtttcatctatttctagtttaacttaataacttatgtttactttcttgttttactttacagactttctttgtttccttgcttttgaatagaaatacaattggtagaacatttgttaatgtaatgcttttggatgtgtttttgttgtattttttttaaacttaatttttctgatagtttttctttcccatggcaaatgcaggtttttttttcatttttattttgtaaatttgagtttatactaaccactgcagagcagcagcagatataaaagcatgatctcctgggtgggggtgtgctgcttgggagagcaaagggtgaggaatggagcagtttgatggaagtttccagcatgggtggaattgaaggaagaaagtacaagtttgtacaaacctagatgaataagattcataagaagaggaaagctattttggaaactacccactatacaaaacctatccacttagatttcttgaagctttgggggtaaaaccaaatgaaggaagtcctcaactttgtttgttccaacaatttaagttggttgtagtatgttttcctgaggaatgacatcctgccaggcattccttagaatggaacacaagtctagataagtggcaggtgcctgcagtccagtcctaaggctgctgtagaacccctccccgagaggctgcgtagcatggaggggaagggtgctggcaggggcttcagatttgactctatacttgttagctaccatagctttggttatttgtggcatctcagtttcattatggatagaatggaataatggcatcttcttcatcgggttatgtgtataaactgagatactccatggcaagttcttagtgtcatacctgggacatatgtcaatattgtaagttgtttgtaggaggcagggtcatggccgtgaggcattatcttgtccttatggagaaattaattctgacttccagttgaattcctgcatttcctccaaaattttggccaggccttttcatatgctagtccccttgcttctcaccatactgtttctcatgacctttttgttcatccttggatgttcagttcagccacttccttggagatatgaatctcccttcgttggaactaaacctagtgggattgacatgtcctgttcatgtgtttctctctttctcaagattatcatccccttcaggaaagaacctgtagctcccagctccctagtttgggacagtctgccatataagagacagaatattatggttgttaaaggcatggtttgggagccaacagtgtgggttagaaccttgcaccatcacttactggctatgtgaggtagggccagttgttttacctgtctgtgccccagtggctttgtctgtaaatgggaattgtaacagtacttacctgtatcaggtaagtactgttacaagtcaagggcaggttaaatgaggaggaagagacttaggcttgaagaggtgggtaggcaggtaaatgtacctcctacatttgtagataattatctttctgtaggtttgttatgcttgactattccatgttctcccagtgatgattttccaattacttatcaatttactcctggggaattaaaatgtaatgttttttgactgtatttttcttttcttttttttttaactgttggtacttttaaaataagttgtggtgaggagagttcaaattacagcataacagaattcatttagtgaattgatgtaacattagcattagtctgccattagcatatcatatagcagtattatccaggtaaggaaaaatatgccatctcaaaaaaataaaaataaaagaaataaaagcgacagacttatgtgtcaccttttccctcattttgaatgttgtactctaatgaggaaaaaccccagctcccctccttctggggcaaggcaagcatggcgattcttgttccctgcttcacagggagctgttttcttggctggtgtgccgttctgaagctcctctgccttggaagggcaggcagtccatttctagcctagataccctccatgcttgtgttagcagctgctacgaccaccactgctattccaattattaccactacttctattccactgttatttttactgctgacattactattgctaaaccaccactatttccattgataccaaaatcctgactttagttactgtattctactacttctttatcatgtgtgcagaaagaaatgcttattttccatgccctaagtagagaaccttgcaagctttctttggaatgtagattgtgccatatttttaaaaatttttatattttaaaaaattgtttaatttttttttgggccaggcatgatgcttatgcttataatcccagcactttgggaggttaaggtgggaggatcatttgaacctaggagttcaagaccagactgggaaacatagtgagacctcatctctacaaaaaaataaaaaataaatttgtgaggcatggtggtgcctgcctgtagtcccagctagtctagaggctgaggtgggaggatcacttgagcacatgagatcagattgaggctgcagtgaactgagattgcaccactgcactccagcctgggtgacagagcaagaaagamcctgtctcaaaataataataataataataatrataataataataataataataataaataatttatttttaattttgggggtacatagtaggtgtatatatttatggggtacatgagctattttggtacaggcatgtagtgtgtaataatcacattatggaaaattaggtatctgtcccctcagacatttatcctttgtgatataaacaacccaattgtactcttctagttattttaatatgtacagttaaattattattgactatagtctgcctgttgtacaaatactaggtcttattctttttaactttttttttttttttaaactgggccccatctctrggttgctttgagctagctgtcttctggctaacaaaatagttgagtgctactttctttcaccaaaggcagcgacatgcaccactttcattagcaggttaattaacttaggaaaatagatgatccaggctaactttgacctctgcacttccmaggtattcagttttttagtgcaaagactaaaaacacaaaaggaggagtaaagatgctgcttgtcttccttttgtatgtccagggactaatgcaggtgttgacagaaaaacctttgaaactgagtttctaagtctaagtttctgccaagggagaggggtgcagtgcttcctcttataaggacaagagctgttgaaagcagcagagggcttgtgtgtgtgtgttatggtgactgctggccaagggcccctgaaaatcagttggcagcttcccattgaacacacaccagaggcaggaaacacagactaaagatcatgcttaagaatgtaattgcctaataatttaaaatctttattgatattatttataaatattaatataacttctaaaaatgttcttaggtaagtttaaaaagacacattgctacattaacattgaaataagaagatatgatgacaatttaatgtaaaattttactgagttccctgactactaaggaatcgttgcatttaatttttcctagagataaactgcatcaggattcattcatcaatttatttgaaaacatgtatgtgctataaaagctttgggatacaaagacaatatagatgtattctttactctcaaatatttactatttcttagggcactaggtagtcagacagatatattatagttaagcacagttattaccataacagatgtgagccgggtgctgcagagcaaagagggtgcatgtgtttttacaatttagccctgcatttatgagcttagccatttcaatataattacatataactcatgaaagtacattatcattgaatactgtgaaaaaaaacctgttaactttaaatggtaaattactgtatttttgaacgaatgacttaaaaaattacccattagaaatgagttgtggcctggacaataatcaaaacagaaatattggcttttaawttgctgagaatagggaggttttggtttagtgaactgatgacaagattacagctaaggaacaacccttctccatttatgtcctctctgcatgtcctttagggtcatcatttactgtgatattagcatcagtatgaaaataatttgaagcttcatattgtgcagtcctaaactgatacyacatgtagcatacttattttgtaattcaggggatatttgaaggtatgatttcttagaatgaggatgatgatgccccttctgttgggacccactgatacacgggggaaaaggacaaataaggtcctcatacaaataaaaattattcttttattaaatttctaggagatgtaagatttagctcacctaattttaaaagagagatatagagaagatatggtgaaagggacaraaatagggaactccagtaagagagaagcttgatattattatattccttacacctcttcctccttaccagttaaaaaaaaggatgatctgagacctttggagaggtatagaggaggagttatgatgagaagagaaggagaattcttctygtaccttaatgtttgtaaatcggtttcatggtygtctcttctgtgcctttcgaaactgccaatcatcttattataatggccactcataatttgaattatgccagaccctcaaattcagggccgatctttcaatagcaagtgtcctactgagaacttctttattctgagatgctgagagcttctttcttcaacacacaggttggctctgggtggtccttgcctcatcaaatataagttagaaaatctacattgtgtgaaggtctattagcactcaccgaccttctcatgaaatgtcatttctcatttgggactgaaataactcatctcacaataagytgtagagrtttttcctcttccattgcctcagttaacaccactagtccattattcctagcaactttggagaagtcggtgtttattttttcaaataaaaagggaagccatcctgtttgcattcatatctttgagaaaagtcaagatggcttttacacatagagaaaaaggaaaccatacacttttaaggggtagaggaaaaggagcgattcagagttttgtagtgaactttagcagtttgaccttcaaatgtttccttttttaagcgtcaatattgctaacattaaagtggtaacaggagkctgcaccttgaaaagccactcatgccttgtctgttgtggtagctacctggttatgaaacattttctaatccagagagctttggcctgatttataattttaggatgttttagaccttgatggtgttaaactttcttcttcggaagttatgtgcattgatattgagtgcttttctaccattttccttcctcaccttgaaataagcgagctattcatgcccttctgaagagggagagaggctacgcatggttgttgaagacacatggctttgttgttagaatacatcacttttcactggatatacctgagagagaggctaggcagcatctaattactgggagtttttatatgtgaagacaagaattaactgactccctggcctccttttcacatactatgtcccccaatttgctaagttaccattttcagtgaatgccctgctatccttccagtgcccaaggcagagagaggtacagttataattctgaggtcttctcttttctctcccmctgcgtccccacacacagtcaatcaattaccaaatatttcttttccatgtaatctcctggagttcttcccatctctccttctactatcctagtctaaatcccattatttcttgttaaattatatgataatgtcctggttgtccttgtcttgtcttcctatgccacatcatctctctagtaagaagaaaaacatttaattctataagctgcaaaaatggagttaatataacatagtagttaaggatatgggccctgtagccagaatgtctggatttgaatcctgactccattgctttggcaaaagcagttatgtaaatgttggtaaatctctaagcctcagtatgtgtttaaaaaaaaattaaaacttttctgattggattgttgtgaggattgaatggcataaacatttagcatagagcttgacacatagcaagcaccgaaacatcactacaacaccaataatcataaatgcaaagctgagtattccgctttcctttggtgcttttttttcttttcttttttttttttggagacagaatctcactttgttgcccaggctggagtacagtggggtgatctcagctcactgcaacctccatttcccaggttcaagggattatcatgcctcagcctccccagtaactgggaccataggtgtgtgccaccacagccagctaatctttgtatttttagcagagatgaggttttgccatgttggccaggctggtctcgagctcctgacctcaggtgatctgcccacctcggcctcctgaagtgttgggattacagacatgagccaccgcayctggcctccagttttctaattaagaccttttaacctcatcacttctaggacaaagccaagatctctttggcatgccatggacatcccagctcccctcttctgttccttctgtcagcgctcttgtccagagaagtgtccatctcaaccgcttccactgccccaagtggtccatgctttcatgcacattctttgccgtttgactggagcatcctctcactgcaagtctggaaattgcctttctgccttctaaacaccaaccactccttctctttatgtaggtgactcccactcatcctttcttacctcatgtatcagttattccagaaagctgtccctgataccctagggctctcaaggagcatctgaatgtattcttcattgcacttgccaaactattgtgcaaccgtggactcacttgtctgtatgttctgtctcactataataagcctttgagtatagagtctggatcatgtttgcttttcttgtacccagctcttggcatttttattcagttaacatttgtttaatatattaataaatcactacccaattggggatttgttttatggagtttcattatgcctagtgcataagaggcacctcatgaatatttgttaaatgaggatgcatggctatttaaacttttgtgtatccttacttggcaactcttatatggatacactgaatatttaaagaaatttaaagttatttaattctaagtcctgaaattctaaattctaacaaattgttaagttaacttatgtaaataagttagatgatttagcaaagttgtacaattttttttttgtcaaaaataggtatggttatgaaacagtgagctggatttgcccttctgactcataaaatatctctgaaggcagtatatttgaagctgcttcagatgattcaaaggtctagcagataacttctaatctcaaagaatgaatagactgggaaaaaaaaacactcaagtaatgttgtgccaaaacaccctatctctagccataaaatcatacattcatcagttttcttcagttatctcaattttctttttgtctgaacacagtgagataagaattggcttattatgcactccacaaagaaaattatagaattttctgagaggaacattagaggccagttaggccaatcctgtgtatatgagccgttctgttgcaagtgatagattgcttaagcaaatggtggaggtatttgttcttctcatgtaattggctcttgtattctaggagcagcatggtggtttccaaatactatttattgtataaatgaaaataagacttatttggagaaatggctgattccagagctacagcagtgaaaatgtgagatggacctgggacaacttgatataagaaagcaatgaaacaaatattattgtaattattaattatgttgaaaggaaacatgaaccaatttgaagggactcccagtggccaaacgtgggacaatatgagcattaaaaaaataatgatggcaattgattattacaaaaatagaaaaaaagggaggtcaggggaagctttttttctgttttttgacaaaagaatactagcgtgtaagtaagaaaagaatgatagagttagaaaaatcactattttaaagtctcatatggaataattaaagcaaggatgatcaaggaatactaatcccattgtgaaaaattattgggaaataggacagccacwtggtaccacatcttcacccctgggttacttactgctataaaggggggacatgtacctttacagtagagagatgtggcagtaaccatcttaactaaatgattgagtttagcctcagtaatgatgggacaccctaacattttgtgtcttctgatgtgatgaaatatgaagttcacagtatgaagtacttttatcagaactgtttaatttgaatctagatttagctttcagttcacaggaaatacaagtgaaagaataataggtttaatgataccatgaagaaacaaccaaacaaatgcagaatttaggacattttgtaagacaaccagcctggactcttcaaaaagtcaatgtcattaaagaagaataaaggcaaaagkatttttagattaaaagatactgactaaaagataaaactgccaaatgcagtgggtaaaacatgactggatcctagtactaaaagtgggcaattgaggaaatttgaatatggaatggatattagataatatgaaattattgttaattttcttagatataatggtattgttgatctgtaggaaaaatgtccttattcctgggagttgcaggtagagtcagagtatttaggagtcaagtgttatctgtaattcattttcaaatagctgaacataatacatttataaatatataaagggtataggtgcaaaagcatatatggcactatgttgcaattgttgcatgtagatggaatgttcattgtattctttcaacttttgttctgaaattcaaaaaaataaaataaataaactggaaaaaaaatcagtttggtaaaagcaaagcaaaagtcctggagtggactgctggcaggctggcagcctcacttcctctattcctcagctctgttcctatatgtgcacagagccacacacttgtgagcattgagtgaagtgtgagcctagtgaataacactaggctcgcactagactcagcactaatttagtcaaattttggagcagtgggaaaatctcctgataaatttaacagagaagcttgaggaagagctttgtcttgttcatttttaacatttccagtatgtgtaatgttgtaggaattcaaaaactgaaaaatacataaataaaggggtgaccaaatttgaggattgcctggaaaagtgagagtatataagtgactttcaaattcagtaaatatttgtggaatttagtagatctgaactagttaagggacaagtaagtttaagatgaattccagaagtaaggggaaggcctctttttaaatcttctgtgcatgcaatatttcatattgttttaacttttagtaataatacttgcttttctgaattagtgatcaaagcactttatggaagtcttctgcagctttccctacaggtggggaaagtttgagtttggtgggaaatcttcagagcgtggtgtgtgcaattatgctttgttccttggtgagctatgagtcaggcacttaattatgtaaacgatattgcaagagagcagttgcataatccccaagagagtaattattatctgtcttggtagaatacaaggcttttaatctgtaaataagcaattctatgtggaagagctacatgcagagtgattctgtgtcttaaaggtctcttatgaattttttaaagtgaaagcagtaactgcatgtgctgattacctgctgcctttgtgtttcaaagggtttatgatgcttcccttgtggttttaatccctcctgaaatatttaagcctctgagaatgattcccgtgaagggtaaagtgtgtctaagttaagcctatgaataatccaaatgtttcaaatgtattaatagatgaagtaaaaaaagatatgctttctgcaaattaaaaaaacaaaccaagataaacaaaacaatgaattaagacattggcaacacttttaaaaaagcaaagatacaataattagctaatacgttgctcactttttgatggttagtaggtttttttccatttttttaaactttattttggtataacttacatataataaaatgcatctatttaaagttttcacatgtatatttttwaaaaaatatgtgccactgcagttagggtatgtgtgtattttgcttaggtggatctgagtcttttagacactgaaagcaaattttaacttttgtttttttaagtagtcagtagtgtctgccttccctcctatctccctgttatagtgtggatgagttgaccatgctcttctctaaggtcagctgctgcacttaaacacttgatctctccccacttcacctaatcaggactacatttggggaactgtccttctctgctttgttaccagctttcccctctctatcaggttattcccatcaaaacagaaacatgtctcgacatcttctgctgtttcttaaaactcttgaccatttctctgttctcctctgcagcaaaactcaggagtctatattctgtcttcacttccttttctctctttgtctctgaaaccaactccaagaggcctttcatcccactcctccatatagagcctgcttttgtcaaggtacccgtgactttcacactgccagaatccatgggcagtgttgaccaatccgttggtctaaatcctatttggccgtctgcagcatctgatatagtttttcactcccttcatctagaaacacattctttacttggcttcaggaaaaccctatctcctggttttcctacttcctaactggtcactcttactaagactcctttgtgagctcctcctcttttcctgatcctttaaagtttcctggctcaggtactctcctcttctttgctctattccacagtcatttcagccagtgtcatggttaacagtcctctgtacactaaagactcccatatttctgtctgtagtacacacctatcccctggactccacacttattggatgactaataggcctctcagatttaacacagtcaaaaagtraccacactctggtcttcccacagttgtctctcacctgggttattgcaagagccttatgtctggttttcctgcctccaccctagctccggcccctttcactctatattcagcacaacaggccaaaaagacctttttaaaccatcagattatgtcctccttttggccaaggcctccartgacctcccatatcagtcagagtaaaaactgtcccataaagatcttcatcatctgaccccactagctttccatctttcctccttttccccccattactcactctgccttgctgcactgacccctttctcagacacgctcagaggcctctatgtcagggccttggtatggaacacttctttagtctgggctgttgtgtgctacggttctccatggcttgctccttttgcacctcagatctctgctccaccatcctcttctctgtgagaccttctctaaccatcctgtttaagttcccccacccagccccaccaactctcctgatccctcctccaggttttatttttctctattgcacttaccaccatatgaaagtaaaaatacttgcttatttgtgtttgttgctttgtctgttttgtctgtcttttcatattagaatgtaagtttcatgagggtagaaattgccttggtcacagctgtatcacctgtgcctgagagagactgcaggctcggtcagtactgctgaatgagtaattgaaaagcaacttcaaaggctgcttgatgctttcttgtcatttttagagcagtcttgagtgttacagagggtggatagcattcagaataattaactttatgctaacagctcttttccattcctcagtttctctgtttgaagaacataaggacatttctcacggcctgttgtgagacgtttggaatgaggaaaagtgaacttttcgaggcatttgacytgtttgatgttcgtgactttggaaaggtaattatacttcatttttaacactactttttaactggaaagcatttaagcaaattgtttcaaatcttgaagtagggcatgtgacttaagtggtttatgtatctgcattatatagttaaatttcacatgtagatggcttagcaaaaccaaaaaccaaaaaacaacaacaacaaaaaagaaaccccacacatacaacaacamcaccaaaaaattagcatcaactttccaaatgagattagaattattttgtaattaaaatagtatacagggagggaatcttttctccagagataattttttttctgctggtcacctcagaggttagggttactattatctgccctttaggttgatcactgggcactcaggcctgaggaccagtattcttttcctccagtcttctctatatctgaaagctgctaatttttggaagttgagaatgttctgttgtccttttctctattttgatacttggttgggtgactcagagaagacatgaatcacaagtgttcaagattgttgaataatttctgttgcttgaatttcagcagatatttgttggatttcaaggacatttttcacatggaaattgttttaatatttactgttatccgtatgcacactaaacacatgtataataagtgaaacaaatcatcatttcaaaaattatggtcatttattatgaagtgagtggacataaacctctcacaagtaactagccataaaagagtcaggtaattaaggtgacaggactttagcttatgctgatgtaattgcattatgaaaataagcaaataaggaggaaaaaactaatgctattgagaagtttgtccttattcttgtaattcaggtgctagtatcttatcaaaaggctgtttgagagtatacattgttttaactctgagatataatattttcattagaaaataaccaatggattgctctttgctaaacagcataaacttgagacagaaatataggaaatttgatgctgaaatacagcgcatatggggaagccactctacctggggtgggggaaggccctggttctctctccggtcttaacccatggtcattttgtgatctagaaggcaccagccttctyrggcatcaggctgcctgccagcttggaaagctgtacmaaaggaaggggggataagaaggtggtttctaagattcctttaatctctggaaagctgtgatttaactgtcttgaggtccaaaaagtgatggaggataaaagatgataatttgtacaacgaactgaaagccaagcccctagtaaggaaatgggagcgcatttgtctgtggccatgaatcacaggtgaggtggacacttctctaagctgttggccctgaaaaacaccagagatatttctggttttatttttcttttatccttccgcctrttcctcctgcacctttaaaaaaatcttccttgatttttctttattttcaccctctcttttggggaaatgaaaaatgaaaatgaattggggaaatgaaaaatgaaaaagtcttgactttttaaagctcattaaggaactatttatttttcatttaagtttgcaagaaatggtgttgataaatgttggaaaaatatataaatactttaaaatgcatggtggtgttctactggaatgagattgcatgctagattgattagacaacggaagctttgtaggagagttgatactacaaaaaattgaatgtgaaagcataaactgtatgcttctcaaggataaatgtatttttgactgcttaaaatattttagcagtggtagatctgaaacagaattaaacatgagattgtggtttagaacttgaacctacattatagtcacttacattttgctactgccaagattggagtagctatctctttagaactgtatgatctaaagaaaacactgaaagttaaagaatttgtgatatagcttcataatttaccagtactaatagtattaagcattatatactctaagtaaaaactgccaataccaccagtagttgaacacttaaaatatgcagtctgttcagtcttcatgtataatttgtaaaattgtaacaacgttaagaggttaggtactacatttttctcttctgcatcccaaatcacatatctatttgagattgaagcagcagtttgaactcaggtctagctgattgtccactactgtaccatagtgcaaacattcacatagcacataaygtgtactttgcatatattgagggaatcagcgcatcaatcccaacatgtggatactattatttttcccatttataggtcctagcttgtgggtaatggaactgaaataattcttgtagttttaagttgaaaaaatgtgaatagtgttaattcagaaacaaaataatttctgatgtcgtgaatatatacattttaacaggatgtggataggttgttttcctccattccgtaggatttaattaaatgttctgttaacttaaaatgaataatatctatgtgtgctctcctgtctgcctcatttcctacattggtgaatctggaattcatgtgtatttggcatctttttgccaaagaatgtattaattatgatagcagcacctagtgtttttatagcctttgaagttttcagagtgcttaatattactgacttcatttgattgtcataatactcttgtgaagacattcttcagatgaggaagctaagacatggggaggtgcttggatagtgattctagggtctccttgcttgggaagaggaacaagatctggagctcaggcctctggcttctcagtcctgtttttcttgtccactgtctgtgttttgggtctcactgctctgtggatggtcagggaaaaggatgaacttatagaagaaaattaaaggaatttataaaattaaaaaacacaggtgatgtgttacttggcatctacttatactttagaaagaaaggaaagatttaggatactgcatgagtctgcagcccagtggtggttaaagttgtttactctaaataggcatgtgattcactgattgtacacatgcagtcaattcttagctatactctcttaccccttttctcattgtggtgttttctgctcactaaactttgtccaagctctccctctgtttggggtttaggagatttattttgaatcttaggcttgatatggatgtgttttcttttggaaaatcctggaaacagtgttaacacaaatgataatttgtattttgtgagatggtgaagagcatctatttgggcttctctagaagggcttatgataattctgcctttcagtgctacctttrttcttagaattgagctctttcctcagtagtaattcacttcaaactccaccaacatcaacaaaaattagaacagtttgaaacgctttctacacttttttttttaatcacacaggaaagaggagtgagtttagtaacttgaactcatttaagagtcagcagaggccttcaggttagatatgactctcactcttcagggttgttaaatactgaaaaaagctcctgaaagagggagatttcttttctaagactgctgaggtctggtsgggggagagggggggaatgggggacgttgagggtttatgttttgaaaaaccatttactttcttacttttgaaaaaagatgaatctctttctggctttctgataataaaaataagtaaaatcttgttagttaacttctttgcttaagaaatgtaattaaaatgtttcccctggcataatattagaaattactatattattttttgacatcatgacagtatctgtaactttgttcgtttccgtactgtatrtaaagaattttccataactgtttcaatcgtcagtttatgattaactcactctttggaaatgtttcctactgagctgtctgttggcacattgacagtgcagaagcacatgggattttttctttaatgagacaatttctagagcgtaatagaagtcaggctgccactgtccagatgagtgactaaagtcatctccttaccctgcctctgggtgagtgtgaagggcctgcttcccatgacacacagtgtaaagtgatatgttttcttaaagagtatccatacctggccagtggtaggtccagttgatttgaattgcaataggatagtttcatcatgttcaggttcaggacaggcaccgtcaaaaggaattcagagcatcagcttaggggtgagtcagggatacaggtaagaacattattgggagagagagagagaaagagttgtattttagttaagaattaaactaaagagcttcttcacagcaaaatgaacagtcagcagagaaaacagacaacccacagagtaggagaaattcttcacaatctatacaccaaacaaaggactaatatcaagaatctacaaggaactcaaattagcaagaaaaataaaacaaacagtcccatcaaaaagtgggctaaggacatgaatagacaattctcaaaagaagacatacaaatggccaacaaacatatgaaaaaatgttcaatatcactaatgatcagggaaatgcaaatcaaaaccacaatggaataccaccttactcctgcaagaatggccataattaagaaaccaaaaaataataaatgttgacatggatgcagtgatcagggaacacttctacgctgctggtgggaatgtaaactagtacaaccactatagaaaacagtgtggaaattccttaaagaactaaatgtagaactaccatttgatccagcagtcccactactgggtatctacccagaggaaaataagttattatacgaaaaagatacttgcacacccatgtttatagcagcacaattcacaattgcaaaaatgtggaatcagcccaaatgcccgtcaatcaatgtggataaagaaattgtatatatgacggaatactactcagccatacaaaggaatgaattaatggcatttgcagcaacctggatggaactggagactattattctaagtgaagtaactcaagaagggaaaatcaaacattgtgtgttctcactcatatgtgggagctaagctatgaggatgcaaatgaataagaatgatacagtggacttgggactcaggggaaagtgtgaaaaggaggtgagggataaaagactgcaaattgggtttagtgtrtactgctcgggtgatkggtgcaccaaaatctcagatcaccactaaataacttactyatgtaaccaaataccacctgttcccacagaacctatgtaaataaaaaattgaaaaacaaaacaatacatggtttctgagttagatcttggtttggattccagttaagctccctattagtatacagtcttgggcaagtaacttgacttctttgagcttcagtttcctcatccatgtattgagtttaggtgagtattaaatgaaattgtgtatgtcaagtgcttaacagagtgtcaaggtccaaggtaagtactcttattgttaatgttattatcactattattatttttaatgattgtgggattcattggtaaacataggtgtcgaattttgaattaagtgcaagagaactaatgatattaaaagggtgagataagaaataaaattcattctttctaatgttgtatagcactattttattttattttgcacagccatcgtttctctttccttctgtggccttggatctcctttgagaaaccacactttcctctttcttaattacagagtttggatggtttcatcaattatrtcccatgcctttgaccacatagtgatggttcaggaatggggttagtcactcagttgggaccaataagacatttgcaagggtagttttatttttctctcttcctgayacagaagagtgtagatgtgagtctacacaaggagctataaccatctgggtaccacatggagtttcaaaatggacccagttcagagggaatagagttgaagatgaacctagtgacaccctgtgaagtgggaatcagtgctgtgcccaaagctaaatgtatatctataggtttttccatgaaccaatacattcctccttttctcttttttgagccagttttcactagttctttcaaccaagagtaagagaaatctaagtgattcactgtgtttcaccagttaaatgatttcaggtttgtagatgtgttaatctttattaccgaagttccaagcaatttggagaccatttgttaagcctctacatctcctatcgtatatgcaagaggagatataaagacaaagtcccagaacctattttgcagcatgtaaataataaaatagaagtacagtcccagcttcatagtcaatgctttcttttccttgccagtgattccagaaatatcatcgatcttgaggtttagaaggtcaccacaggcatcccgacaacctacttgagagcctgcaatggtttactactacctgtctatctttgtgaaattctgcctggctttccctgtcacaagaaaaccctcccaagcaaaggcttctgagcctttcttggctataggtggccccagggacctcaccttggcatggcttgaaagagccttattatctagtgcatacacgttaatcaacacctgaaaacattttttcatatatacatatgtaaacaggaagaattattttagggtgtaaatctttttaggtacttgtttgacataaaacacgtttgatgtttctctcttgaagtatttcccactcaaattatccagaaatctttgggctttatgtcatccatgggacttaaatcagccttgcttcaaagccccacaggagcttgatctctctgtctgctagtgtggtgctattgcacaagactggttctgtgtggttcctgggacagctttagtgctctgatgctagcaatgcccttgtattttcagcccttctcaaccccatactacccacacaagtttccttcatccctatagcattttagcttttgcattgagcctggccaggccatatctccctaactttgtgatgaattcttttcaggggctccttgtattctgtcagcaagcctgggtcacatcctcctcattcagcccttacagggtaccaacttccagtctcagagcggcatttgggatcctgagtatttttcctccctcaagggtctggaattttcccacaaattagccagcttccagcctagagctggctcagcctggcaaggagtactgtcaggagtcaacctccactcaccaaggccgcgtttgctttgtccccctgagcagtaggaggcttgcctgtaattacataactaagggggagctctgcagtgattcctccctgaacaaagatagcttgttccaaggctacctttttttaggcaaaggaggagggaacagcttctagccttccctaatgtatgtgtctggctggctgttaacacaattcccagatcattagcactattgccctcctttgtttttggatggagttgacctgtttaacaaccttctcatctttttcccttttgtaggggtatttaatgcttggcagatttttccattcctacctcctcttatagaactttagtacccgagccatgcaaacacattttttacaccttagtgattattcaagtccagtttttagtctgctcctaattatttttgagtcagttcaataaactctttactcttctgtaaactaaagactgttgaaaacttctggaataatatttcccaaataactttgcaaagaatcccattgtcctaagaaatgttaataggaagactggagaaaaatattcttgttccaatgagtttggtaaacactgcatattgtatttatgagatatagcatagtaaaggaactgaaaagtcctgcagtgaggaaaacaaacttttgtttactccagaatttctcatatttgcacatgatattaggtatttagatatcatgctatttaggtatcacacaattgcttcaaactcattatgtataaaactgaagtacttttttttttcctttggagacatttctattttggtaatgtttcttgttttgttcaccctgccaggagctaaatggttacaaatgccctatttttttttttttttttttttttttkgagatggagtctcgctcttttgcccaggctggagtacagtgacacaatctcggctcaatgcagcctccaccttccaggttcaagtgattctcctgcctcagcctcccgagtagctggggctgcaagtgtgcaccatcatgcctgggtaattttttgtattttttagtagagatggggtttcgccatgttggcccagctggtcttgcttgaactcctgacctcaggtgatccacccgcctctccctcccaaactgctgggattataggcatgagacaccatgccaagccaaaatgccttttctttaaccctccttgcttttgcctttagttgaggtactcatcactgggattattgaaattgtcttctaggtgttttcttgccatcagttttgaatcgtttcaagctmatcttcaacataatcttccaaaaatgtagatctgatcattttactcatgggtttrtcaccaggggaaggtatctgagttaccagtggcgaatctgtacaggtctacaggaatctcaattcttgcctcctcagaagaaagaattcgactgaggggcataaggcagaaaaagagaccgaggcaaatttcagagcaggagtggaagtttattttaaaagcctttagaacaggaaagaaaggaaagtatgcttggaagagacccaagcagacactgaggtcaagtgcagtgtttaaccttgatcctaggactttagaagctggcccctttcccatgattcttcctttagggtgggttgcctgcaagcccagtaccctccttatccttgggaagtgagcacacacagtgtgtttagtatgttgtatgcatgcctatctgagactttttccctttttctggtggagtgcccctggaaactcatactctgccattttgtctcttactgtgtactcccaggaaattgcttatctctggtgcctgcattcagttaacacttyagtgcaacaggtgtggaccatcaggaagtggcttttcccttgcatcagctgccaagttatcacttttagagaggcagtgtgataattgccaaaccttcacctgacagtcctagtggctgggagaaccctttcctgtccactcttgcctatctaactagctgtaacaggtttaaaacttgatagtggatccctgttgtttataagagaataacatctaaactcttttacaagccgcacaagattcttcatgatcaggcctctgcctacctttctaaccttatttctcactttcctactcccataaactccctcgcttaagtccttccaaattataaatcatcatgactcaccagattaatattgattaatattgtttcctttgcctggaatgccttttcttttcattccctttagtcccttgtcygcggtgactcaattcaagatcacatacactcattacactcatacacacactgcttaaaatctgaaatyatgtgctttatccagagctctggacttagttggttcttggatatattgagtcttctgggcctggctttgctacttgtctctgcacattccctcagtttcaactgggaccttccccctgcttctctgccccacagaaattggaccttgacacattacattggctcttttcttcagctcatcctgagactttgagatcaagtaaaactgactttcaccctaccctgcccccagccacctgtgtgcaggaaagttgctcagcctctcagarccttcatgttttgatctgtaaaatggccctgatgaggatccctactgcatggaattgtggtgaagagtgtgaattgaattctgagggaaaagcaaccagtgcagtgtggggcagggggtaaggctcagccagaggtaactcctgagtaattcacccatcatttactcattgggaagtatttgtatgccatgtgctcgtttatcagggtggaggagcaggtagtcaagaccccctgctctcaaggcactgtcactgtccatcactatccaagttaaggaaacaaattggtaaagcataaacaaacaagataattacaaccagtgataagtgccactgaggaaagaaacagagaacaatgatgagcagctggaggaagccactttagacagactgggaaggaaacccatttgaaatagtgacagcccagtgagaaggggatgctagtactcacacatttacttatttatttattattttttgagacagggtttcaccctccatgcctaggctggagtgcagtggtgcartcttggctcactgcaacctccttctctctgactgaagcaatccttccacctcagcctcccgagtagctgggactacaggtgcatgccaccacagccagctaatttttgcatttttttgtagagacagggttttgccatgttgcccagactggcctcaaactcttgagctcaagtgatccacccacctcagcctcccaaagtgcttggattataggcatgagccaccacgactggcccttgccctcttatttaaattaagttttatataagttataaagcacattttaactagattctatcctacctctttcagtagatccccttgggctactccttcaacttggcctcagtttgttcaactctgatattctyctgattctaaaatgccacttattggtagatgtaatatgtatacattgcattttgtaaagtaatgttttgctttgatgattcttagttgtgtaatcctctctgaaaacatcaaggcttaggctctctcataccttttgtttatatataagctcttctgcagaggcttttaaacctgggtatacttcatttttggtaatattgacattcccttaaaattttaaacttttagagagaaaacttgactgtacatacacttctggagagagaaaggcattataaagagctaaaagcatgataaagatatcacctagattttacgtctgcatttggcatagctactgagaatgtttccaaaactggaaatctggtttgagaactgaaatcaaacttctctttgctgtttcaaggattcctctatagatcaaacagtgaatctttcgggtagttttttwaaaaaactctatttccttcctaatatacatgtaaatatgcacacagaggtttacagacataccaagatatacgtatctatatacgtaagtagagggaaagttatttaggaaggtgccgaagtggtaatccacatggaatttttggatttcgctgatagtcctcacagcttgagtgtaagatgcaacaggggcaagctggatcttgaggtccagcagagattggggccagagtatgagggcccttgagatcttgcagggtctgcactgattctgacaaagggccagtgagtactttttaacagatagacaggagatgaccatagacaggagatgacctgctaagtgcttgagctaagcattctgtcagtgggggaggctgtagtggataattgtaatgccagtggtaggaggagcagrcttgaaactgaggcagtctggttaaaaaatgatgcagacctttactagagcaactgtaaaagaggcccagagtttgagagatttgggatgtttaagaattgaagtgagtggtcagaggatgagaagagagaatagtgagccttggaaacctggcgaggggaaaagtagggtttattgcaagggaaataatggagcaagagcaaatataacttacagtgggtttcaaattaatgtaggagaattctaatggcatttacccttaatttatgtatattttacaaccgagtagatatgttttatttttctatgatttttgctatattgtgccatcctaaattttccctttgttcctttttttgatgttcagttggttgcttggttgggtttttttggtatttactgattatctagtggaagcttggtccctggtagaacacttagaaatttggggtttatcatttctattaaaaatggaaaatattttctttctgtgtaataggaaaccttctaggaatatttgtctgtatttccaaggctatggcacatatatgctcactaatgcacgtattctaattcctagccttagttgttgggccgtatcctatctgagctgtgttcagaaatccttgaccttgtcacattggcttaagggtaagatgtagtttatccaagttacatatggaggtcattgagtcttcatttgcttacaataaattgtaaatatgatggatgagaaatmtgtaaggagaattggttaattccagtgggtgatatattaatagtcaatttacttgtctacacaaacaacagtgaggcagaactcttggcctttgactgttgtgcctgtgtatttcctatcaacaagatctcctagaaaaggaggatggcactttccatgtttattttctgtgtcttcttttttttaatggcttatgcacatctgtaggaataaaggaggctggtgtttgcttcccatgctcagtgagaggggtagtgtgggggtggaactggctgaatgctctcatttgcacaggattaggcagaggaagtgtgcaccagtagtggtatgagcaccaaacaactacaggaaacaatgcttggcagtcactgcagctgtgtggagtccggctgcgcaggcttcctctggatagagtttagtttctgagtcacttgttttccacttaaagcacctgtgtctttggagaactccattgaagaaatattagttgaatatgggcctttctctggtttgcctcaatgccaattataatgctctttggacatgaaaagttctgctaaatcaacatagtgtctgaggaccagtggtgtcaggacaggccagtgcgtagagcagtcagaaatcattaggttagaaaaatgaatggtttttaaatctttcagaacactccccactgaagtatgtatgcatgtgtatacacaattaattttgcacagagatgtgcttggtgaccttaggtataggctttaccttgctactctcattctttgtttctgtgtagaggaaatgaaggatgctgcttgctgcttctgagtaagcaggtgccttatagattgtgtgctgaatcatttacactctttgagttgtcttttaaagtagctgcatatttataattcatcttagacaagatgatcaatctagaatggttatattcggatatgggtggacactggacactatttttattggtcagtctaggtcaaattttaatgatgattgatagcattggatatggattgggtagagtaataaaaacatacatagaaggctagattcatgttagaattagctatgcatctgctccttatatctataaagtttaacaaggattctttaccaaaatcactgctgatttttcctaatagccttaggcttttgggaagaagcagcagaaaaaytagaatttattggctgccagatgataaagtacagtttcttggggagatagcaatttagaattttagcaaagttactatgaagtataatgatgaaagggagatgatattaattagcgttggcttttacaaaaaaattgttgaagtatttttagctttgtttacttggaatttggtcagttgactgcacccaagattctccaaatacatagacgtgtagaaagataagcaatcaaaagcatatattcctttttttctatactgttttggattcatggttggaatcccttctgcagtatttgaacaattcctagagatgtaacagaaatttcttaagtagcaacagttccaattatggatccagttatggataatgaattatctagagattcatcactaataataaagcataatctatctttctaaattttcttccattggttttagagcagcacagaattaatttctacaccttctgtaggacaatcgttcaaatatttgaagattgttatgtttctgtaagtcttttcttctttgttgtcttctttttttgtaaaagatagggtctcactgtgttgcccaggctggactcaaagtcctgggcacaagcagtccttgtgcctcagcctcctgagtagccgggactgcaagtgcacgccactgtgcttggcttctcttcttaaaatgaaataaacgtcgtctcctcagttctttcttttttgattatttctttctaacttctgtgggtaatttgaaatgtctgattaggataacacatatgaaacagcacagttaaaggttaagaaatttaaaatcgaaggagagaatagaagccatttaaagaaagggacactatcatcataccaagtggtttgaggattacagtgatctctcagcagccctgaagtcaagtaaaaaagaaacccaataggttaatacagaaatgagttcatgaactagcttaaagcctttgttcccagtggtaatttggaaaatgctaaattaaaagcccaagaacttaaattattatagagataaccaaacatataaaacctagaaaactactacaatcaccgctcatatatctactattgaaaaattatcatttctgtctctacaaaaaaatacaaaaattagccaggtgtggtgccatgcatgtgtagtcccaggtacttggaagattgaggtaggaggatggcttgagtcaagaatgtggaggctgcagtgagtcgagatcatgccactgcattctcgcctgggtgatagagtgagactccctgtcaaaaacaaaaactaacatttgaccatatttgattcatctactatctattataaatacttatataccgctatttttgctgaacaatttaaaagtaaatatagataggcatcatgacatttgtcccctaaatacttcaaatggtacagccgtcaaaataaggatatttttctatataaccataatatctttatcacatataacaaagtgaataatacttccctggtattatttaatatccagatatttaaaatatcaaattttactagttttctccacaatggattttatagctagtttctttgaatttgacatgattgaataaaggttcagacattacttttggttgtcatgtcttcatgagtctaagaaaaatgttttctttagcagttttataaatatcttgatttgaatttaattttctgatgatctaccaaaggtgattatcatttttgatgtatttatattgaatttatactgctcctctttgagtttgaataaagctttagttttctgtaatttaggggatttttaaaagccttggcttgcattcagtgtggaagggactcagtaaatatttttgttaagatttaaataagtagtataatgttaaacagtttacaagtattttaggactattatcagctaagcactaaatcartcatcgagaattattccatgtttttatgcagagtttaaatacaaggaatgtactcttttagataaatagatcctaaagcatgttttctaatcaagaaatgtctcaaggggctaggtgtgctggctcaacgtctataatcttagcactttgggaaacagagggtggagaatcactggagccccaggagttcaagaccagcctgggtaacatagtgaggtttcatctctacaaaaaataaaataatgaactgggcttggtggtgtgcaccagtagtcccagctattcaggaggctgaggtgggaggaggtcaaggttgcagtgagctgtgatggtgccactctactccagcctgagtgacacaacaagactctgtctccaaaaaccaaaaaatgaaaaaaaaaaaaaaactcctcaagaatctttcagagttttggagtcttagttgcttgaatgctaagatttttatctggctaaacaacaacaaaaaagagaaaacaaaaacacccaaaccccaaattatttagacagtatttaagccatttacactttgtcaaaaatgttagaattctgatttatccctgcctaaaacaactgtatagtttcaagaacatttgaagaatgagatgtcatattcttgcccatgggatttcatttctatggagcatttacccaaatatttgctgtgactcacacttccaggatactctcatctagagcatcagtccccaaccttttaggtaccagggactggtttcatggaagaaaatttttccatggaccgagtactgggggaatggtttgggggtgaaaccgttccacttcagatcatcagacattagattcttacaaggagtgcacaacctagwtccctcgcttgcacagttcacagtaggcttcatgcttctatgagaatcgaatgcccttgctgatctgactctaggcagagctcaggcagtaatgctcactcacgcactgctcacctcctgctgtgtaccagactggtactggtctgggggttggggacctctgttctagaagtttcactcctttttaaaattttcttagatggtatctgacttaaatttttcttagattttggttctaagaaatataatagttaaaatttcaaaagcaatagttttgaaggaaggtttagaagagaagaaactgtttttagaaaatcttgtataatttcagtgctgtcaatatgttaatctcaaaatgaagatcacatttttaatcttagccctctaatagcaaagaaatgggaagaaagcaaggaaattttcttgtagttaagtggattttcctcctttagtttaaattctggtggtggtatatctttaagagtggttaactcacttaagagtgaaaagaattccctaaactcaaaaagtataaaatgtataagcatattctttattacatttattattgccagagtggttgtagtttgttcaggattaacattttctttacctatgttgttactatatattacttgttacataaataaaatctgcaccaaagttgggtcttataaataatataacatttgtatcctctttttaatgaaaaatttcccatgtagtccatatacctttcttccacattttttctctctcgaactccagctgatctaaaaggaatctaggaagcattcttcattcaacctttaagaggcccagcaaagtcttttggtaaagttgacaattctttttctgagacaggaatcaggcacagtcagtcgataacttccccccctttcattctgcattcattctgaatattttatgacaaaagcttttagttttgttacagaaaaaaaatacaaagcccagatttgtccaaaagaacatacccgcaagaaggtctacggcagtgaaacagaaattgaaaagagttgaaatggaatttttttccatgtttcatatcctccattgttcctaaacctgtaccattcattgtcatggaaaatgttactacagtctaaaaagttataacaaagttcaaaatttatagttaacttaggatttttaataagaatagaatatatatcatatatatgagaatttattaggtagttttaattcacaccaccacaaggtcccacaataggctgtctgcaagctgaggagcaaggaagctagtctgaatgccaaagctgaaaagcttggagtctgatgtttgagggcaggaagcatccagcatgggagaaagatgtgggcaagaggctaagccagtgtagccttttcgtgtttttctgcctgctttatatcctggccatgctggcagctgattagttggtgcccacccagattaagggtaggtctgcctttcccagcccactgagtcaaatgttaaccttctttggcaacaccctcacagacacacccatgaggaaaactttgcatccttcaatccaatcacattgatattcagtattaaccatcacaccatgtcatccacagtggagtgaaatggtgcaatcctaactcactgtaacctcaaactcttgggctcaagcgaccctcctgcctcagcctgccaagtaactaggactataggcacacacaacaccacacccagctaattttaaaagtttttgtagagatgaggtctcaccatgtagctcaggttggtcttgaactcctgtgctcaagtgatcctccagcctccgcctcccaaagtgctgggattacaggtgtgagccaccatgcctggccttccttcatacttagaaattgcatgaatcattagatttttgtagtaaaaaacaaaaatctcatatttgctctattagataggtttcagccaattttcgagaagctggttactaaacaagagaattaaacttgagaacaaaataaagtgctatcaattagttatcataactttgataggcaatttaaattaactattataacagtaatgttgattttttttttaatatttcggtcctgggggaaaagtaccatttaaaatttcatgtgtcttttgatcagtaaatcagcatattggatagaaatttcagctatctactcataaaaaatgttatattctggtttgactttggctcaaatcagaaaattgctatgtaaaaatttacagaataatgcaatatcctctactcaatagctcccaactactaagaatattataaatgtaagcagttttcaggaacatagcaatgtgggatatttcactggaatgatgtaaaccgtaattaatcacatttctgtgactgccatcagtaccatcaccttccttcagtgtctctccttgtatttgggaatcccagatttcatgtcggcttttgagtagtcctgctgctgaccataggcttttctctcatcttgcttctcacccactccacctgtgtcacagtgtcatttgtgagcttgcttatgagtgtgcatggggtggtctcctactcagaacatgcccagctgtgcttctgttgcttcctagctgcctctgcagcttctgtgagggaagactgttgggcaccaatggtagtgaagcctttggacctcaagcactgcactgttttctgggtagaagtggaaggagcctgtgctctcagctttctccacacattttcctttctctggactcagcaggtatttttctagagttgacacaaaggaagagctgtgagacatcttcctgtatcttgcctttgagtcctcttttattccccctggctgctttgttattaggctgaattttttttcattaggttttgtagtcctcatactattagatttattgtgggtcaccctaccagtcctaacaaggacatcagtcatgtttgaaactcatagatttggggtaagctccagttgttacacaattcctgcccctgctcttaacaaatttaacatataaatgaagttaacaggcctggtggggtggctcacacctgtaatcttagcactttgggaggcccagtcctgttgatcccttgagctcaggagctagagaccagcctgggcaacatggcaaaaccacatctctacaaaaaaatacaaaaattatctgtgcatggtggcatgcagctgtagttgcagctactcaggaggctgaggtgggaggatcgcttgaatccaggaagttgaggccgcagtgagccatgattgtgccactgcactttagcctgggtgacagagcaagactctgtctcaaaaaaataaaataaaataaatagagttaaataccagagatttcttgaagagccttttttgtgacagacagtagaatgctgttcaccaaacccatttcttcttgttttggggtacataggcagattatatttccaagcctccttgcagttagacttagccatgtgaccaagttttagccagtggattgtgtgcagcagtaatgtgtaccattcccagacctggcccataaaaacattcgatgtgctatcttccatgcttttgtttttgtgtgttttctctaaacaccaactgagtacagaggttttggctttagaagatggcaaaggcacaaagggatggatgctcggtcgctatgtaggggaaagtcatctgctaagcaggaacaccattgtgggattattatgtgaatgaaattaaactttagcatgttaaaatacagaattttagggtttgttacagcagttactgttatgctttcacatcatttttcagcagttctcaacctttttcaccttcacatacctgagagaagagaccctcccatcatattcgtgattcactatggcagggaaagatagtctcaaggtcagggaggtcattatgacatactgcaaaagtggtcgagcaggaaaattgcagagaaatgtcattagatttagcaacatctagagcactgttaaacaatttcagtagagtggaagtagcaggagatgagattgcagaagcatgagaaataaatggtagatgaacacatggagtcagtgaatgaagttatctaatatattagattccatcaacataatcataagattgcaaaatttgtggaaaacaagggaattgttttttgttgaagccatttgttaaaagattttaaggtgaagatcttcagcaaggtagtaataaggtaaatatgtatctgtttgcccagggtggtgtcggcttatgtctgttaacctagcataattttattttattttatttttttaggcagagtcttgctctgttgcccaagttggaatgcagtggtacaatctcggctaactgcaacctctgcctcccaggttcaagtgattctcatgtcccatcctccagagtaactgggattacaggcgcacgctaccatgcctggctaatttttgtattttttagcagagatggggatttgccatgttggccaggctggcctcgaacccctggcctcaagttatctgctggtgtcagcctcccaaagtggtgggattacaggcgtgagctgccatgcctggcccctagcataattattcatagtgacctttcactcttagcaatatcccaacttagaaaaaaaaaatacagttaccctacactgtgacaacctaatcggcatacacagggggttcagatctgaaagagtggctgttaaacacatagaaagttagctcataaataagttgtctgtggaatattctttagttacctcttataaaggagttaaaatactgtttcttggtttacttaaggacattgtcaaattagccctaatataggattgtgtttaggaaatagaatgttggataaccttcattgatctgggttctcttttgatctatttttgtttctctggcttttctctttctgtgatggtctttctgtgtcctgctttgtcatcaaaaataacttttttttttaaagacattaaaagaacttgcagcactataaatgaattttttttttttggttcttgagggatgggggaggatctttctgagtatagaaacaagaacttgtacagaaggtgatacattttcatttatgaaaatggaaaacttgtgtatctcaaaaagtacccccaagtaaaaggcacatatggcaaactctgacaaaacacatattatttatggaaaatatagtgttgaaagttttattctccataaagggtaaataatggattacaatggaaaacacttgtctcctatgttgcagcatagatgattgcatttaatattcccagctccattctgttattatcttggtttcacagatgatggttaggtaacttgccatagccacatgactaataagtggtagagaagggattttgaacccatggggtcggattccagagcacgagctcttaactgctgctctcctagatcaatacataaatggaaaactcaaaagaagaatgctcaaaaaacagttttcacccacatccatgtgcacatacttgcatacacttattaatatgagtgaccagtaaacatgctttcaaacctgttggaaatgatggcaaaaatcaatacaaattaaaaaaaaaacctacaagccttcatttttgtctattagataggcaaatcttttctttcctatgaaaatactgagaattgataaaggtggtgtgaaatgttggtgatcctatcctttgaatagcatttgcctggtgaaatgcactcttttagatagagtggttgctgataaaccatttttggttaggatttgtcatggtctatctaaaatcttaaaattgtttatggtctttgacctagtaaatatacttttaagacattaataaaaataaatattcagagagtcttacatacttaagataccagttgatatacataatgttaatttaataatttggaataaaaactaacamccattcaatagaagaaagttggttaaatgagttttcagaacttcataaaatggagaactctgcagccatttaaatattttagaagaaaaatggaatgaaataaatcctcacaattaatgaaaagtatctaataaaacagtatgtaaaccatgatccccagttttattaagattatatatgtaagcctggaaggaagcttgccaaaatgttaactgtgtttgtttttcagtggctagatttgaggtggtttttattccttttctattttacaaatttttgtatgcaatgactttgtcttccttaattggagactcattttcttttaaaaatacttaagactttgaagagtcctttaggaacatacctgagtcttcaaattatttttttggaaggttgagaattatgcatagagaggaacagggaaactaaaaagggaatttcatcatcctcataagggaaaaatatatagtcccattgaaaacgtttattaaaggtataggtacagtcttagttccattttaataaacaattcaaacttctagtagtcattcctctggcctcagttgcttagcaccagaatccttagttggaggtatgataacttaattgtacctctgaacatagcctttccaggaatcagttctgcctcaatgaggattacagattaaaagcaatctcactgtattgtacttgaaattgagaattatgtttccattttattgtatctagtaaaacctgaaactcttgaaaaactttttwaaaaaaatcagcaaactcgtaaaatagcatcagttactgtattttctcaaatataaacaaggcgctatactgaatcgatcacaaatttttctaagtgggtagattcatatatttgctgaaacacatttagctgatgctgcctaatggtgacattagatgcatcttaaaaaatcttctctattatatgtttatttccagcaacatcctgatttggcaagaattatttttcagagcctgttccctttggggacagcatcctgtgggagcacttctgtttccctttgacttcctgtgtatttaaagagctcttaacaagtgtagggtatgtggtgacttttttatcttgcaaataaatatgaaaatcttgttctgtggctcagtataaaatgaataaaggctttccagcttaataggcaagaacatttaagattaaaggtaaaatgaaaataaaatgaaaattcactattgaaacaaaaatttgcttttttttttttttttttctgagtgtttttctagttcaagtrtgctgggtgttagcagccaaattaaaactgaatagatatgacagtgacccttttataacacatttgtttaaggccagatgatacagatgatgacaaatgcttgtaagccaagtgatagctcttctcctttccctcttctcatgagtccccttcctctagctttgggaatgagggccggcttctttttttttttttttttttgagacggagtctcactctttctcccaagctggactgcagtggcgctatcccggctcactgcaagctccggagggccggcttctttgttcatgtggcagttgcttctctgcacttcttctcagctctgtcttgttcccagccttaccttgggcccctgctgctctttctgcttattgccacctagaattcaggataacttttcttccttcaagttctgttgctgtggagggcaatgccaagggcacacttacctgtactgttgcttggtttcccactatgcagccatacgaaaggaaatatatatatatatgtgtggtagcctttattagatgtttgcagataatagggaggaatgacaattaggaagagaaaccttaaaaatagktgatcagtctggctctacaaattaaaaggaagaaaactttattttttctttcttttttttwaaaaaattatactttaagttctgggatacatgtgcagaatgtgcaggtttgttacataggtatacatgtgccatggtggtttgcttcaccaatcaacccatcatctacactaggtacttctcctaatgcaatccctccccttgccccccacccctcracaggccctgatgtgtgatgttcccctccctgtgcccatctgttctcactgttcagctcacatttataagtgagaacatgccatgtttgtttatctgttcctgtgttagtttgctgataatgatggtttccagcttcaaccatgtccctgcaaaggacatgaactcattcttttttatgggtgcacagtatcccatggtgtatatgtgccacattttctttatccagtctatcattgatgggcatttaggttggtttgaagtctttgctattgtgaatagtgctgcaataaacatacgtgggcatgtgtctttatagtagaatgatttataatcctttgggtatatacccagtaatgggattgctgggtcaaatggtatttctagttctagatccttgaggaattgccacactgtcttccacattagttgaacctaatttacactcccaccaatggtgtaaaagtgttcctatttctccatatcctctccagcatctgttgtttcctgactttttaatgattgccattctaactggcatgagatggtatctcatggttttgatctgaatttctctaatgaccagtgatgatcagcttttcttcatatgtgtgttggccacataaatgtcttcttttgagaagtgtctgttcatatcctttgcacactttttgatggggttgtttgtttgttttttcttgtaaatgtgtttaagttccttgtagattctggatattagccctttgtcagatggatagattgcaaaaattttctcctattctgtaggttgcctgttcactctgttgatagtttcttttgctgtgtagaagatctttaattagatcccatgtgtcaattttgtcttttgttgccattgcttttggtgttatagtcatgaagtctttgcctctgcctgtgtcctgagtggtattgcctaggttttctactagggtttttatggttttaggtcttatgtttaagtctttaatccatcttaatttttgtataaggtataaggaaggggtccagtttcagtgttctgcatatggttagccagttttcccaacaccatttattaaatagggaatcctttccccattgtttttttttgttaggtttgtcaaagatcagatggctgtagatgtgtggtgttatttctgaggcctctattctgttccattggtcaatatatctgttttggtatcagtaccatgctgttttggttactgtagccttgtagtatagtttgaagtcaggtagtgtgatgcttccagctttgttctttttgcctaggattgtcttggctatgcagacttttttttttttttggttgcatatgaaatttaaagtagttttttctaattctgtgaagaaagtcaatggtagcttaataggggtagcattgaatctacaaattactttgggcggtatggccattttcacgatattgattctttctatccatgagcatgggatgttcttccatttgtttgtgtcctcttttatttcgttgagcagaggtttgtagttctccttgaagaggtccttcacatcccttgtaagttggattcctaggtattttattctctttgtagcaattgtgaatggaagttcacttatgatttgtctctctgtttgtctgattggtgtataggaatgtttatgatttttgcacattgattttgtatcctgagactttgttaaagttgcttatcaccttaaggagattttggactgagacgatggaattttctaaatatacgatcatatcatctgcaaacagagacaatttgacttcctctcttcctatttgaatgccctttatttctttatctttcctgattgccctgtccaggacttccaatattgckttgaataggagtggtgagagagggcatccttgtcttgtgctgattttcaaagggaatgcttccaggttttgcccattcagtatgatattggctgtgggtttgtcataaatacctcttattattttgcgatatgttccatcagtacctactttattgagagtttttgaggtgttgaattttatcaaaggccttttctacatctattgagataatcatgtggttggttgttttgtcattggttctgtttatgtgatggattatgtttattgattttcatatgttgaaccagccttgcatcccagggatgaaactgacttgatcgtgatggacaagctttttcatgtgctgctggattcagtttgccactatttttttttttttttttttgagacggagtcttgctctgttgcccaggttggagtgcagtggcatgatcttggctcactgcaagctccgcctccagggttcacgccattctcctgcctaagcctcccaattagctgggactacaggcacctgccaccatgcccaactaattttttgtgtttttagtagagacagggtttcaccgtgttagccaggatggtcttgatctcctcaccttgcaattcaccctcctcagcctcccaaagtgctggcattacagacgtgagacaccacacctggctggtttgccagtattttattgaggatttttgcattgatgttcatcagagatattggcctgaagttttctgttttttgttgtgtctctgccaggtgttggtatcaggactggcctcaaaatgagttaggaggagtctctctttttctattatttggaatagcttcagaatgaatggtacaaactcctctttgtacctctggtagaattcagctgtgaatctctctggtcctgggctttttttagttggtcagctattaattactgcctcagtttcagaacttgttattggtctatgcagggatttgaattattcctggtttagtcttgggagggtgtatgtttccagaaatttacccatttcttcttcattttctagtttatttgcgtagaggtgtttatagtattctctgatggtagtttgtatttctgtggaatcagtggtgatatcccctttatcattttttattatgtctatttgattcttctctcttttcatctttattagtgtggctagcggtctattttgttaatcttttcaaaaaaccagctcctggattcactgatttttttgaagggttttttgtatctctatctccttcatttctgctctgatcttagttatttcttgccttctgctagcttttgaatttctttgctcttgcttctctagttcttttaaccgtgatattagggtggcgattttagatctttcccactttctcctgtgggcatttagtgctataaatttccttctcaacactgctttagctgtgtcccagagattctggcacattgtttctttgttcttattggtttcaaagaacttatttattttggccttaatttcgttatttacccagtagtcgttcaggagcaggttgtttggtttccttgtagtcgtgtggttttgagtgagtttcttaatcctgagtcctgatttgagtgcactgtggtctgagagactgttttttatgatttccattattttacatttgctgaggagtgttttacttccaattatgtggtcaatttagaataagtgcaatgtggtgctgagaagattatatattctgttgattatagggtggagagttctgtagatgtctattaggtccagttggtccagagctgattttaagtcctgaatatccttgttaattttctgtttcgttgatctgtctaatattgacagtggggtgttaaagtctcccactattattgtgtgggagtctaagtctctctgtaggtctctaaggacttgctttatgaatctgggtgctcctgtattgggtacatatatatttagggtagttagctcttgttgcatttatccctttaccattatgtaatgcccttttttgtcttttttgatctttgttggtttaaagtctgttttgtcagagactcagagactaggattgcaaccgctcctttatttttggtttccatttgtttggtaaatattcctccatccctttattttgagcctatgtgtgtctttgcatgtgagatgggtctcctgaatacagcacaccaatgggtcttgactctttatccaatttgccagtctgtgtcttttaattggggcatttagtccatttgcatttaaggttaatattgttatgtgtaaatttgatcctgtcattatgcagtttcttcacagtgttgatggtctttacaatttggtatgtttttgcagtggctggtactggcttttcctttccgtatttagtccttccttcaggagctcttggaaggcaggcctggtggtgataaaatctctcagcatttgcttgtttgtaaaggattttgtttctcctttgcttatgaagcttagtttggctggatatgaaattctggttgaaaattcttttctttaagaatgttgaatattggcccccactctcttctggtttctagagtttctgcagagagatccactgttagtctgatgggcttccctttgtgggtaacctgacctttctctctgactgcccttaacattttttccttcatttctgccttggggatctgataattatttgtcttggggttgctcttctcgtggagtatcttagtggtattgtctgtatttcctgaatttgaatgttggcctgtgttgctagtttggggaagttctcctggataatatcctgaagtgtggttttgaacttggttccattctccctgtcactttcaggtacaccaatcaaatgtaggtttggtcttttcacgtagtttcatatttgttggagtctttgtttgttccttttcattcttttttctctaatcttgtgttcatgctttatttcattaagttgatcttcaatctctgatatcctttcttctgtttgatctatttggctgttgatacttgtgtatgcttcatgaagttctcgtgctgtgtttttcagctttatcaggtcgtttatgttcttctcaaaactggttattcttgttagcaattcctctaactttttaaaagtttcttagcttccttgcatttggttataacatacttctttagttcgcaggagttttttattacccaccttctgaagcctacttctgtcaattcgtcaaactcattctctttccagttttgttcccttgctggcaaggagttgtgatcctttggaggatgagaggcattctggtttttggtattttcagcctttttgtgctggtttttcctcatctttgtggatttatctacctttgatctttgatgttggtgatctttgaatggggtttttgtgtggacgtccttttcgttgatgttgacgctattcctttctgtttgttagttttctttctcacagtcaggcctctctgctgcaggtctggctggaggtctactccagattctgtttgcctgggtatcaccagtggatgctgcagaagagcaaagattgctgcctgttcctttctctggaagcttcgtcccagaggggcacccaccagatgccagccggagctctccagtaagaggtgtctgtcgacccctgctgggaggtgtctcccactcaggaggcacaggggtcagggacccacttgaggaggcagtctgtcccttagcagagctcaaacgctgtgctgagagatctaccactctcttcagagccagcaggcaggaagctttaagtctgctgaagctgcgtccacagctgcaccttcccccaggtgctctgtcccagggagatgggagttttatctataagcccctgactttgggggctgcctttctttcagaggatgccctccacagacaggaggaatctagagaggaagtgtggttacaggggctttgctgagctgtggtgggctccacccagtccgaacttcctggaggctttgtttataytgtgaggggaaaactgcctactcaagcctccctcccccaccaagctggagcatcccaggtcgacttcagactgctgtgctggcaaggagaatttcaagccagtggatcttagcttatggggctccatgggcaggggatctgatgagcaagaccactcggcttcctggcttcagccccctttccaggagagtgaatgtttccgtctcgctggtgttccaggaaccactggggtacggaaaaaaaacttctgcagctaactcagtgtctgcccaaatggccacccagttttgtgcttgaaacccagggccctggtggtgtaggcaccagatggaatctcctgttctttgggttgcgaagatagtgggaaaaacatagtatctgggccggatagcaccgtccctcgtggcacagtccctcaaggcttcccttggctaggggagggagttccctgacctcttgcacttcctgggtgaggaatgccccaccctgcttctgcttgccctcggtgggctgtacccactgtctaagcagccccaatgaaatgagctgggtacctcagttagaaatgcagaaatcacccgccttctgcattggtttcactggttgctgcagactggaactgttcctattcagccatcttgcccagaatccaggaagaaaactttaaaagttaaagtctcttataggttagttaaagttatgtcttatataagatagtttcatcatgaatacttctcagtttccagttttgtttctttgtcatgaagttcattctcttctcccttttccaggaagaatcatcttctttgaacccccacagtggaaagctccccgctctgtaggggtacgttttatcctaggattatctgtcacaactgaacaggcamaagactcccccaaaaatgcatttttccgtgtctgattttatcagtctggaataaccccatggggggagagggtgaaaaaacttggtgcagacagtgtgggatgaagtttggctttctatgttccagccccttctgaatattcctcggtaatgtggaggtttaaatacgcctgctcatacttcagcagatggctagtgaattgaaccaccttcctcatatatatatatataaatatatatatayacacacacacacacgcacacatacatttttaatctcaacagtgtaattctaagacaaaagtctatagatgattagtgaacatttagagttgtgatagaaatccaatttgagctaccactagaactgataataactaatgtttattaactatatatatatatatatatatatatttgtgttgtgctaagggcttcacatatctagtcaaattctaatgacaattttattagtaggtactcttatcatccttattttatatatacaaaaactgaagcaccaaaggtttataggaaacttactcaggatgtgtgtttaagagtcaggatttaaatccaagtagcctgattccagagctgtcagttataatgcycacccaggagcattatgccttaggttgagcataatgtggagaatttgactcataggtttcacgataaattggaacagccaaactattgggaagggyggagtaaaggtggacttcaggaacaagtggaaccaggaattcaaatagcattctctctgtctgtcttttttctctacttttttctcagtaggtctgcttctgctctcatcatagataaagttcctcatgataggaatatgaacacttgatgttaatatttccatattaatgaaattaaccatcattaatttccatattatgttaatatttctctcattggagagactgtttcttagctatggttataaaaatcgggagaaatttctagacagataacgatatctgcctaagtctgtgccccctcccaaaatatcctacatatgatagagaacaagaagaaaaattaaaatgcgtaaaaatgacaccccctgcataaccagaaaaccaaggacacccaaacttcaaattaactaagttttaaaaaaaagaagaatgaaatctcattgagctatctctcataccttgcctcaaacctttgctgtgaacaagaacagtttaaaaagctgcatgggagagaaaagagatgccaaagattaaagtgaaactactgccacagaagttcaccagatgggtggaagtaccgaaacaatttccagtttggctcacaaaggcccaactatacactgtttataagagacacacctgaaacaaaatgattcagaggtactaaaaatcagtgggaaggactgcagttgcctcaccttgagtcagctgttcactcctgggccactcaactgtggccaacagtgcagagtgctttttatttttagctattcatctcgcaactcccttcccttgccattcagctatgtccaaggtagtggactcattttagaatttgggaactaaatgtttaaagcaatgtcttaaagaagaggggttccacactcagaagagggaggtactaggtagacaatataagtatgaaggtaaacatttgctagaaattgtttttcagtattctctttaatattcttattaaattgatttttgtttttgagtaatttggggcatgagcaatggtagtatagaaaaatttattactaggtagtgaaactagaataatgctgtctaatagaaatatgagagccataaatgcaagccatgtaattttaaattttctagttgctacatttaaaaagtgaaaaattaattttaataatacattttatttaacccaacgcaccccaattatcatttaaacatgtaatcaatacacaaagtataatgagatattttctgttttttttccttattcttccaaacccagtttgtatttacacttacagcacatagcaatttagactagcctcatttcaagtgtctaaagtgatggacagctcagacctagagagaggaacagtcatttagtcattttagcataataaatgaaaaataatacttgaatcctaaaatgtgttttatttctacttcccatcgcagttaaagtgtgccctatctaatgcttttactttgtgtttttgtatgttaatgatacctattttaaattggggcatgtttatagcttgatctatggcacccacaagcagtgatggagtggagaaagattgttttctcacctcctttagatctctgtttaaatatccttgttatagatgccttttctgaacatttgaaacaaaatagcaaccgctactgtttctcctcagccttctgacaatttctgtgccctttatattgctttagtttttttccccatatttcttattacagctgatataccatttatacttttaaaattgtttctttttctacccccccctttcccctaaatacaccagaatatgaactttgttgaggacaagaactttgtgctgtattcactgctatgttaccatatcctagaacagtactgcacatagaagatgcttagtattttctgagtgtatgaatgaatgaatttaagaccatatggcattcactattggtgtatataatggaactcccatcatcattcccctgagtggtctccctttggtactggccaactctgccctaccacactgctgtcagtcagcttaaacctcagttcttctagctaagaccatggcagtagtctcattgtggtctcactgcctccagccttcccgtataagctatttgattgccagatgaattttttttttttttaaaagcatctctgaacatgttgatcccttgctcagagttttcacttccttccagtggtttatagttcttcacacttgcttttaggagtctctgaaatatgctgtacttatatcttggtctgttgccaactagacagtttgccttttatttttaaaatgctttcagtgctttctcctcttcttttcctttgtatcaactactttttgttcctagtcactttttttcctttcctgccttgaccagaacccctgacttaacttttgttgcttcctttacgtttctttagggcacgttaagaacgttaactttgagcacttcctgatggattgatcatagaaaggctgtgaaatatgaatagacaatgaaatgtcatcaaagcaagacccttggcatgtgtgccaatggttaaatgctctggaatggagcatttgtggctgagagggaaatgtttatatctgttaaagtgcagggactgtctagaataaggcactttattaatgaacatcctttgataacctattcctttactaccttgtctttaagtggtgccaatcaagaaaggtctttgcacaactttaaaatatacatgttgttttgtagcaagtaaaaagtgacctaaatgctttctagcatattgaagcaccaactttttatgtattgaatttaaagcagtgatttacactgctaacastgtaacatttacaacatttacaacattacatttacaacattacaacatttacaggctaacagcaaaacatttacaagtttctatagagaactttaggaagtattctttctattttctggaagaaattgtggattatattttccttgaacgtttggtagaattcactagtgaaaccatctgggcttgatgttttcttttggaaggttattaattaytaattcgacttctttagctgatacaggtctgttggtattatctatttctcctgtgtgagtttgtgtctttcaaggaattggcctgtttcacctaagttatcaaatttgtgggcatagtgttgttcattgtattcccttgttatcgtttcagtgtccatggaattagtagtaatgatctctcctttatttctgatattagcaatttgtgtcatctttcttttttcttggtttgcttagctggaagtttatcagttttattgatcttttcaaagaaccatcttttggttttattggttcctcctattgtttacctgtttccaattttgttgattcctgctctaatttttagtatttcttttattctgtctgctctaagcttaagttgttctttctctagtttcctagggtggaagctttagattattaattttagatattttttctggtttaatatatgcatttaatgctataaatttttctctaaggaccaatttttgctgcatctcatgcatttagacaacttgtagcttgattttcatgtagttaaaatatttcaaagttcatttgtgaatttttcgactcataagttacttgagtgtgttctttaattaacagatatctagacattttctagctatctttctgttgttgatttctagtttagttccatattgtctgagaacatactttatatgatttctattctgttaaggtatgttttattcagtaattatttttataataaaataggttatcagttttgtatttggtcataagcttgaagaagacaaagtcagtttacatgatgaattaaatcagcctctgccctataaagctgagcaaattggcaagaaatgctaacttatgcatttgactactacagtattcttttaatttttccttttctttcaaacttttattttagatttgggggtacatgtgcaggtttgttacagaggtatattgtgtgataccaagatttagagtacaaaggaatctgtcacccaggtagtgagcatagtactcaataggtagtttttcagcccttgcctctctcctctccttgctctagtagtcctcagtgcctattgttcccatctttatgtccacatatacctcatgtttagctcctacttgtaagtgagaacatgcattatttgattttctgtttctgtgttagttcacctaggctaatacgctccagcaccatctatgctgctgcaaaggacatgattttattctttttattttagggctgcacagtatcccatggtgtacaatttcttatctggtctaccgttgttgggcacttgggttgatttcatgtctttgctattgtgaatagtgctgcaatgaatgtacggatgcatgtgtctctaggtagaatgatttattttcctttggttgtatacccagtaattggattgctggattgaatggtagttcaacttgactctttagttctttgagaaatctccaaactgctctccacagtggctgggctagtttgcatttccatcaacagtgtaaaagtgttctcttttctccacagccttgccaacatttgttattttttgtctttttaataaaagccaccctgaccagatgtgagtttgtatctcattctggttttgatgtgcatttctctgattagtgatgttgaacatttatgtttgttggagacttgtgtgttctcttttgagaagggtctgttcatgtcctttgctcacttttcaatggagttcctgttttgtgcttgatttatttaagttcctgatagcttctggctattagagctttgtcggatgcatagtttgcgaatatattcttcttgattcatttaagttcctgatagattctggttattagamctttgtcggatgcatagtttgcgaatatattcttccattctgtagtttgtttactctgttgatagtttctcctactgtgcagaagctctttaggttaattaggtcctatttgtcaatttctgtttttgtcacaattgcttttgagaacttgaccatgaattatttgccaggtcccatgttgagaagagtatttcctaggttttcttctaggatttttacagtttgaggtcttasatttaagtcttcaatccatctcgagttgatttttgtatatggtgataggtaggagtccagttccattctcctgtgtatggctagccagtaatgccagtaccatttattgaaaagggattctttcccccttttctgattttcactgactttgtcaaagatcagatagttgtaggtgtgcagctttatttattggttctgtattctgtttcattggtctatgtgtcactttttgtatcagtaccatgctgttttggttactrtagccttgtagtgtagtttcaagttgggtaatgtgatgcctttggctttgttccttttgcttaagattgctttggctatttgggctcttttttggttccatatgaatttcagggtagtttttatctaattctgtgaaaaatgacattgctagtttgataggagtagtgttgaatctgtaaattgctttggacagtatggccattttaatgatactgatttttccaatcaggaaatgttccttcaatgcctagtctattgagagtttttatcataaaaggatgttagattttattcaaagtttttttctgtgtctattgagatgatcgtatggtttttgattttagttctatttatgtggtgaatcacatttattgatttgcatatgttgaaccaacattgcatcccaggaataaggcctccttcatcatggtaaactaactttttgatgtgcttctagagttggtttgctagtattttgttaaggatttctgcatctatattcatcagggatatcagcttgaagttttgtttygttttgtttttttttgcccattgtttctctgccaggttttggtattaggatgatgytggctttgtagagtcagttagggaggagtccttcctctttgattttttgggaayagcttcagcaggactggtaccagtttttctttgtacatcaggaagaatttggctgtgaatccacctgtttttttttgttggtaggtttcttattactgattcaatttcagaatgtgttactgatctgttcaggttttcaatttctttctggttcaatcttggaggttgtgttattctaggagtttatatatttcctctagcttttctaatttgtatgcatagaggtattcataatagtctgaggttcttttatgttttggtaggatcagtggtaatgtcatctgccatttttgatcatgcttatctgtatcttttctgtttttgttcatctagacagtggtctaacaatcttatttattctttcaaagaaccaacttttgtttttgttgactttttagatgtgtatttgcatctcagtttcatttagttcttcgctgattttatttcttttcttctgctagttttgagcttgttttgttcttgtttttccagttcctgtaggtgcagtgttagattgttaatttgagaacttttaaactttttgatgtaggcatttagtgctataaactttcctcttaaaactactytcattatatcccaagtattttggtatgttgtaattctgtttcattaatttcaaagattttttgatttccaccttcattttgttgtttaccttaaaatcattcaggagtaagttgtttgaatttattgagacttgctttatggctaaacatatggtcaatcttagattatgttttgtgtgtagatgagaagattgtatattctgtgattgttgggttgagtattctgtcaatgtctattaggtccaatttgtcaagtgttaagtttaagtccataatttctttgttaggtttctgcctcgatgatctgtctaatgctgtcagtkgagtgttgacatctttcactattattttgtgcctgtcttttcgtgggtctctaaaaacttgttttatgaatctggatgctccagtgttaggtgtatatatatttaggcaccatgcctgtgtttccctagccctaaggaatgtcctaatgggctgtgcttccccttcccttaggggcagcctgagctgaaggttagattgccagaaacctgcagaattccggaggtctgctggtcctctgtgcttggcacagtcagaatgggttgtggagtatgtccataggtggtctgttgatgtaagaggtcaagggtgggggatctttgggcagagcagtgatgctgtggctgtgcagatggtatggtgcctatgggccggggttttttgccctgcagacagctgtggggacctccagcttgctctccattgactgatctccttctggtggctactgtagaatctgtccctacctgctagttttttcccaaactttctttgcccagatcattgggctgttaagtgttctaggccatgaggctacattgggcagaggctgcagctagcagatagaccacactgttcccagaccagccccgcagagggaggcatgcccagctctcacactggcccacaaaccgcacatctcactcttctcagtgttcagagtgggtgctctttccctgcttgaggaccagccatagatctcagcttgtcactcctgagccatctgctctaacctggggggttgccacaagcctgaggctttgtcctttagctgcttggcaccagctgtgctagggtagccatagtgctcctaggcctccaggaaagcactcatgtggggccatggcaaggcactgaggctgggtaatggaacctgtgcggtgtgcatgctcttgtgggagcagccaggcaggggccttgatagcggctggtggacaggggagcatgcagtacagatgtgccccagtcctgcagaaaatatagccctactctctcctggcctagcagtcagcaggggttacagctacttggaggaagatggagagccttgaatgatgggtgcttattagagcattttgctgtagctgccctatgtgtaaaacccctgggttccatgcaggctggagctctgtctctttctactctctggacagatgcccctgtcagttcagaagcctgtgggggtcatgggatctcctgtagctaggatcccagaggtccatggtgagagtaggttgtcccacagtcacttcactcacttcttccttaggagctgttcaaggccaggaactagtcctggcattcagcaaccccatgcagagttcccagcttccttcctcatcagccctggtgtttgcattgcctctctattgactctcattgctttctctccaaagatctgttcaaagtatgttggtttactcaatattttggtctctcttggtgggagaggggcttcctggctgcatctagttggccatcttgtccccattcctcccattaaggtatgttttgtggcctggaatgtggtctgtcatgatgactattccatgtgagcttgatcagaatgcgtattctgctattgtgtagagttatcaaataacttgatctaattgacagtactccagattgtcaattgaatattccaatttcctgtagttattttcctgtgtccttactgattttatgcaatggaacatttttaaaattcctgccttagagcactgcatggggcccagtggtttaagagttatgagagctaatcctgaagggggctaatttatgacttgacaacagcagagacattgggtactaaagacattcagaacaggtatatgtggttttggaataatttacgggtgtatcatgcatttatttccctttaagagatgtttcttctgtgtgtgtccataagggtgcaatttttaaatgtaaaatgggtttatatatggccacacaaaattgcataatgagaaaacaagaattatttacagcaaattgttgactgtagttaaaacacctggttctgctttacagttctctatagtttctaaatatcttaaagtgagtgaaagtgttttacttttgaaaaagaactaaaagtatgttatggtttattgagatctgatactgtctcatgtgagcaatgaacctaaggagtggacactgtgaacaaaattgcatgcgagtaagcattgccatggctagtgcttgattacttgtagtagtcaaggaagaacttgaatggaattattaattacgattcatgtaataattttagcaccatttttgaagccacccttgtcatccaagtgactccctagacctttgctagcttcacaataacaagaacatttcactattgcttggtggggttacagggagtgaaataggcactgaccacacgtcataaacacactgtataattgattcctgaatattcagaactcatcccttgaaaaagagtatgaacttttggaaaagataaacctagaatgttgtaggtaagtatagacatacataagtaaaaattagaaaaaaaaatttctaaaattttgttagtctcagttataagtgaaaaagtatagaagagagatttgaacaaatacgtgataatattttctttaaaaaggattggtctaacatcattttaaaattatgttatgaagatgacttctttcttaaaaccttatgaaccaacctctgttagcttcaaacttttcttctacagtttcctcacctttctcagccttcacagaatggaagagagttagggccttgagttatgttttggcttaagggaatgttgtggctgatctgatctatccagaccacgaaaactttcactgtgtcagtaataaagctgtttcactttcttatcatttgtgtatttactggagtagcagctttaatttccttcaataacttttcctttacattcactacttgtctaactggcacaagaggcctagtttttgacttgcctcagcttttgacatgccttcctcgctaagcttaatgtaaatgttaatgcttgatcttcataattattttatctttatgattttttgctatgattttctagttgcgaaaaaaatcatgtatttctcattagattttcactgttatatcaaactttttaaaacttttgatagtgaaaattccaagcacacaaaatagaatagtatggttctttgaatcatagacctttttctagcatgaatgcattcaattaacaatgtgtgtatgttatttgctcttcctaacttatgattcagcagtttacattttgtacaatgtaatcaatggcttacattttctacagcgttactgtttttaaaatttccatagcttaaatatgaatattgaagcatcaacactttggaaaacataaattaattgcaaggtagacacaaggggagccatttctaccgaggtgttaaagacacctattatactacatcctggatattagacagttggaagagttcataaattaaaaaataagctttagtaatttggagtttgtgttttaaattattttataaaagactcagatagaaatgaaaatgatgattttgaaaatgctgccatgaagaaatagaaggcagtcagtgggactgccttttggattgctgtgagactcgcaggtcattgttcagactgttaaagacccggtccacgaattccaaacattttcgaaggttcttcctgttcttatcattgtaactgctctgccgatgcatttgctgactctccaggcacctgcttgttcacagtgagtctatatgcttcctccggcattatatttagaagctgaaggagagagacatctttaattaccatcttctaatttccaagaggagagaactaaggtccattagtccattagatcattagcaacgtttccctggccatgtttgtgttgctcttataaccagatcagtccccatggctgccaagtccttgccatcccttcactgccacttccatggttacttgccagatgagactgactttacttcacacctggatgattgcatttgcttccaagctcatgctcatcttgttgttttaagtcaatcctgtgatccaattcagtaagttcttatgggttgaatagatgttgtaggcaaggctgtggtttaggttctgtatcagtgactggtcaagattcctcaaggagcttttccaaatgtggtgcaattttacatacctaatctcagcagaacctttctactgaattgtggaaaaaaattctggtttttactatggttacatgagaatatgtctaaaacgaatgtaaagctattaagtgtatattgagtctattatatactagcatgatgctgggagccagaatatcccaaaaatagaggtttaaaacataagctctgctctgaacaagtgtacattctcattgtggataaaatatactcataaatgtgcaaggaaggatatatccaaatactcaaatgagcaacatgaacaaaagggcagaaaatcaatggagagaaaactagttaagagattaaagatgaagtaaagcttgagatgaactattaaggttaaatatgaattgtgaggagagaaaagatcattccagagaataatattgggaataaacattgcaatatatatggaagaaaaatttctacttatttgaatttgcctgtaaaactatgcttatctttgctcattttgcatttccctgtcaattttgatagccttttcttttctgaaatgacacgaaaacagttttaattcactcagttccattaaccttgagttggtaatatcaaattggtattattgtatagagatatatgtcatatattattttaaagtattttccacatattttttcatgtattgtttataaaaacaatttaaaagactatactgaaaagtcctaatattcttttttttttaaactcacaaaacccgaaaatttttgctatcatttacctactgttttagcaagatcttattactggttgagcatctgaaatagaaaatctggaatctaaaacacttctggtcccaagcatttcagataagggatactcaacctgtagaagtatttgtggttattccccacatctgagctttacttatagtgagtgaagattttaagtggaagtcactatcacaagttttggaataatcagctagttttaaactaatacagatataacacgatatacaaattaaacttaatttttataagccagctgcggtggctcacacttgtaatcccagtactttgggatcctcccaaggtaggaggattgcttgaagccaggakttcaaggccagcctggtaacatagttgtcaccctgtgattgcctggggccagcattgcagatggtaaagaatttaccaagacaatcgtaggtaaagaaaggcagatttattagagaatgagcaaagatatgttggaagggtgtgacaggcagcacagcagagaaggggatgtctgcaaagaggcaggggctggagggatgttttatagggtcatgctggagggggctatgtgcagaatgaggtcatgctgctggggctacctgtgaagtgagaggtagttgtgccagcgggttgtttgtgataagttgtctctcagagcaattgttctcccccacctggaacccctacctcatttttgcttacttacattatcaggactccacaatagtgagacccatctctacaaaaaattttaaaacaaattggctgatcttggtggtccatgcctgtagtcccagcttctcaggaggctgaggcacgaggatctcttgaggccaggaactggaggctgtagtgggctatgattgcatcactgccctccaccctgggtgatagagcaagactttgtctcaaaawaaaaaaaagtgtgtaattatgtcttattcactaaatagtgcatgatcttatgtgcatgagaaactcatagtttctagaacctgttttctggttctcagacttttctgacaatggcctttaaagcctgctgaattttaaaaggtgaaaggaacttttcttcaaaggggaatctaaatctttggttaaggagttttaagtagttttgctcattaacatggagtgcttctatatactgtttcacttaaatttagttctttaaatgaaataaaacttgtatatactgagtaaaatagcagatatcttatctctcggttgcttgtgggaaaaatcattccaaagggatgtatgaaaggctccttgtttgttctgattaaatgatatggagcaaatctgcgatctcttttgacattgaacatgttccataattaaaagcaatgtaagctagactgacattgtaaatattgtttttaagatttaaaaattgaagtttcacattttttagttctcatatatgcatttgagtttctaggtggatgtcttaggctaaagtaaataaagtcaactttgttaagctacttgtgactgcagctgccaaatgcccccattatgagaaaaaaaatactgtggttattttacaggaaatactgtacaggactgtggtctgtgcaaaggaagtgcccacacagaaactaaaatactgttagtacttaatggtgtactttatgcttgaagtaaaaatgagttggtataaataaactttaatctcctaggttttatgttcagaattaattctaatacactttaatgtagagcatggtaatgactttgtatttttacatggcttgctgacagaatgcagctaggagaggagcccacataaaagctatataaatcaggggaacagatggttgagggacaattgtttgactttaacaatatcatacagtgagtcaacccagatttaaaatacaatagtgctgtagtaagcagcactatcatcccctttcatttgctctggagactagcagtagatttgtaattgtcctattgtaattcttttcacaaatcatttagtttattttactaacatctctctgtgtaattggctcatcatggcaaatggaccaatttacatggctggaaaggaaagcagagtgtgcatgctgctttccagcatccgtaatttgttatgtgagaagcttcttgttagaattcttgacatttactcacctgcataaaatagggctgaaaggggctttgcaaatgatgtagttcagacttctcattttgcaggtgttatcacagaggtaagttgatgttttcaagattgatcatttgtagacaggataatggcctccctaagatgtccatatcttaaccttgaaactgatgaatatgttaccttacatggcaaaaaggactttgcagatgtgataaagacaaggaccttgagatgagtagattatcttggattatctgggtgggcccaatgtaatcatatgggtcctgaaaagcagagaaccttttccaactggcttggagagagatgctccactgcaggctttgaagatggaggaagagggctatgtgtccataatatctggattgtgggcagtctctggaaggtggaacaggcatagaaaagaattatccgatagaatctccagaaagggatactaccctgccaaccccgtgatttttgtaagtcaaaaattcaacatgcgtctcactggcttaagtgagatgcatgttgattttctgacttacagaaatataagataataagagttgatttaggccatacatttgtggtaatttgttacagcagtatagaaaactaatatactcactatgttagaggataagccaggcctagacctcaggccttctgccttacagcctaggtcttttttcaggtggtaagtgccctttatatcactgaatcttgtacgcttgaaaggcagaaacaacttgactcttcttcctcgatatttaacgcaagaacaggtaaagagagccacccagagagagctttttaactgatgtctgagcaccagatgttccagagaggagctaaatgccagaatgaatctcgctgtgtactatttagcccttcaaattcactcaccaaaactgtcttgattcaggagtatccagaatgctgcccagaatgcttagcaattttgtgactgcatgtcttggggtgtgttgagtctggtcttgactcccatgtcccagatcatctgtgggtggatgtatagttgataggcccttccaagtaattctcaagcctctagttggtctagaataggaattgaccattaactagtatgaaataaattcaagatactaataaaatattttagctcccatttgaattttgattctgacttctcataaggtcctttattaaaaattttaatcactcacagaaataagactgtttcaaataaaatcaatggttaaaaaacctcaaattggataaaagcaaggacataattcctcagaaaacctaatccaggaacttcagatatgtttgatgtcatctgccaatgctatttgttggtaatagctttctggaacattattggaaaggattctgtggccaggtccttgatcgagttaaatgagttctttgatcatgtctgacttgggcagctggggcaatgctaatctacttcctagagttttctctccttgtatcaatcaattgttaatcactgtttcttgggtgtgatatttcagccagttataaatccatctaaatgaactatatcccactcacatttcttcataggatctaggtgggagagatacaccctgatgagtgtgatgagagtttgaaaatgtgaagtacaaggaacagtgacctcatttgtaagttgttctttaaactcacacctggagaataaggaaggaagagggatttgagagaagggaagaactaagtgtcaaatagtgctgtcctttccattccttaatagtagtaagtagttctttcatgttacctctgtctggcttagtcacagaaaattttatttagctcagaggacccttgactgaatgtcgtcataggtagttcagggtagaaaacaggtagataaaactaaaaatacatgcatattaaaattttgtggagaagacaaaaaatacatgaaagaaagtatgagaaactattacagcatactaacttttaggtcattcatatttttttactaaatatttttataagatttatacagcaaatggtagatactattaaaatattatctttttaatataaaaaactgaaacaagtgataatatttagtgcttagatattaagctgtttatctgctttaaaaaatatagactcgggctgacattacaccctttattttccgtttgtttctttctttacattaatactggtttcagattctataagcaaaatcaatttgattactgcagacaggagttcgaagacttcaccttcgtagcctctgtaacagggccttttgtgagagcactttggctgtaatgatcagttgacctgtctgttgagtatcatgaagcttaagtgcctggaatagcccttgactttcgctaacattggaagttcatcagtttgccaactgtctgccagtgaactgcagtacactagagcagtaatgaaagtatgacctcataccttttgtggcaattttcattttttccaaaaacgacacttactttattgcattgagctctactgtgaactataatgcaggagggctcatattcttattatcgctgtttacaaatataaagctcaacttggaagggttgatgactccctaaggctagtaagcaatgaggtaaagagaaacaaatattcaaccttagaaatgtgagttataacttacagttaaataagaattttcaatcttacaggtttcaaatctgcatagcaagtagcgtaatggagcaaatgattcttttcctccagcttgcctattataacctaatcgtgtagatagggatttacaatatagtaaatgtgtagacaaatttacaacattgcaaggcagtatttggtaagtagtagaagttagtagatttagctccttaagttaaatctactaaccttaagacaataacaagataaacttgtacaagtggagaccttgttattgttgattccgcatttcattaagagtacatatgcctctctgtgcattctcatctattactgttgctgaaggggataaaggattataagaaatgattcctttcctccaggttgcctataacctaactgtatagatagggatttacaatatagtaaatgtgtagataaatttacaacattgtaaggcagtatttggtaagtgtcttgacagtgtcagacataataacctgatttgtccagataaatccaaaagtgagggtcagctttggcctgaataagcaggaagaaattcaagtaggaagtgacttttaagctgagctttgaaaggtgacagatttggataggcagatattttgtgagaggctattttattttgatggaaagcagaggattttatttgggcagaggcattggggtaggaaaggtcaaagcatttgcaggtaggggagtagaccagtttgacagaatatttatgtaggagagtggttataatcattacttcatatgggaatgagaaagtagtagatttttctctatcatgagcctgcctacatttccttcctcttaaatttgttaaggaggaataggcttaggcagtttttttttttcccgcgagggtactatctttgacattaatccaaatatttggtaaagggtaatcatatagattctcatttttgtttttatcttttttctctttgtttctgcattccatgattttattaaacaaattaaaacctgtagaaaaggtacaagcatatgcaataaagacccataagtgtgatgatacttgctacacagtcattttagaccaacctatctgtatgtggcagcccctgtttgcatataatctagatcaagggtcagcagacattctctgtaaaagataagaaaggaactattttaggcttgttcggccatatagtatctgctgcagctactcacatttattattgtggtagaaaggcagccatagacagcacataagtgagtgagcatggctttgttccaataaaactttatttacaaaatgttaagacagacttggaccacctgtggtagtttactgacttttagtttagagacatatgggatcacctcatttcgaataatgggaccctagatttcttaccttcttcagcatctgtgggttcttttactcttaaaatagtgttcctgttcttctatttcttttggttaatattgctttttatatttttatattatttctaattcttaataagattctgcatggggcctagtaaatcattgtgactaaccacttagttattactagtgattataaggaatacattatatatgtttatagttgagccatactaccttttacaattaatatattgaaatattttaactgaatttaacattcagttaaatgttttatttaactgaaaatgctgcatacataaaatgtcctcttgctggaagtacagatatagatagtgtatatgttccagtatttttaattaaggaacacctgtaggttgttttatttgtttggggttctgcttacttcctcagaaggctggccgtatttatctgtggatccttttcagtactgagcagaataccttgtacattggttctgaaaatgtacatgtcattatccatttgaacctccgtatggggccatcctcatcaatatacacatgtgttaatagtttccttcactgtaaaacaaacaaacaaacaaagaagttccttgcttccatattcccccgttagttatcaccttattctcatttccctttctcagaaaaatttcttgaaatagcgacgctatgtgcatcttcactttatcccatctcttttgtttttcagtctattccaatctggcatttgttcccatcaccacattacaattacttttatcaacatcactcatgaaatttatattctgtwtactgggacacttctctaccctcatcttaatcagctgtttgccagttttctactcagttcacgtctccctgcttcttgaaaccttcttcctctgctgctttgcaatgacactggttgagtctgtttggactgccgtaacaaaataccacagttagagtgacttaaacaacaagaatttattttctcacagctctggaggctagaagtccatgatcaaggtgtttgcaaattggtttcttggagagctgtcttcctggcttgcagatagccacctcctcactatgtcttctcatgacctttcctcaatggatgggcattaacagggagcaagcaagctctctggcttctcttcttataaggacactaatcctgtcagatcagggcctcacccttatgacctcatttaaccttcattactttcttagaaagcccatctccaaatacaatggtactggggtttagggcttcaacataggagttttgtggagatacaaacatttggtccattaacagacagtctcgtgactttcctaccacctcactggccattcttctgtctctttgctcagcttttcttccactgcttgatctctaaaatttggagttccacaggctctattctaatctttattatttttttttaatgctacccagcccacgtggggagtctcagccattcccattgcttcacttatcatttctctacaggttctcccagattttaatctgcacagtaggtctcttccctaagtttcagactcacagtcaatgcacatctcatctgaactcaaatttagtaagtctaaaatggaacacttaatttcaaaattcatatatgtgcttcttccccatccttcattttagaaaatggaagaatcattatctgcagtttctaaaatcataaacctggacactattcttgattccctcatgtctgtcatcactgttgtaagcaagtttttctgattctgtcttcaagagtcatcttgaatttttccatcttcctccttctcctttggactttgaagcgctttctcatcgattggatagtgggtaaaatattacttttcttgtctcttcagcctaagtagcaactctgaatatccattcccacagtcttccctattatatcaacttgttttattgtcttcctagtattctctcatccaaaattttatggcctgtttatttgcttacttgtcttttgtctcttcctttgagaatgtaatattaacagaacaaggaagggtcttgttaacttcactcttcacatgtccatattacctagaaaagtgcctggtatgtagtaggtgttcaagacataattattatagaaggaatgaacctcttttgctactattttagttcatgccaacatcatcttttgcctggactattacagtaaccaagtacccccattttttcgaagagatcatttaattatttttttattatttatttatttatttatttatttattttttttgagatggagtctcgctgtctcccaggctggagtgcagtggcacgatctcggcttactgcaagctctacctcccaggttcatgccattctcctgcctcagcctcccaagtagctgggactacaggcacccgccaccttgcccggctgttttttttgtatttttaatagagacgggatttcaccatgttagccaggatggtctcgatctcctgacctcgtgatccgcctgccttggcctcccaaagtgctgagattacaggcatgagccaccgcgcccagcccatttaattatttttttttcccctcttttttctcattcctccagttccttacttcccacttatccctttggaaatgcaaatataaccctttgccttcccttcaccatacattccctacagggcaagttcttctaaccatgggctccaagattgatctctcttccagagttaacaatttacaaaccaaagcatgcccactgtggaactctcacccaccaggagttttgcctcaagagataacagtcaaaaagtatgcctgctgctctctcccacctggtgagtttttgccctagtcctgcccacaaaggcaccagcagtcaccagctcaaccagtcagtagataaggcactgaagctggcataaggaccccaatccccggcttcctcccctgcatgcaatttctctttaaaagtgcccactttctgctccaaaagcaaagcagtacacttaaaggcaggccacctgtacttcttcccctaagatagctttggaataaatcactttctttatacgagaccttgctcttgttaattggactctgcaagcggagagtgaggaaacctgcatttcggttacattactaactaatcaggtctccctttcctgctcttgccttcctgcaatctatttccatagagcagccaaagtatcctctaacagttcatctcacactgtgcactccccagctggaagcttgtctttggcttttccatgcatgtcctggcccctccaacctcctctgtcttccattttactgtggacgtgtcagctgtctaccagctcctagaacacgccacacactttctcccacctctgagtcatttactttgctggtgctcttcctggattgttcacgatcttcacatgactggccccttctctttgaaggttttatgtcacagtgtaaatgacacgtttttagagaggcttcttctatctgagttgggttttccctccttcattggcccagcaccaagaagaatttcttcacagaactattgtctataattgttttatatctttgtttactgtctttcccatttttggcttcatgaggaaggacattcttactcttttttgtattttaatgtctatcatagttctgaacaatcaacacttatttgccaaatcagtgaatacacatgctataacatttatgtttttccttaggtgtctgaaaatagtttgtcttcaggattttgtcttctaaggatatgataacaacaatgattatttaagaaacttgaataacaagattagtaatgtttctataatatcttcttctatagtaaatctaaagtgaggagcttgcttttttatattgtatttttccagagacagcttcatgagtcagaggtacctctcaatatatgactcacataagacagtggatttatactgtcagctgcctttttataccttcagtcatctaggtcattaggcagtttgcattcttttctcttggttatataggtattaaagaaacttgccccttattatacattaaaaaagtggtaagctcctattttttcttctaagtatatggattggaaagacttttaaaaatgggtgatcagagaaatgaaggtcagttttttcctaatttttaatttttatgagtacatagttggtacatatgtttatggggtacatgagatattttgatacagacctataaggcttaataattacatcagggtaaatggggcatctgtcgactcaaatatttatcatttctttgtgttataaatattccaattatacttttagttattttttaaatgtacgatgaatttttagtaactgtaatcactctgttgtgttatcaaatactagatcttattcattctatctaactctatttttgtaactattatccatccctacaccctacccccccactccccttcctagcctcagtaaccattcttctactctccatctccatgagttaaatagttttaatttttagctcccacagatgagtgagaacatgtgaagtttgtctttctgtgcctggctcatttcacttagcataatgtcctccagttctatccatgttgctgcaaatgacaggaattcatcatttttttatggacgaatagtactctattgtgtatatgtagcacatttttctttattcattcatctgctgatggacatttaggttgcttccaaatcatagatactgtgaacagtactgtgataaacaggggagtgcagatatctctttgatatactgatttcctttctttggggtatatacctagcagtgggattgctggatcatatggtagttatatttttagttttttgaggaatcctcttactattctccatattggctatactaatttacattcccaccaacagtgtatgagggttcacttttctccatatcctcgtcagcatttgttactgcctgtctttggataaaagccattttaacggggtagagatgatatttcactgtagttttgatttttatttctctaatgatcagtgatgttgagcagaggtaagttatttttgtatggcaaccccagacttcagaaaagaaaaaagcagttgttatttataacaactgttatcatagattttaatcccacaatcatcatacttccttgatgataaaacagtttgaaggaagagtatttggcggtgtatatatttttaaaggcattatgaaatcctacataaattcccccaatcgaatttttccatttaaaggtttaaaaagtgatatattttcacttttttgaaaaagtgcaatttgaggcattcctgttctcatcaccaagatttaagagatattaacactttktcatatttgtgtcatatcatttttgaatttttttttttttttgagacagagtcttgttatgttgtgcaggctggtcttgaactcctggcccaaggcaattctcccaccttcagcctcccaagtagctgggattatagcctcaagccactgtgcctgtctctaatatcattttctcttgtttttgaaataagaattaatatattacatatgtaactgaagctttcatttgttattatatgaggttttgacccatgattgtttcttctctccctccccagagctgaatatatatgtatttaatctgcatgatagcaagggaagaaagaatttctgtttctaagaggttgatattgatataattggaaggggaaaagatagaatgttgttaaagacaaaatacttggtttcctggaggcaatctattttgctgtttcatctggagccctgtatgaaaggttcagaaaagttcaaagcttatattttttttccaaacttgagttaaaaacagggatcactaatatttaagataacaaacaaaaaactctacaaattgatacttttttcttttcagcaattcttgtgtcgtaaaactgaattgaataaaactatatattttgactatgagaatcaagattctcaagaaagtcaggcaattgagtgaggcctataatgttatgtttttaaatttgctaaatgatggtagcatgtcgagaggggagggctggacctggtggggggactgaataaccagttatctagagacctggcatcatgagaatgttgtcagctttcatctacatgatattggtttatatttttactacttatgtatatagtcttaaacattatttataccatttgtgtgttttacattcatgtgttattatttacataaatgacaaaatccagcttgttttttaaaaaatgtttttgagagtaatctcttttggagatgaatccctgggggtatgtatacctttagtttattttaactgttctaaataataccatcatattatagtttgtttttctaatatgtgttcctccctcctttcccttcctttcccctcctttcctgtttcctttcccctccttccctcttttccggaatttgcgtctgtgtgattcctaggtaatcattactgaaagcatgatcagcattttatggtttaaaaaaaaaaaactgcackgggtgcatttccactaaacgtatagagaatatatctgagggaacacagtagagctccatgtggatactgattgattagtattgggcccgtggagactgctagattaaacaggaggcagatagtctttcctctgggagtcttgcctctgggtgtgtccatcatctgctgaattagcactgcattcagatcagctctaggggaaggttgcttctatcacatggtgcagatgaacctgccctgctctcctcactctggaaacttggctgaggtgggaatctgatcagagcagttggcccagttaggagtccccatgtgccatttaatgacaagtgtgctccctggtgtttgttccgaattaatttcctctgtgtgaatggtgtctacagcttgtggaggtggcctttggggaattagtctcctaagtctctggttgccagatgaaattgtgaagttgagtccagagagcaaactcagagcagtaaattgcatttttttccgctctgaaaaccacttgtctactatgagtttcttgccttttttttctcttctgtcttgagtttttggccttggcacaactataggtttatgctagctctgactgatgtggtcctgtctggttgtcagcatcctctcatgctctgccagccacatgggaagggctctcctccttgcctcctcacccccctgcctatggatccctcttctcttgcagtctgggccattgctgggcatcacttaacttgtttggtttccctgattccctttgtctcccttccatttgagtaatttcaaagcttagctctgattctgcctctcctctgctcctcatgagcttttgatggcttttcatgctacagagaaaatggctcattctccttaacatagcctggaagattttttataatctgactctaaccagcttgtccagtttcatgtcttatcttttccaacactcagccttgctgtggttgatgattccctgttacccagacctgctgtgcacatctcatgcatctagttttgcctctacctgtacacccaatgcccttctctgataatggaaatcctcctctctctctgcaagcccagcatgcatgttcccttctctgcgaggttccccagtaccatctttaggagttaaccaccagcccagttgtgttcctttagatctttagaattttttgtctgcctactatcataatgcgtcagatatgtgtctttccccagtaagtagtgaactccttcagagcaagagccatgaatatgtccttggaaagataccttagcacctctagagtctcttgcatcttttaggattgaatagctgttattggaggaacactgttgtgggtgcttggtgtgagggtgtgtggtatactgaactggagtccagagacccaggctaaagccaagactctggccgtgttcaatgatgcttttgcctaccaatgatcagtaaaggcttattaatatatraaatgatgaaatggtgttctgtgtgatttggggaccatccctgaacctctctgtgttttagttagctcatttggaaaataagagggtttgaataaacattattatagatttcttttagctctaaaaggttcatatattccttcttttgtgtacattttatattttccaaattatctacaacgagaatttattactttaaaaatttgagctgtcaggttaaagttcttataactcctagcaaaaataaatgagtcaagagacaagcattaagcctaaataccaatgaacccctataggcaggcctatttagcattggagtgaaatatattagtgactgattttacagtgctgggagttttgcagaatcaaggtcagaaatgagattgtgtaagccaggactgctcaagactgtataagactgcatgtggccagtattaatcaattaagaaatcaatagtgatttaattgatcaccactatatgcttggcactagatgagagctttttcattatctatctcatttaatcttaaaaatcactttgtggaattggcatggttattttatcactttatatgagaaaataggctcagagaagtgaagtaacttgtccaaagtcatccaagtactcaattttcaagtcattattcaagtatagattcatcaacttttaaagctcatgatcttttgttwatacatcacattgcctttctgttaggccagaggtcctcaacccctgggccacagacaagtaccaggtccatggcctgttaggaaccaggccacacagcaggaggtgaggggtggatgagcgagcattactgcctgagctctgccccctctcagatcagtggcagcactggattcccatagaagtgcaaagtgtattgccaactgcgcatacaagggatgtaggttgtgtactccttacgagaacctaatgcctgatgatctgacgtagaacagtttcatcctgaaaccatccccccatgccccctccacaccccgccacgggtctggaaaacttgtcttccacaaaactggtccctggtaccaaaaaggttggagactgttgtgttaggcaaaaaaatttgtgcatatatgtggctaaagaagataatgggagttgggagatattgctactaggtacctcatattttaaacaaatagtgccgtaattattgatagtgcttgaatttcattccaaatatcctatcttctttaaagaagcagtttactactgttttataagccattctcattagcatctctatcaataaggattcttatttgtaagccacagaaacagacactggatgatttaaattggaaaggaataatttagagcatattgagcaatttacagaatctctgcaagggccttagaaccaggcagcctggaacagtgcgtaaaatcacatcattgaatttggtgatgagagttggccaggggcactgtccgtgtcacttggcaattatcctgtacttcagcctccactctggaactctgatttagctgctgctgccagttgctgtgacaatgtgtctacatccctttcccctcactaactcccaagttagtctggggctggtatgcctgattgacagaaagcaggtcttgagtcaaggtcatagctacaatggaggctagaatgtaaatgtcggatatttttatttttagagtgggatgtgggattttcttcctaagagagacactattcatgcatgggaaggtgattcagatacacagcagccgaagtgaacgacagatactgcagcatctatgtatagattgtaattcatttcaataacatgagttttctcattttaaaaataagaaaactgatatggaattttccattcccttgggctaggaacttttgggggctctctcatacattttctggaatcaattgtcaccaagttctattgatgcttataaatcaggctcaggtataccacttcctctctattactgaagatataaacccaatttgagttttcaagatgttgaaattggagtttctcaataatctctctttccttgttctctctgaatttcttctcttggatctgtcctgcaaattrctgctagaatattcttccataagcactgttttcatcatacctctgcattgctcaaaattattatggtttaggggaaatactgtaggccactaatcttgcaaaaattttatggctaagacatcagaagcacaggcaacaaatcaaaactagaaaaatgggattatattcaacctaaaagcttccaaacagcaaagaaaacaaagtgaagagacagcttgttgaatgggagaaaatatttgcaaaatatatattcattctacaagggactaatatccagaatatactgggaactcaacagtaagtaatctcattaaaaagtatgtaaaaacatgaataaacatttctcaaaggaagacacaaatggccaacaggaacatgaaaaaatactcaacatcactaatcatcgggaaatgcaaatcaaaaccacaatgatacatcatctaatcccatttagagtggctattactaaaaagacaaaaactaatgggtgctggcgagaatgtggagaacaggaactcttatacactgttggtggtaatgtaaattagtatagccattatggagaacagtatgaagatttccccaaaaatagaactattgtgtgatccagcagttttcgctactgactgggtatttattcaaaggaaagaaaaaaagtatatcaaaggaatacctgcacccccatgtgtattgcagcactattcacaattgccaagatatggaatcaacctaaatgtttacctgtcaacagataaatgggtaaagaaaacatggtgtgtatacacacacacacacacacacacacacacacacacacacacacacacactggagtactatttagccatacaaaagaataaaatcctgtcatttacaacaacatggttggttctggagatcattatgttaagtgcaataactcaggcacagaaagacaaatatcacatgttctccctattatgtgggaaccaaaaagttgatctaatggaggtagagggtagaatgatagttaccagatgctggaaatggtgtatagggggtgggggttgaagagaggttggttaatgggcacaagcatacagttagatagaaggagtaagttctaatgttcaatagcaaagtagartgagtatagttaataatgcattacatttttcaaaatagctagaagagaggacttgaaatgttccaacacatagaaattataaatgtttgaggtggtggttattataaataccatggtttgatcattatccattctatggtggtaacaaaatatcacatacataaaaatgtaaaaatactatgtatcaataaaacatttaaaaattattatggttaaccatagcaattggtttattcaggaattagtgacctataataactaatatgccagtatgccaatttggatccctttgttgctaagaggcaatatggaggagtaagtttgctttgctcatgctgtctcctgtctagaaggccatctctgttctttcagatatccaaattctaccttttcttgagtgtagcttgtctctccttttccatgaagtccccatgcctttccagacttacttactgatttttctatttgatacttaattatttgtaatatgcatttcatagcttattatttagtgacattttctaattttatcaagagtttttttttttttttgagacggagtctggctctgtcgcttaggctagagtgcacgcaatctcggctcactgccagctctgcctcctgggttcatgccattctcctgcctcagcctcccaagtagctgggactacaggtgcgtgccaccacacctggctaattttttgtatttttagtagagatggggtttcaccatgctagccagggtgatctcaatctcctgatctcgtgatccgcctgccttggcctcccaaagtgctgggattacaggcgtgagccaccgtgcccggccttatcaagagtttttaattcctgtattcttatatctcttcctgcttcaacccccatgccaaatccttaagggaaaaaaacatgacatagacttatttttatcctattcctagtgcttgacccctaataggttcttggttgatgattaactgaatgggaaataaaccttggatgtagatttctagtaggtgttatattttgcaacgtgatttaacagttctagaccaattgttacttgggcttctgagcactatacattattcaccatacggaattgaatgccattgagtacattaaaaatagtcctgtatatatgacttgaaccacagctgtttccatctagtattgagtaggtgcatagttaacctccactattcctattctttggaaatcagcttaaaaaatgataataaataaaactgcagttatcagagttttttaggtaatgaaaacgggcacacgtgtgacacaaataggagttagcaggatactcttcgtaatatttttttccttgtgtctattatasgattttccattatatatttctgtggcatctctccatcaggattctcattgtgcatgaatctatctatgcacaagagtgtcaactctgccagcagtatctgacagcattgtaatttaatgtattcagctgctgtgttaagtttcaggaagtttcctgtaagccaaaacttgtaaagctttgtctccctttaaacttttgttaatgatattatttaaacatttcttttttaagcctaaattttctaagaaaatgtgatttgtttacttcagtgcttgctgttatagaggctgtcattttttcccaaactagactttattgtgaggtgtggcatgcttaatttgtccacttgtagaaaatgatgtgagcgtatggctgcctgttgcaacttgaaaaaccttaaaaccaaaatctcaggccatattatttaatctgtcaattttccttgttacatagaaattcctactagaagtccaaagatagttttcggaggagccctgagttgcaggatgtttatcacctcttagtgttcacctttgatttgttctttttcttcttgctttgcagttgtttgatttgtaagaattatttagatattaaaagcatgaactgtttttaatatgtttacttttgtttattatggtgctatataatagttctgcttttttatgaattccagttatcgaagtggtctattgtgttttcttcccatattttaaatcttataacttttgaaaaatttttaataacctagaattgttctggtgtaaggtaaggaaataattrattttaaaaatgtgataatttcagccagttttggtaagcattactcccagttctcttattttgtattaatgcctagccagatttttccctcatttgcttttctatgtgaggcttttccagagcgtcatcctattttaaaataaaatgtcagcctgcttctttcactttgcagattgccagtcatgcccagtatcttaccctgtgcagatctggtggtcaagctcattcttcctttccccaggtcatctgtgagtgtaaagcatcggagtcctgtaggcatcacttgaggtgatcctctctaaaagatacctgttcaacttctaaccagcttcagaatgataagacttttttttctgagtgtggaaagtgattaaaaaccaacaaaacctgtcaatgttatttctttcatcttctctgtgccttctgtgtctgttttagaaggaaattagactgtctgttaattcagagcaccttcatgagtagagaaaggacttctgaaagttgaactatccacatgtccccaaaatgtaaagaccgttttgagagtatcttctagtctgttatttttgtttcttaccactttttgacctttaatgttttcctttttcttttaattttcttccattgtcttggtggttctctatgctgcctttgccttattttccatcttcctttccttacaactggtcctgtcgcgtattgtttctgtttttcacccatttttctgctgtcttcttactgttcattgtgggatgatctcaggatatcctggatgaatggaaaaagtgtgtttggagccttgctgtaacatgattacctattgggtgattatgcttgtatagaaaaataggattgttcagctcaaacactgagggaaaaactatctcctagatttccttactgaaaaatcccaaatcataagagacagattttagtcttgtcatcagaacataatgactaagggaaaattcagatgggactgtgatgttttataaatttttgtgaaatagtaaaacttccatgtctcatagcaattttaaaaattatcataatttctttagttatagatataaatagagtatgtggaattgaaagtatgactggaaagggacttgctcagttccctgggcaagaacttcactttcttctggttccaagaagaaaacatacaactcctgtcactcctttctgtgtatgtctcttctgtcctcattgccttgtggtcttctgtggctctgaatgtgtagaaaatgctgatggagagatgtgaactctcccataagagcagtaatgcctgagtgacaccccacctctgtagtgaatcttcccagcccccaaaggcaaggttgaaaatcctggtctaggctgctgctgttcgagtccaagtatctctaggatttacccaatcagtggcaatttatcagcagaattctaatcagtcttttcttttgttgaaaattgtttgttaaaaaaggaagaaattatttcaaaatatatggtctttataaacacataaacttctagaaacatttataactgaaaatgtgttgtttttacaaygtatcattttctagtagcagtaagttatgctgtagctcaactattcttaaaaccttcctggcaacgtttctctaggaaattgagatccttaaaatttttagttctctttgctataatgtacaaaaagaaaaagttgttttgtaaattctgtcattctcagtgtcataatgtttggattatttgagaaagaactacagtatgagtgaaaatttggtattctaaggtatagaataaaatgggatttgcctacaaaaatgcattgtaatttgcacagtgtagtgcctttgcatagtgattttatgctattgttttggaatgttgtttgaatatcttctttcatctttcagtgcattttgaatatattttctggtcctttcccttaatgtataagttcattggtttacaaattttagttttctcaaaaatatttatgacagggttttgcacattataaacgctcataaaatatttgcaatttgacttggctataagttagagctatattaaggatttccagaatccagatgatgcctgtgccatgctgactgtactatccaaggacaaagaaatgggtgctgatacagtaatgctcttttctttctggaaatgtgatcttccttgttgaacrtgttaaatattttattcattctgtgttcttcttttcattgggagttagtgttgatttctcagactcttaggttgtgtctaattatagtgctgattccacctcaaaatattgctgaactgacagtggtcaaaggaaaccaaaaaagtagtccaaagaaagaaatgatgaggctttgcttatttttcagttgccaagaataacataaaaatctctttaggtgggagaaaatcacaagagcatctcacaatacttcttaaggagcagacgcatgatctgataatataataatacccttccttttgggcaggttgcgctcagccttgtgaatagtttagaatagcttatttctagggaagttataaaaaatgccttcatcgattggcattatttatcaggaacttcaaaaatgttcttactctttggtccagaaaattattcacttctaggaatttattatcaggaataattaggcatatggataaatattttgatacagcagtattattttcattgattgtaattgttaacagttggaaaaaaacttcatttgttcaataacagggtattgactaaatgcattgtagcctcttatactatggaatattgtggagctagaaaatcatcttatgtggcaaaaaatagagtatatactctgaatcattggggcaacacttcagattatagaagatttagtgtcttgtcttacattttagtgttttggaattgaaggtgacttgtgagggcagctgatcattgatgggtatttgaatcatgaattgagatttagggtcaaaagtaaccttccaatttaattaaaataatagatcatttgttagtttttatactataaaatttccttttttctagtagtcttgaaaaaatatrtaccaacagaaatattatgttgtaagaaaatgatgtttggagtttgaaaagcaatttgaaaaagggtgtgactcttttgagttttagtattctatgcacattcattacttttgccttatctttcctaatcacatttcattaaaagaactttcttcttaggcctgtcatgttcacttcattcatatttgtcatttctgtgttcaataatagcccatgttcatgagcagtttctaagcattagcatttcttagcccatatgtatcccgtrtttctactaaagatggaaatgttagtgttaaaaccttgagaaatatgtcagcaaagcttcccaggacattgtataaaatatctttgttttgagacttaattaaatatgtatgtagaaagcatcgtttctatgcaagaatttggattccaaaatcaatcatcattggtcaggtttatgaaaatagccgcaattattatgttttgcctgataatctgagcattttatttctgtaaattgttaaatctcaatacttgctacttatttgtaaatgtacaagtttctttagagaaacagtaccatttgatcagtttctgttcctgctggtcctggacttgtacactgaaacatattgctgccttcactgcaaaataggaaaaaagatctaacaagcatgttatattgcttttaaagtaacatgccataagttacattgaatttcaaggtaaagttaaaaggtcaaagatgtatatggattgctagcatctttttggtctcagatgtttgcaaagctgagtcagacttaggaggtaggagtgtgtatgaagcagagtggggctgggctatgtgctggttataaactgtgaaactctaggggtatgctgcacagggatttgctatgtgcacattgcacaaggccaagtgcagtggccctggagcactacgaccctgctcttgtttctggcttgttccccttgagtagcaagtgtgttatgtggaatcaaatcagtgctgctaatcaaatcttttaagagtatctctaaaagtcctgtttccaatataagagcaaaggataaatcagattcttttaatgtggggagtaataacattttctactatataaggggagaagcagcagagttgggttctaaatactgagcctaactgcaaagaaaagaaagttgctgtggcttccagctctactctttcaaatatctattttaaatgaaatatttgacaaaggaacacgaggaaagggttagaatttgcagtggaatgacctttcttagagaagtaccctgatttgaaatgatcattttgacacctagaaaccaagaatttctgtggctttaatgtacagtcgtccttctgtactgaactgtgggttttgcgttcttgggttcaaccaaccagagatggaaaacatgaggaaaaaagcatctgtactgaacacgtacatcctttttccttgtcattaatccataaacaattcagtataacaactatttacatagtatttacatttacattgtattaggtattataagggatctagagatgatttaaagtatatgggagtatgtgcttgcttatatacaaatattatgtcattttatatcagggacttgagaatctgtagattttgttatctgagggaggtactggaacaaatcctccatgcattctgaggaatgattgtagttcttttttttgggtgatgagcctagaaaataaaatgcactgtacattataacatttgtggttatgttaggtttggtctacaatgttggactgagcaacacctcatttgaagaaaactggtggttaggattgttcactgtgctttattatagaggatttacaataaaaatattggtattttcacagcaagaaaaattgtaccaaatattccaacgtatgttcttaccctcaagggttgaagatagtaaaagccattattggagacttaaatttcaaaatggtggcatagaagcaagctggcttcaatggcccccacagaaaaccaaaatcaaatgtacagcagcaagactaacaatatcccagaactcagtatgaggatgagtgagttcctggggccacagagaagtaaagacactccaagcagatggtagactataacttccatatctgtgatgccttttcccccagtcagcccagcagcaagcacatggaaaatgttccacaactcatggtttctaacactggaaaaagtgagattgaggtggacagccatcttccccattgtcttgtgttccctcacaggagacctgccctgcctaaacccataggaagcagcacaagggcctgaagggagaaatatccctgaggacaactggagacaaaaggcagaggcagggctaccatctgtagccctggaaactctgctttgtaacttggccaaaggagatgccaagtcagtggcttttcagtaccatgctataggtggtacattccacagatatcctgggcacaaaccctgagccagcctccccacactgctagtatcccttttgagacctccctcatttgggactagtagcacactaattgtttgcttgagccaaggaaaacctgggtttaaggttccatctaatgctggaaaggaggccacaacctagcaaagaaaaaagaatgtaacaggtaaattacaaagaatctataagcaaacatacccaacaaaaaacaaaacaagccagacagagaagactggaataaagacacggagatgcatccacaagaaacaatagtaaacagggaaccatgacctccccaaatggacaaagaagggaaccagtgaccaaacctaatgaaacagcaatatgtgagctctctgaacaagaattcaaaatagcaattttaaggaaactcagtcatctccaagataacacagaaaagcaattcataaatttaccagagaaatttaacaaagagattgaaatgattttaaaagatcaaacaaatttggaactgagaaatacatttgctgagctgcaaaatttatcagagagagactcaacagcacaattgctcaggcagaggaaaggatcagtgagcttgaagatgggctatttgaaattacacagaggagaaaaaagaaagaatggaaaggaatgacaggtcacgtatgagatatagaatattagctcagaagatgaaatataagaattattggtgtttgagagggagttgaagaagagcgaggagtagaaagattattcaaagaaacagtagacaacttttcaaaacttgagaaagaggtaaatttaggcacagaaaggtcagagaaacagcaaacagattcaaccccaataaggctttaccaagaagcataataaactctcaaaggtcaaggacaaagaaaggattttaaaagcagaaagagaaaagaagcaaataacatataaaggaactccagttggtctggcaacagacttctcaacagaaaacatacattttcaaagtgctgccaggggaatmaaaaaaaaaacccaacccccaccccacccctgctgccatccaagagtattgtttcaacaacgctatccttcacatatgaaagagagataatctttgccagacagacaaaagtttagagaattcaccaccaccagacttgtcttacaagaaatgctaaagagagtttttcattctgaaagaaaagattaatgtgcaaaacaaacaaacaaaaaaaaccaaaaatatttgaaagtataaaacccactggtaaaactgaagttcggatacagccccagaatactttaatactgcaattatgatgtacaatacactcataactttagtatgaatcctaaagcacaaagtatcaaaaagaataatagctacagaaacctgttgagatagtcaatacaaaaatgtgtaaattgagaaaacaaaaatgtggagagaatggagttaaaataaagattaaagttctctcttgtttcttttttggggtgatctgtgataagttgtcatctctgtaaaatgacttgttatgtctacaagatttttttgtaagcctcatggtaacctacatgttaaaacctataatagatatgctaaaattagaaaaagcaatgaattaaaacatgttaccagaggaagtcacttaaccacaaaggaagacagtaaaaaaggaagaacggagttacaaagcaaccagaaaacaagcaacaaaatgacaccagtaagtccttacccatcagtaatagcactgagtataaacagatgcagttctccaattaaaagacataggctggatgaatacataaagaaacaagacctaactatatgcttcctagaagaaacccacctcacctatgaagacacatgtaggctgaaagtaatgggatagaaaaatatattctatgcaagtaaaaaccaaaaaatggggggaataattatacttagataaacagattattagtcaaagactttagactctgcctaatagagaaggtgactatattaataatataaggggtcaattcagcaggaaaatataacaattataaatatgcatccaacactaaagcacacaaaagcaacattagtaaatctgaagggagagatagattgcaataaagtaacagtcatggactttaacactccactctcaataatggattaatcatctagataaaaaaatcaacaaagaaacagcagagttaaactactacactagaccaaatagacctaaatgacttttacagaatgtgtcacccagctgttgtagaatacacattattttcattagcatatggaagttcatccaaaatgcaccgtatcttaggccaggaaacaagtctcagcaaatttaaaagagcaatatatcacatgtatttttttaccacaatgaaataaaactagaaatcaatcacaagaagaacctctctgaaatgagacaaacacatggaaattaaacaacatgctcctaaatgaccaaagggtcaatgaataaattaagaaagaaatttttaaarttcatgagacaaattaaagtggaaatatgacataccaaaatctgtgggatacagcaacagcagtactgagagggaagtttatagcagtaaatacctacatcaaaaaatataaagacttcaaatgaactaatgcacctcaaggarctagaaaagcaagaacaaactaaacccagccttaaaaatgaaaagttggttttctgaaaagataaacaatattgacaaacctttaaatagactaccaaaaaagagagaaggcccaaatgaatacaatcagaaacaagaaaggcgacataacaactgagaccacagaaataaaaagaatcattagaaactattataagtataggccaacaaattgggaaaactagaagaaacagataaatgcctggacacatacaacctgacaagattaagccacgaagaaatagaaaacytcagcaaaccaataaggagcaacaagattgaagccgtaataaaaagtctctcattaaagaaaagcccaggacctgatggcttcactgctaaattctaccaaacatttaaagaactgataccaattcaactctaactcttcaaaaaaaaaaaaaactgaagaggaagaaatactttcaaacttattcyacaaagctaacatcaccctaataccaaaaccagacaagcacacaacagaaagtagactacaggccaatatcactgataaacacagatacaaaagtcctcaacacaatattagcaaactgaattcagcaacacattaaaaagaccattcactatgatcaagtgggatgcatcctaggatatgatagttcaacatatgcaaattaataaatgtaatgtatcctctttacctaaccaagaacaaaactataagatcttttcaatagatgctgaaaaaacgtttgataaaatttaacatcactttatgataaaaatcctcaacaaacgttaagaatagaaggaacataattccaaataataaaggccatatatgacaaacccatagtcaatagcatattgaatggggaaaaattgaaggcctttttgctaagatctggaaaaagagatgcccatttttattcaacataatactggaagtcctggccagagcagtgaggtcagagaaagaaataaaggccatccatattggaaaggaagaagtcaaattatcgttatatgcagatgacatgaacatttatttagaaaaatctaaagagtccacaaaaaaaaccctgttagaacaaaaaaagaataagtaaagttgcagcatacaaaaccaacatgcaaaaatcagtaccatttatgtaagccaacagtgaacaatctgaaaaagaaatcaagaaagcaatctcatttgcaatagctacaaagaacataaaataactagaaattaatttaaagaagtggaagatctgtataatgtaaaccttaaaatgccgatgaagagatggcacatgtatacctatgtaacaaaactccatgttctgcacatgtaccccagaacttaaagtataataataaaaaaaagaaacacataaaaaaatgctgacgaaagaaattgaagaggcacataccaaaaaaaggaaagatattccatgctcatggattgaaagaattaatattgttctgttaaaagaaaaacttcaggtgaattaaatttaaatgagtttagttgagcaatgaacaattcatgaatctggcagcccccagaatcacagcagattcagagagactccaggggtgccttgtggtcagaacaaatttatagacaagagaagtaaagtgatatacagcaattggaagtgagatacagaacagctggattggttacaggttggtgtttgccttatttgaacacaatttgaacactcaatagtctatgagtggttgaagtgtggcctctgagattggccaacactcagctattgttacaggtgcatacttctaagttaggttttccatctcatctacctattaattcaggttgcagttcatccacaaggactcaaatatagaagtataaagtccttctcaggccatacttagtttgctttaacagttcaaatgacagtgctactcaaagcaatctatagattcaatgcagtccttatcaaaatatcagtgatattcttcacagaaatagaaaaatgttctaaattttatctggaaccccaaatgaccttgaatagctaaagcaatyctgagcaacaactacaaagctggaggcatcacagtatctgacttccaaatatactacaaaaatatagtaaccaaatcagcatggcatggaaacaaacatgtagaccaatggaacagaatagaccacccagatataagcctacacatttacagccaactcatgttagacataggctccaagaacatacagtgggcaaaaggtggtttctttaataagtagtactgggaaaactggataaccatatgtagaagaatgaaacgaaacccctatctctcatcatatacaaaaagcaaaatggattaaagacttaaatctaagacttgaaattgtgaaactactcgaagaaaacactggggaaatgctccagaacataagtctgggcaaatattttttgtgtaagatctcaaaagcacaggcagccaaagcaaagatagasaaataggattatataaagrcaaaatgtttctacacagcaaagataacaatcaacaaagtgaagagacaactcacagaatgagaaaaaatatttgcaaactatccatataacaagagattaacaaccagaatatataaggaactcaacaacaaaagaacaattactgatttaaaaaataggtaaatgggtactatgctcactacctgggtggtgggatcatttgttccccaaacctcagcatcatgcaatattcccatgtaacaaatctgcacatatacctcctgaatctaaaatatgagttgaaattacaaaaaataggtagaatatctgagtaaaaatttctcagaagacrtacagatggctaatatttataygaaaaaatgttcagcatcactaataatcacagaaaagcaaattaaaaccacaatgaaccatcatctcactccagttacaatggcttttataamaagggcagggaataatggatgctggtgaggatatggagaaaatggaaccctcatatactgttggtgggaatgtaaatggtaaaactaatatagaaaactgtttggagattcctcaaaaaattaaatattgaattattatataacctagcacttatattactgactatatatccaaaatagtggaaataaatatattgaagaggtatctatctgcactcccatgtttagtgtagcactattcacaaacaccaaaatatggaatcgacctaaatgccaacaatagatgaataggtaatgaaaatgtgatatatgtacacaatgsaatattattcaaccataaagaatgacatcctgtcatttgttgcaacatggatgggactggagatcattatgttaagtgaagtgagccaagcacagaaaatcaaatattacatgttctcactcatatgtgggagctgtaaaagtgagtcttatgaagacagagagagattggtggttatcagagtccaggaagggaaggagggagggagggatgaagagaagttggctaatggctacagatatacaatttgatagaaaaaataaatcttagcctgtgatagatcactaaagtgactgtagttarcatgactctatgtacatttcaagatggctggaagagaataatttgaacattcccagcataaagaaaagttaaatatttaagttgaggtatatgccaattgccctgatttgatatttacaaagtatatgaatgtatcaaattacagcatgtactctggaaatatgtacatctagtatacatcaataaaaatttttcaaggaaaaattattggtggaaagtaagttactatattaatttacatattattctatatttatgccagacaacaatcacccaccttcttttttgacttggttcatatttagttaagttaccattcttacaaatatggatatgaaaaaattaaattggggaacttcgtaagttatgtttttgttacttcagttttagatattttttctacgtgatagaacctggtgtcttttttttttttttgataggtgaacactaaaaacagaaaaggcaaataaagaaactgattttgaattaggaagcttcttacaattaattgagttttcagtatatgccaggggactacccaaggtacaaatatgaaatgaggtaactaaaaagtgaaatccacaatttacatagctaaatgaaaagtactctttcaaagttctataattatcataggaaacagtaaggttgtgattgctcaaagaatttttgggtctctcatttctatattaccactttttcctgataagctgtgctttcatcacttttaagttttggacttctgatagtattttgtttgaacaaaaggctggttccacagaggaataaagaaaaaaatttgaaaatcatttctgcttgttgtacaactctaaaagcatctttgcattaaaaaaatcttcttctgaataaaagtttatgtatacctatcagtaaaatttctaacagtatagaaatgttaaaaaatcaatagaaaagcgcaatttcatagcagtttcacctcctagatagtcaccattgttgacagttcggtgcatgttcttctttkttttttttttttttttttttttgagagggagtcttgctatgttgcccaggctggagtgcagtggcgtgatctcggctcactgcaacctccgcctcctgggttcacgccattctcctgcctcagcctcctgagtagctgggactacaggtgcccaccaccacgcccggctaattttttgtatttttagtagagatgrggtttacactgtgttagccagaatggtctcgatctcctgacctcatgatccgcccacctcagcctcccaaagtgctaggattacaggcatgagccaccacgcctggcctcggtgcatgttcttcttgaacatcctgcttattggaggcacaaacagccacctgcctgggaattgggaaggggtgtgtgggagcaggrrccaccttgagcagtggtcaggtgtgagaacacccctcctatttttacacaggcatcgtcctttgtacagagtgggggaaggccaagagaccatcttgaacaatctagcttttggatgttgaaattagaataaatattcaaaaattcatgaattatgaattcagcctcgttagaattttcccttgttggtttgtgttcattccacaagactacatctgataaacctgtatgtattattagttactctttattttyttaaagtcaagatattatctagattaatatttaggggaaagcagaaggctaaaagtaaataaactttgaaactatggtcttgtgttaatctcttcatggcttatcgctctatgtcagtggttctcaaatatggtacctggaccagcagcatcaacagcttctgagaacttgctagaagtacaaattcttggtccctactgagttggaaaatcttgtggtggtgaagcccagcaatctattttaacaaatcctccaggtggtattggtgcaggataaggtttgaggacactgctctatataaaagccaaaggttaaaaataaaatcaacttggtatttctcctctctcattctccactaacttttaccccaacctaaaggtcatgatgttactgaggcataacatgatttttcttaagagctgagattttttacatctctgctgttagaatgccattctccaccattgtctacataacccattaataactattctttaaaattttattctagcataactcactggagaacctcccttgacccagaaatccagctggacttgactcttatgctttttggagccctatgaatacctgtttgtagttcttcaaatttgattgcagtgatttgtttacatgcctctctcttttccagggtattgataactccctaaggaaagggattacatctttcccttgccctttcatccctgacacctagtagaatttatggcatatgcaratactcaataaatatttaagtgaaggatgaaatgaaaataaaatcataacttctccaagattaagaattactaagaggcaaactagtgttataagaaagctgaagtgacttgagtttgaattatactgactgtatgttagactgcttgggtaatttctctgacactatatagtttatatagctttttactatataaaattgacataattcctacctcacaggttcacgtagaattcctgacacacagttaacactgaaaaatggtagctgataatcaaataaaaaatagtaacttcttacatattgtagtaatttgaggactgctatcttattttgaagtcatatagttattataggagtattttcacttatttaaaaaaattattttactcattagaaccaaaacaaacttgattgaattaaactatttaatattttgaggagaaagtaacaaaatgattcagatatatggatggcaaacattttaatcagtatgcacttatgattttaaaaggtccttgtatggtaaatttgcatatatatatatatttttttttttttttacaaataacagcatgtctatttcttgaactccacttgtgagactaccacataacttattgactctgtcatgattcccaggaatttattttgtgagttaaaagaatttatacctgtgagcataataagtactcttacaaatatttgatccttatttaggccccaaacagattcatatatttttaaaggagccaggtgtcagaaaattgttgccatcatatattgagaaaatttaatatttatacattttagtaggaaaaaatatagtgcctgtccatcatattagggatggaatctataatctatcatcaacttctggaatatgaatatatatggacagtcaagtacattggccccagtatacatgtcttgttttttctaagagaactgatccctaaaaaaaggaaaaaataaccaatgagactggttcgctgtttgctcactgataggagttggaagccgggcagcttggttgggtagagttgaggttagagatccaaataacccatgccactcagtttagagatgagagcctggggcccagagaccatgtgacctggccactgtctcactgaaagtcagggctgcagcaaagattagaaactctgtgcagtctcatgctggttgcatggcattttgaggcagtcacattggcaaagcagctgtccaaggagtcactttgttatactgtttgatactagggactttttcatgtgacctgaaaaaaaaaaagattaagcttttctgttttactttgctgtaattcaagtaatcagtcaccccactcttgagcttttacccaatcttcttcaactctgagaattaggatttaatgggatgggcrttagcaatgaggtgagatcagtatgggaatcaggaattkgatgggggatatctttcggtccattactttctaataagctcagcacttttgacctggcctcatcagaatggttgttttgaaacaggaaagtcaaaatgtccctctggccaaatcaaaaggattcatatattctttatatagggctcttcacatcagctcacatttctgtttctaaactattaaagmcctaacgacttatgcaaaygtttataactggatataaatgtttgagtctgggctgcccctgtagggggttttccctcttgattcaggttgttatcaagtattctctgggggaaataaccttaaaagatcattcagattccaaaacatcttacatatgccatattttgacagggcattcattttttttcctggggggaggggagataggttaagagagaagataataaaaagaaaacagacaatagtaccaaaacagaaacattgtattacaattagatcacaaataccattgcacagaagccaatataaggtagatctaccctggttctttctgtccaaagaatttcattgtttgatagtcctgtaagagtttttatatagcaccgaggatatgttaaggttgccattgtggcaagggtttaaaggacatagtttactaagttatttagatgctagttatcttggtaacttcgtccatttaaaaatatttcttcattcaggatttctgttccattcctggagactggcaggaggaaaatcagcttggcagatgagaacaagcattgttgtctgccttcagagtggctggcaagagtatctcagaagcagtttctaaagaaggggatggtggcccccaaatacctctgatgaaagaatttgggacttcagtgccctcctctctttttgtcaagtaaactatatccattcttctaggtgcaatacttcatctgaggttaagctgaaatgaaataacaatgaaaaaccgtcagagaacawtgctgaatactcttcccaacctagtgcatcagtggcacaccccacactcactggggtcattttgcccattagggctgagctacttatctacatcctttgagaggattattttctctgtgccagttcttggtaaatactcagaccctaagggaaattcaaattatcctggattaaccacatacagtcagaggagctaatgactgaaaaatgctccttgttcgttgcaaaatacccaagacccagaaaaagaagtcttccagggctcctaaggtrgaaattccttttaggattttaaggccacaagtaacagagtcctaaagcagtagattttatcacagtttcaaaaaatagctatgtaattcaactacagttgctccttaagacagcaaagacttagaatgaaagagagaagggaatctcaaaatgaaattaatcaaaataaaagtcattcttaagctttcttcttaaatcaaaatcaagagaattttttaaagctgattaaatttaatgtatttaggtcaaaaggaaaaaatgtatcataatcagacatagtcctcagcaaaggctgaaaagggcaaaagcaagatgaagggaraaaatgatgaatcaagctaatttccataatcctgttttattagtactggcccatgggtggtacagcacacacmaaccacaaatagtgtcaaattcctcagtrgaaaccaggctactcctgggccagcccagatttgtggatcttgcctgataccagttcagggcagccaacttgatgtggcatgtcctactcacatggatctttgagattcttgacagttctgggtcagttttcaaccattgtcagccagagctatctttggtcccgtctggaacagaatgaaatttctaaataatgcccggatttaatcctccctgtgaagcgccttctgcgcagtaattaactagagtcagatcagattttctaaagtttgctcaagctagatctgcgtctctgggatttggcgtgtccagcagtacgcaagtcaagtggatccctgttttcataatgcttgtcctatctgcttcctttactatctcccagatttactccctaatcaattcagagcttaggctattgttaaaacaactttctcagtttaggcttctttctctgatatagctactagattagggttcttaacatactcctgtttgacagttcattctccagctaaaaatatctttattggcttatcataatataaataacaaaatctagaccccttagcctggtgtttaaaactgtctacctccaacctgcaacttcaactgtatctcatatccctcatcctgaatccaagctcctcacctccaagtgtttgcttgcattgtgtctgccactcagccgttcccttgttcagatgtagttactgagcatctgtgtgccatgtggtggtctaggtgctgcggatactgcagtgaataaggccgacacactccctcctctcatggaacctgtgctctcattctgggagacaatatataaataggtgatatttcaaatgtcagaaattaggacaagtataaaaaggtgacggaatagaatgcagacaccctttcaactctcatagccctacctggctctacaatttatgtagcgttcatgacaggctgttttggtttttgtggttttagttacacactctggggcagatcacccatgatgaaggtattgaccctactactcactgcctcagtgaccatgggcaagtttcttttctctttttcagtttagccgtctctaaaatgaggataatatcattattctgttcataaggttgtcttgagcattttatagtgtctgcagaatgctcagcacagattctggtatgtgtgtgtacatgtgtgcatgcatatgtataacatataatgacacttatttatcgtcatttttgtttgggtgaggtaaattttaaataatataaatatttatactgataaacagataacttttaaaccagaatatcattacagtcctgtaatgtcctgtatattattataatgtacgattgaattatacattactgtttccttacagtctacttaattgcaaaccagaaggagggtacaagctggtagcctctaggagcaaccatgcatttctgagtctggttgtgttaactgtttctttcgtattcaatttgatagtacaaaaatattttacatatacattaattatttctcctagctaaacactaagtccctaagtttcaagcgaatacaatgtggaaatagattagaattaactgagatcatggtaattttttgacattttattttacataaatttgtacccaaatgctacagrctcaacttactagtaaagttttcttaagtaattaacactattatgtaatgggccttcccactctagtaaacagtactagtggctttattacctgttgaaatttatatgcatagttgctggtagctgcagtagtatctgtttctggtgcacacctgtagtcccagctactgaggagcctgaggtgggaggatcacttgagcccgtgtgtttgaggctgcagtgtgccaccgatttgagctgtatttttaaaggaattattttaggctatgaatagacagcatctatatttccataatacttaatgtattttaacactgaaaagttttcttgtaataatacagttaaggtttctattttggcaaaatgtaagaaaaaaaatactcaacacttgctttagcagtgtgatggtgaagtgagtaacagatgagtttagatgctgtagttgttcacagggcctgagacccagcagagggttcagtggaacaatggggaatgttagctattgaagtacttacattccttggaattcaagatatccaaggattaatgagtgctataagtcaaattgtaattaaagattcaaatccaaaggtgctggcagcrttgcctgcttttagcagatctgaatattgaaagctgggttcaaatgtaggttgtcatttacctgccatcctcctagaagtcactttacttctctgacccttagaaggttctcatttcaaaatgaaaatacagaaatcatgggttttgtgagattatataatactaatcacttaacctagtgcctgatratcataagcactcaataattatttgctgagttaaagaatggaaaaaaacaagctgattctcttggacctcagggtttcaaaaagctattctatttaagcctgtgattttcaaccctggctgcatactagaatcactggaaagctttaaaaaaattctcatgctaaggccccatcacagactatttgagtcatattctctgaaggtaaggtctagacattagtgtttttcaaaagctccacagatgtttctaacattcagccagggtctctgccatctgacaaccatgtttgtgcagttgtctatcttgccctagttgagtatgctctgaaatgcccttgaatgtatttcctcctttacattgtggtgccttgggttcacatgtgtactctatcacctgaactattgcagcagtcttttttttttttgatatcaccaaaaaaaacttccttttagttaatctattgaactgccagcacagttctcctagaaaacaaattagaatgtgttactaccctccttaagaaccttacccgtagcctgttgaatgaagttctgagtttaatggggcacacaaggctattggcaatctgaatctacaccatcttaagatacatgggaagtcattactgtaacttgtcaagtttgataaatgcagccaaatcacagcaracatgcccagagttaggaggtatatattttggtgtccatttttgccacacactggccctcaaactttggtgagactatcgatgtatagaactcagcatctttccctgtttggaagaaagaacaagaagaaatacagcttagaaataagtggaaggggccaggtgcagtggctcactcctgtaatcccagcagtttgggagtccgaggcgggcagatcatgaggtcaggagtttgagaccagcctgaccaacatggtgaaaccccgtctctagtaaaaatacaaaaattagctgggcgtggtggcaggtgcctgtaatccaagttactcaggaggctgaggcaggagaatcgctttaacctgggaggcggaggttgcagtgagccaagatcatgcaactgtactccagccttggtkacaaagcaagactctgtctcaaaaaaaaaaaaaaaaaaaaaaaaaaggaagacatttaaggaaggagtgatgtaagacactggaaaacatttgtacttttgtatgaaaatgctgtagcagaaggcttaatcaccccatttgtcattcagacctcaattcccctgtccctcagagaacttacctggaacccttagatggagacatattccttcttctcctctcctctggcactgtgtgccattcctctgtaacccttctcacctgtgtaaacacgtatgtgcatttttgtgactatttgcttgtctgattcccaactctgccatgaatactttgcaggcaaggtcttgtccagttttctcagtgcatgtctacagggctgggcctggcatgtggtaggtgatgaatttccaggtgggtgaccattgggttgactgactgagaaaataatcaaacagttgatgtgtgtaggcagtggggaaatgggaagcacataaggcctgtgtggaaggatattttcctcttccctccagggctggccaccttttcagggtccctttacctttcttctggttccactgaagaggccatgggcttctagaagtgtaggcttttctctgctttgcccatatcaagctgggggggctttgggatggcatgtcacgctatgctaccacctgcgtctgtggagtcttctagccagtgtgcatctgttttgtttcccattgtgttctgggtgctctgaagggttttgtgtagacttgtaccactcagtatggttgctattaaccacatgtggctactgagcactcaggttgtggctagtctgtattgacatgagctgtaactgcaatagacacatgggattttgaagagttaatataaaaaatactaaaacatcttgattttatattggttacatgttgaaatgataatattctaggtatcttgaattaaataaaatatatgattaaaattattttyacctggttgtatatttttctaacatggcttttaaaatattaagttatgtatgtgacttacacatttctgttgactagctctggtccagaaactacatttcttacatcatgaattcatttatctgcatttcatttgttcaggcacatatgaaaatgaacactttcaagcagtgtatgaaatgaccactgttaccaaaccagcgagaacacagactttaaggactgtcattttattctcctagtctggtaggcagtcataacttctgttagatggtttgaaacgtttacagatgcttcatgattttctttgagcagtcctgaggctgggacaaaagatggagcatctttgggctggaaatccatggcatgttccccacgacgagatcctatcgttctggccttttctttctgagactttctgcatttcatcctttgaagtggtaatagctacggacaacattcaggaagcagtgatctttgccagtgagttgtgtgactttgacagcgagctgagtttggaaaatgtgttgactttgtcccagctgtgtgattgtgggcagctctgagcattcgttaaactttctaagtcctttaggtcatatggaactctccaagtctatttcagatcacatcaacagtttctcctctggcctgacatgagcacatggggcatgtccattcaaagggagttcatgtgaaagttacagtggctttccaatcagctggtgatgatgctgtctgctgtatccccagccactctgctggagttgctactgtaatggttcagtgactaattggtgtttacctacagagtctgtaaatacattcccattcttggtattgaacatattaaaattgccatgtaatctttgtagcttattctctctactatctgcttaaaggcagagaaggatttgcaaatatgattacattttcaaaatgaaagtgtttcttttacggttgtgtactaacaattctttatcatttgcgtactaagtttaacacactctaacagaccagcataaatttaggcagagcagggaatatttctatctagaaaactgtgctttcrggcagctaactgcatggatgagttccaggttttatctactttgctatttggaccgggggatggtaaaacagtgtatgaggaaagtttcttactgtctttcacttggtgagagaaaattagtattgctggtcccagtttgcttttttctgcttgctctttagtgggaaagtgttaattttgaaattgcatctgtaaattatagtcatgtgaattttgtgctctgctggaatttctrtgtgttggcctggagtctgtctggagcacagcaggcaaagcagttgggtgtggctgaacatgggagtgtgtggagagtgggcagagtgagggtggaaggggcagggcagcagctcctggggacttctctgagtgtactgctaagtaactggcactctgcatttaagaattttggggctggcatggtggtaatggtggtatgatcacattaatagttttgaaatgtcatacaacctctatggtagccaagtagaggatgaaattgaagggagtgaaattgtaggcctggagacatattggaagctattccaataattgaggcaagaaatagagagggccgagacatagcagaggcatgggaggagagaagggattggatctgagagagtctgaaaaggatgaattgactgataggatttagacctggcacttacttccagaaagtttccccaatgtctggccaggtgaaggagaggagtgggattgtggggtcattgggaatggggaggaaaagcaggctaggaggaaaagatgctctgtttggggtcttcagaggcagagtgttgaggtcaagaaggcagagacggcaggaccatagtggtgcggaaatgcctaatgaggcaagtgcagtcctgtttgctttagaaaaaatttgctcaatgaccttctttctctcagaatctgaaaaatatccacttttaatcaaataagaaatatatcattcagaaaatggcaaccacaaaaagcttctcagagaataaggtgcaagtgaatctacttagaatacacaagtattctcactggagtacgatgtgatgatgagaggggtgggccagagactggtcattcttgcccatcaaacctgtatcaacctgaagaaagagagtctggcaaatgtccaggtgcccatcaagatgcagactaggatcacctcttttaaagatgcctttgaacccctctagctccctctgcccacgaaggggtgcaactggccttgctgtctcccctgggcttcagatgttgcttgtcatactagtctgtgttttccctcagtacccttcattgttatggtctttcctaatagactgttggttttttgagagcaggaagcattgtatcctcattttgctccctgaagcttttggagtgtgtgtctggtgtatctagcacagaatgaagtgttcagtaaatacaagaaacttatagaaagggtagtgaagtggaaagagcaataaccaggacagaagaaaagggacctggtactaaccctgctactattagttgtttaacctggagcaagccagtttttctgggccatggtattctgataggcaaaggaagagatttagtgagaatctggaaagtccataaatggtccttcagaggtccctggatttcttgatattagatgcagactttatatgtgtttttgtgtgtgtatgtgtgtatgtgtgtgtgtagataggtgggtttaattttttgagtaaatgagtgatagctttcatcatactctcaaagggatctataacaaaataataaccactgaataaaacatgatatctctagaatttgtaagatagagttgtggggcctgggtataggcattcagctaaaggacttgtctggaaattgctatgaacaaacacaccctagttacacagatttttgtgtttatttggagtagagaggtgtggcttctctgagcccatcctgtgtactatcctttcttagaactctttcagttctatgtgaggtcacactcacattttgttttctgaagtactttacaaagaccaaatctgactttaccgatgatgatgaggatgatgacaatgacaacaaaggtgatgatgacgttagaaatagcagcagaagtataggacattcttctatgtgcatatatctgtctgtctgtcacctctttaacgctgaaagtaaacttgtttgataagtgatgttttaattgtaatttcgtaggtaagggaactaaggcacagagccttgatcatcttgactcccgtccttaccttgctagtaagagatggagctggtctttgaacccagaaaatctgacttctgagcctgcacttctaatcagcccagtatatggctttttttttaaaggaagttcttgttctctgtagtttcacttttgaagattcaaaaaatagtaagtatagaatacttcttaaatttatgattgttaccaaggacagcacaaactataatttggatccatttaacctatatagatactctactctcttgaacaatggaaatstatttcccatagtttacagtcttcctgacatagaaatgttttgttgatcttatctggctgtactgctttgctttgcccatagaggaggtgctaaggacatttttcaacagcatcccacagatcaaagcaacaagcaggtgcttcaggaaatccctaagatgtgttgctggaagtgacactaagctgtagtgtatcctaatgggggtaatttactgtgtgaaattagagtttcgaagaaaattatgataatgagttctgttgatttcctgggagagttaaggtgaaacatgttgttagtctgaaatttaccatctggtctggtttagaattagacctaattgtcagataacctggtgtctgggatgcctggatagtatcaggtctctggggtgcctctagcttgcagttgacctggtctacagactatgcttctgtctgaatttctccacccagcactcatgcccacactcccagttccctcttctggggcccaagtttttctccacaaccccacagggcacttgctctgatccttcagaaaccaggatgcaacatctgtgccttgagcctctgctgctagatagcaacctaatgttgtaggggtgtgatgccgtggaccccttcttgaacccccaagctcgtcttgcatttggggctctagcatgcagctgcctgattgcccttgcagagcccacctccctgtaagtaccctttccctcggaattccttttgaacccaggttgttgttactgaacccggcctttccttttgggtctggtatgggttaagtggtgagatttcagaatagagaactcaagaagataaatccataattaattagcaactttttggcagacctacatgttggtctcatggcttcctctggttactgtggctgtgcctttcttaactcaggaccttaaaggtagccataacatactgctcctgcttagatgacttgttttaattacaaataacatcaacagcactaatgtgctagagaagcaaagagtggacatttgcccgaatgtctcatgaagagaatagtttaaaatgggtagttttatcagtgtacaatatcaccagtctgttttcaaaagctgttttattttgtggtttttaaattaactaagggatgaaaaaaataaagagctaaaacaaaataaaaatcatcattggttgaaaatgtttcataggggaacatgtcagtatgtttgttggctctaggtttgagtaaatagacaacactgtctcatatttaatgtttaattttcacaatggattcttcaactattcattctccacttgtgccaggttgagccctttacatatctggacacctattatccctaatctttaaaacaatttagcaaggtattactcttttatttgtttaagccagaaatatttttgtgttaagtggttgctgtgagcctgtctgtgaactaggtgatggaaatacaacagtgaagaatcactttgattctactgcccttaagaaattttccgttgtcagattgaaagaccaatgaacagatcactggcacggcttatgtttttatatactcttcaggggtgtctaaatttatgcagatatttttcatattgaagcaatatttatgcaaatatattgaatatcatgccttttgtcctagtcatcccatttaaaaatctttcctatagcaaaatctgcacataattgaaaagatctttggcgagaaaaataattgcagattttgcagaaaaatgttgaaaaagctcattgacaagagaatggctaaatcattgctgtttatatacactgaaatgttacacagcactaaaatgaataaagtagatgtatacatatgacatgactctgctttattgttaatgacaaaagcatgctgtagaaaaatctgtataataggaatacattacttaataaagcaaaggaaaaaagaaaaactctgccagagtcataccagatttttagctatggtcccatttaggcagaagagagaggagaggtgtgaagggcatcttttatgtattactgtattatttcagcctgacaaagtaaacatgtattcttttgaaatatatatatatatatttgagatagggtcttgctctgtcacccaggctggagtgcagtggcactatctcagctcactgcaagccccacctcccaggttcacaccattctcctgcctcagcctcccaagtagctgggactacaggtgcccgccaccatgcctggctaattttttttttttttttttgkatttttagtagagatagggtttcactgtgttggccaggatggtctcgatctcctgatctcgtgatctgcccgcctcagcctcccaaagtgctgggattacaggcgtgagccaccaggcctggcctgaaatatttttaaaagccaataaattttcattttaaatgaggtgatagatgctacggtggagttatgtccggggtcctatggggacacaaaggggacacagaccatgggccagagaaggctccgtggaggagtgggtggcctcactgggttcaggatggtacatgtccaccatgtagaagacacagagagaacaagggcttcttgcttggaagcatcctggaggcttttctggtaggcggccttggggctgtccacctccagagccttaacagctagcccaggtcatcctgggttcttcttcccttagccctcacagagcatcagctactattcctgaacactcctcccatttccactactttcctgtctactgcagccatcttggttccagtgcctcacctctcacttgggtggttgagacagccccctcagttggtctcctggccccttctctgttccctatgtcctctaccccagtctgcccttcactttgctttaaaaaggcagwtttgaccctgtgattgtcctttccacactttctcaatggtccttcctagcttctggaatataagccacccttctaaagcagatttgcagaaccctttgtctacctttcccacctgcctcacaaagtagctcttatttatgytatccaggatgattttcatttctttacagatrccactcttcttactcaccaaaggatagacaaagggaaagaaagaaaattcatgacatggatttactctagttgattgttggcctattgacctgcaggtattgttactagctatgtctgtttctgggagttaatgtatctcagaatttcctattattttgtggtaacaagttagaaattaatatattgcaggaaaayagtcttcttagtgtccttggagatgttttcttttgtaaaaattcttgaatggatgtttccagtggcaggtcagaatccccacaaagaggatttaagaatctggcattagtttgtatacttgtctattccaaatccggatacgcttcgcctttatagaatacacattgttctaaaaacaccgcattgactaaacagtctttatttgctttggctaaacttagagttaacggatggactcagtgtacaatagcatagacacaaaactgagtgccagttctcactcactttaggatacactgcatgctgtctttccattcctcctcatttgctgcatttgtatatttgttatttttctgttagtgaatagtaataaataactcctgttaagcagaaaataggagttggtctcagcttgttgattttcagaaatgtttgtccttataaaacacattcaattcaggactaaactaatagactatcatctggctccctctggtggacactcatgaaaaaaatcaagctatagttttctgaaagaggcggtgtgtaggggaggggttgtcatttttctggtttttggtgggggaaaaggaatagaaaatgcattctgattttgtagatacatcatagttattatagaaaatatcctcaargagtaaaatgcattgctatataaaatacataatagaatagcaataataaaagacataaccgtagtactgctattgctatttttcttgttattaagtagtgatatatgctgggaccacagtgtaaagtagaatcagaggcagatttcacyccatagctttctaacagtgatatattaggataagatgcatgctaaagtaaagcaatgtagttaattcaagggtctggatactgtactgattattccagaacctccccaaagttagacttttcgcttaatagtgaataattttggtattttagcaagtgactatttttattttgaattagttatttttgataaatttattagtatttgttcattcttgatcttctgagtttacaaactcactgacaatgttttatctttattatggggaattaatcaatatcaagttttatctgattggttgtatatgttttgacattagatgttcgacatagttgaccaggaagaaattgcatgaagggtttcaattgtattttcttttctttttctagtctcacagcagggggctacggttagaatatacaattttggggtcagtaaattagctcatctagtcaccatgtcctttgcttctttctaaccctttagaactatcctaaagagttttgctcccttctcttttgtttatgtaacaaattttcttaattttttaaaaattaacaaataaaaattatatgtattgatctgtgcaacatgttggtttgaaatatgtatacattgtggaatggttaactggagctaattaacatatgtattgcatcacatcttttttattttattgtggtgagaacgcttaaaatgtaacctttttgcagttttcaagaatgtaatacattgtcgtcatctatatgtaattcaattaaatgttatctttgtataataactttattttacatgataataaaaattcacatttactgagttaagcatatgataggcatgatctcatttaattcttttagtaactccatgaagcagttagctattatctgcattttacagaggctagtaaaggtgagcatagctgaaaacttgtgagtcagggctccaggtattcttactccaaagccaggagtttctaactacaaccatatatatatatggtaccagttcctgaagtgggtgagatataagtgtatgtgtggctggtactctcatgaaccttctacagagtactggagagacttcatttttatgttcctgtctctgaagtaaggaattagattaccttaatttagaaacagatttttgccttttctcgctttttactatcattctgaataagcctcatgtagaacctctttaagttgtgtttgttaaaattttgagagttaggatgcattatatctattatcataaaaataaactttatggccgggcacagtggttcacacctgtaatcccagcactttgggaggccaaggcaggtgggtcacttgaggccaggagtccgagaccagcctggccgacatagcgaaactgcatctctactaaaaatacaaacattagccaggcatggtggtgtgtgcctgtaatcccagctacttgagaggctgaggcatgacaatcacttgaacctgggaggcagaggttgtagtgagccaagatcgcaccactgtactccagcctgcacaacagagtgagactctgtctcaaaaaagaaacaaacaagaatagactttatgagaaaaatacattttagataaatggctttctcactaagtcttcgaaagagacaatcttaggacaaaagattgaaggaagggtaaagttgctagcagagtatatttaacatttagatttaagtactgaagatctttataaggaatctttgaaacataattaaggttaatttagaaaactttttctgaaaacactcagaattaaattaaggcaatttccttaaagttggtgattatacagaatagctactatttaaatagtttacgtgctagcttatttaatcctcacgataatgtaatgattgttaataatctaactattattataggcattatctagaagatgaaacaaaagctcagagaagttaagtattttgcccaaaagtacttggccaataaatggtaagctgaggatttagactcaggtggtctggcccaagagcccgcccacagtctcacctgctttgctatatagcaggactgtccaatagaactttctgtgatgatggaaattttttgataactgtgtagttcattacagtggccacatgtgtgtggctactgaacacttaaaatgtggctagtgcaactgyagaactgggatttttgtttttaaaatttaaattaatttaaatagcctcatgtggctagtgggtactatactggagaatacagctttccagaatctttcagattctgtaaaagtagagatacaagttgcttggggccacccaggctaactttgtgttatactgatatagaatctgcaactcaaatgggttagtaatctacttaaagtaataaagtaatttattactttaagtaataattataaaattataatccaggtgtttatacttcccaatcacagcccttctcattctgcacatctttgacacctgcaaatttatgtttctgctgctatggttaatattagattgaaaaaattttggaaaaagaaatcttatattttctgaactacatatctaattagtattttcctcttttctcaggttatagaaacattatcacgactttctcgaacacctatagcattggccacaggaatcaggtaagctctgttttcgttgttcatgtgtcccattgagttcagtgtaatgattctttattaaatggttactatttgtgaagcatcttgcacacaggtactatgtctcattcatgaagagtgcctggtatgtaagtatcccgtacacgtttgaaattaattgagcaaggtagaacttattgatagagttgaataacacattggctaaacattgttctcaattcacaggtgactgtcactggtgtggttcttctttttttttttttttaactttcctccaacatttctgtacatatgattcattaaagtaaacacaaatgcttaagtaaataaatatttataagatgttgtaatatgtttatttcctatagagtagatcataataactcatagcttttaggagtttaagaaataatcaaacaagtataaaacatgtgtacaagaatgtgtattgaaggttcagtagtaaattaaaaacctggaagtaaattggttaaatatagtatgtcatctccttgcaatagagtattatgcagttgataagcataaaaatatagatgtgtatgttgtgttgagccttttctgtttcagatactacatacttaagttagatcagtcagcaaagatgtattatataagtaacattaggaaataaagcaaaacagtctctactcagcctggtttcatggaaatggatcaaatttgttttttaccttctttattcagtgctccatatttctgtctcyggccatcacagccatttttctgtgtccagctcacattcacattctaagggagagaggatccaagcaggacttagtggggttctctgcactggctacaaagcacagtgagctcaggaaaaatgccctgctggtacaggacctttctcagaaatgggccatgaatttggcagctttctatgtatatggtctgtcggctggataaatgtttaactcctaatttgctcttcaatacatgcatacctttcatgtcaatatatattttatgttattatatgtaaacagatttttttaaagcatgatcaaatttttatgtattgattctgaaaaaacgtaagtcaaaatttttctcctttttttctcatctatattttctacaatgaacttgcataataaaatgtgccttaatttataaaaaatgattatgagactacatttctcacacactgatttatttgaaaaacctagtctcctcaaatgtcttcagtattaaattaatccataagtcaatgtgaaactctgcttttaatataactrgtaattatttaaagcttatttattattttgatggatcctctggtttttatgaaacatgtgatatgctggctgcctgaaaagagtagaatttttggcacagtatgcttactgtgattttgttagacataaatttaaggcagttatgaaaaaaggacatagtaccatgatgcaaacaaggaagccacacagtgggaataggagatacattaaaggtgattttcttgaatagggaacaaagaaaacactctattcaccccaaggtctggttgactcatttgtctaataaacgaaaataaaacatacagcttaaataccctaaagtctgagcagaaatgtcagggtcaatgaccgtatatgtaaagggcacaatgtttttgtcttctactagttttcatctacactagtgaacggagccatggaaggatgattgctaccaaattatttgttatcagatcccacagctgaaaagagagggtgctgaaggcaagggtacatgcacagctgtttgttgtctgacttggggtgctgcagtgggtgaggtgaccctgcaggtatgtggcaggtgggagatcagataagcacgttattatgaccccctgcacatgtgactgtggtgaccagctgtaattgcttcagatgatttcaggtggcaggtgttacagcctccctaggggaaccccagacaaagccactgagcaggcactttagggaaagccctagatattgttagacatggtgactgatctgaccattttggcagcagacaacttacatatttagtgagggttaagtgcgcagcctgattgttgctcgttsactcatgggtttgtttttttgtttttgtttyttctcctcttcctaggcccttcccaacagaagaaagcattaatgatgaaracatctacaaaggccttcctgatttaatagagtatgttgaaaatttcaagcaaaatttagccactgccaatttatgtgtccattgtgggttttaactgtggatgttaaagtaagctatctgaaggaggaaaagtggcttaattactgattaaccttaaactggcgatggaaagctttacaagaaaatgtacttcaactggtttttagttcctgttttgtgtccccatgaagaataaagaaacttactctaatgaagtaaaatttcaaagtttctcaaaggcataacagaagtagtagataaaactggagttagggaacaatttaaaagaaatagaatctgctgctggagttgtgggacacatagtgcatgccttataagttcaaggaagggagagataagtgtgggttggagctattcgggatgttttagtaggcggtgtttgttctgaacagagaatctttttgggctctattatttaatagtcaagagaggcmaaaggtccttgcagccgattatcttctgctgattgagtgacttgtacagattacaaataaatatatgcgtgatcgttactcctcaaggaactgatgacatggatcaggcatgtttgcaaagaatcataataagaaatagattatgccccaagacagattcaaatgctatggaacttcatccattcattcatctatccttcctcatacacccaacacactgggcttgttttagccttgtgacctttacacctgctattctttctgcctgtttgactgatccctcagcgttcaagtttttgcttagatttcyctacagagaggccttctctgactatcctgtctaaaattgccaccacccccttacattgctgtgtttttacagcatttgccaatgcctgagacagtcttggtttgcttcatttattgtttgtctcctcattagaaggtacacttttgtgaggtgtgggactttgccttgttcatggctgtattcctagaacttcacagtgtctggcatatagtaggtactcaataagtatttgttttccaaattaataagtcaaaactgcatctagcatctactgtttgccaggtattacacctggcaataataataagagcttactgagtttccatttgtgtgctaaccaggttatatgcactatcttatgtaataccacaatattactaggttgttattatatcttcacagtttaaaagtgagaaaactgaattttgaaaagcctagttacttgctgagggtaatattgctagtaaattgtagtctttggatttgaactcagacacctcttattctagagcagaggttgttagtcacagccccaacttccagatccctctcagagcttttagtagaagagtagagggggtgagcacacccactgcagtcacacgatggatggccagcagctctttccagggtaggtggccttgagaatgatctttcagtcttatattttaaatatctattaagagtagtttcttatctcttaaaatctctaagaactcaccaacagtaagcaagatagtgccagttgttttattgaattggttgtaatcttcataaagtgactaagattattggtaatgtactcagattgtttaaggggaatatttaatttctagtgccgtgatgctattctttttttttttttttttttttttttttgtgactgagtcttgctctggcacccaggctagagtgcgatggcacgatctcagctcactgcaacctccacctcctgggttcaagtgattctcctgcctcagcctcccaagtagctgggattacaggtgcctgccactgcgcccagttaattttttatttttagtagagacagggtttcactgtggtagccaggatggtctcgaactcctgacctcatgatccacctgccttggtgtcccaacktgctgggactacaggtgtgaaccactgtgcccagtcgatattcttttttaacccataccagtggtgacttacacctataaatttttatagcttccccattttgttcttttcactgatgttatttaggcagacatgatgtcaggataaatccagtgaggatgcattcctagctaaatttggagaaaaccttggtttcctgaattggctgctctgagatgccagcccttgctctgtgagaggcagtctgctttaaatttctacctggtggccgaaggtccgaatgtatttgcaggattaaagaaattatttatttaatatgcccaggctggtctccaactcctgggctcaagcaatccacccaccttggcctcccaaagttctgggataaaaggtgaagtagggttatcttaaaaaaaaaaaaaaagcaaatgtattatccctagacatgcttggttttgagtttgctgtgacagcttgatttttattctcagctttattacaatttctatgggtaaatatacttaactctaaattttggggctgcattcacccaaacggaagcccttggaataaatactggcctggtccccactgtggaggcaatcattgtttcctaagttggggagaaagccacaggatggagtggagagggcaggtaatggctacactgtacagtgtccttttagtatcagggcgccagacatgcccgtatgtaggtggccttacatgtcgattgtttttgatttattgaccatttgaaaaatatcacagcttttttctttcctggctcagaaatcaggaattgttgactaagctgttagcaagaaaagcagctttagtaaaggattgaataacaaaagccaaacagttctagaccagtcttgtgtgtgtgtttgcgtttgtgcacttgcatgcacgcatgcactcacacatgcatgtcattcttacaggtcttaaaatagagaaaagtcagccaggcgcggtggctcatgcctgtaatcctaacattttgggaggctgaggtgggcagatcacctgaggtcaggagtttgagaccagcctggccaacatggtgaaaccctgtctctactaaaaatacaaaaattaactgggcatggtggtgcgtgcctgtaattccagctacccaggaggctgaggcagaagaatcgctggaacccaggaggtggaggctgcagtgagccaagactgcaccaccgtactccagcctgggcaacagagtgagactctgtcccccaaacaacaacaacagcaaaaatagagaaaagtctgtgctaatttatatgattcattcctttactgtcatgggaaatagtgaaatgtaggacttcagcaaggttgacttttttgcaggggtggtgatgttagggatgacaagcaggagttctgggattaggagtgccagggaaatgaatttcagtccattttgcttccaaacaggatcccctccaatgcagaacctgttttttcatcattttatatctcagctccttcatgaactcaccagaccttcctatcctttgatgtggtacagagaatgtgcaaacygatttacctgccctaatgttctctggccagattgccgcctaaacccctcagtatggaaattatgttactgccaatatggatcaccatctccctggtgtcccaaagtagaaagctccttcctcttccttcctcctccctcccttattctcagtgttcaccaagtctggttgtcccagtctcctatctctgtctgttcctctcctcatctgtctttatgttagttatggccctgaatataaaacagataaaggaagggtctggttgatgggggactggtgggtttcctctgaatgggcttgaaagagcatgggttgaaaaccactggattagatgctgattataacactgcagtaactgatgcttttataagaccacttatgacatattagatacaatttaactctcctatcttctccatattatacccattaatacagttgatgaaactgaggtcttgaaatatgaaaagtgggaggcagtatgatagagtgggtaaaacactcagcgttaagacagacttggttttaaatattggatctgccagtgactacctgggttatttgtaaagtcaaatagccttttggtctttcaacttcctcatctctttaatggattaaataataatgcacacctgatcattaatgttggatgaattatgtaagataatatatgtagaataattatttttgtgcttatacatagtaactacccagtaaatgatggctgccactgccctcgttattggattctgtagttgtcattgtacctattaagagggacaaagttgtaatgtaaaccttttgaactctttccactaattccattttatttcctttctggattttttactaaaatccagtaggctatttgtagctattgcatttactgcataatagaaaatgaccttatrtgatatcctttgttgtagtgaaacccttgtggaagatgaagaagatctctatgactgtgtttatggggaagatgaaggtggagaagtctatgaggacttaatgaaggcagaggaagcacatcagcccgtaggacttttacttgtttttaaagttactctgaatattttattaggaaagrctaattaacataataatttatgtaacatctgctgggattttttttaacstttgcttgcttataactatataattatgacttgttactgcatttggagacatatgcatgacctttcagagttcaaaacaaccatagggaatcttttgtctagtcttttcatttcgctartaaggaaacaaagtctgagagagaaatgaagtgccacccagttaaataatggcagggtggtagtagaatagaattttagggaatcatgaaattatactcttataaaagtaaatttcttacaacacaggtaaatttttccctttaaatttgatataagataaaatatatattaaagagtatttcttcacatttgttaagtgttaatatgaggtaccatttttcttttgtttcatggtaagtctcctggctttcctactcatttataaatttagtttcagatattgtcatagccaatatgagccctcaaaaccttatctgctattartatatccagaacattcagaaaggattactttggattattttctcatttacaatttgaaacarcaacagaaaaagtcagttgcttaggttcttaataactttttcttgtatattaaagacttttctttaccagctgcttggtaatttttgtttccacagtgctttgatgaatgcgcttagctctctctatgttcctactgttaataaaaggctgatgggctgtccagtagcttctgtggaatggaaacaagttacctgcctgtgtttgaggaatataacgcaagtgtggtttaaccattgcataggctgacagcccatctgtggcagcattttcagaacatttttaggtgaccgaatatcatctgtgcctcctgtaattgttaactgcattgagtgctagtgcattcttcactgtctcccgcaagggcagtcctcactcagctgatggggtgaacagtgataataatttagatgggtaggactcttcttgcgcacttggaaaagtgctaagtgctttatactgtttatcttatttaccattccttggggttggtactgtaattctctctgtttgacagataagaaaactgagtcagagaaatttagtgattcattcacagttagaaaagctaacaacaggccgggcgcggtagctcgcgcttgtaatcccagcactctgagaggccgaggcaggcagatcatgaggtcaggagatcaagaccatcctggctaacacggtgaaacctcgtctctactaaaaaacacaaaaaattagctgggcgtggcggcgggcacctgtagtcacagctacttgggaagctgaggcaggagaatggcgtgaacccaggaggcagaggttgcagtgagccgagatcgcgccactgctgtccagcctgggcgacagagcgagactctgactcaaaaaaaaaaaaaaaaagctgacaagaaaactggtgttgaasccaattccatcagattccagaatctttgattttagtgttgtgctctatgacttccaatcttaaatacttagttaaaaagtcaagcagtaagatgttaatgttggaaaaaatatttgaaggtctttacttactttgccaaatacctttttattgtttttgcagttatttctatagtatttgttaagtgygctgtacattaaggaaataatcatacaccatttatggtgtttccaactttatgaacattttagtaagagatattttagagtgtctacattcagaggcttattttttaatcatctaaatctttgtcattacattgttcacgatttttataaaaacagcaaagatgcctcacaaatgcagttagatgtctttcaattatgtgttgtattagaaaggaaagtttaagaaagtcagcaatgcttttgatctctacttccygataggttaatatatgattttattaaatcattttattttgataattctaactgcagaaatgtccagaaaatgatatacgaagttgttgtctagcagaaattaagcagacagaagaaaaatatacagaaactttggagtcaatagaaaargtaagtcatcaggtattatttttgatgcccaaatactgcctaatatagttaatatattagactcactgtttcttctgaaggtgtgtatgtgtattataatttttaggagaactttgtacttaaagatctcaaagcagatttattcattttacaactatttatggatgtcttagtacctgagtggcactgtttcagggactaaggatatagtaataaatacaacagtattctgattctcatgacactttttcccatgggaggattagaatgtaagcaaataaatatgccagatggtcataagttttctgaagaaaaataaggcaggggcataagatagagagtgatggggggggagggctggtggcattttataaagagtggtagcagaagccctctgtgacaagattaagtgggcagctaagtgaactgagggtataagccgtgtacatatgccaatgaagatcattcccgagagagcccctctgattggaaagtgttcagcatgtgcttcaagggcagcagcagtccagtgtggctggagcagaatgagggaaggggactgagcatgaggtgggagagctggtgggcttctaggccatgcgaggacattgggaagggttgtgagcagaagtgacatgatgtgatttaagtctttaacctctcattctggctcttctgaggcaagagtggtaactaagagaagaattagaagaaaattgtgttaatcgagatgacaaaaatggtggtataggtggtcagattctgagtaaattttaaacatagaaccaaccggattggatgatsaattaagtaaaggatgtgaaaaaaagagaggagtcaaggatgactgtaggttttggcatgagaaactgcatgaatggtgaagattacaggggtggggaaggacaggcttgggaatcaggagtctgttggaacaagtgaaatttgtgatacctattagactttgaatgggatttgttgagaaaggtgttaggtatatgaatcaggcattaaggggraagactgaattgacaaatagattgggccattatcatcacacaatggcattaaggccctgggactaagtgagatcaccctagtgaatgcatgttagggaagaggtttgaggccagctctccagactctcacatttagaggttagggaaagaagtgaaagtatgcaagcattatttagaagagtagaagagtagattgactagggaactgtagtagcactatgtagcgttacaggcccagttgagttttgtggtcatattgaaaattagacgatcggtaatgtccatgcttaacttcttagatagagtcacaaaatatgtggcaagttagacttgatcagggtgtttgtttttctagaaaagcacaatggaagaagagaaggtaaggggatttacagggaagtgattcatggagtataaactcggttaggagggaaatgaggatatgatggaggtgggatggttagtggactggctgacccaattccttgaaattagtgctatgaagcatatgaagttgttgataatgacaaggtctgtgagtatggccataagatttaggagttgagctagagtggagcacaagattatttgtggtcaaggaactgagagaccagtactagaaggatcctctgcacagatactgagaatgccgagaatgaaagagatatggtaggccagaaactaaaattctcaaggaataattcataaattgcatacatagattattgatctcagggatctagaatctccacaaaacatttgggagatattactgtgtaagtcttcatatacatctccaaaatgttgccattttttggcaactcagacaataatgttcttttcttccttccttttggaagcatttattgtctaaaccattttattttatactttaaatgtattaatattagctcgtatttatgtttttatatatctattcaagtgtaaagtctttaagttagagaaaatagtttctacaattttggtgtttataatgctgatcaacaattgactttcaaaacgtatttgttgtttgttgatgaaaaactattatatagattaggacaagttatacttaattactattttcttcttctttcctggtagtatttcatggcaccactaaaaagatttctgacagcagcagaatttgattcagtattcatcaacattcctgtgagtaaaaatatgctagctaaaattgtggtgtacttcaataaaatcttcatttccttagggggttccagatccctattttaatactcttttgtattatttaagaatattggccttatttatttattttttgcttttccagtttttatatccttattttcttgaaataactgatgtatcatatcttcaaccaaaagtcagtcaacatgtacgaagaacacaaatggaaaaataactttcatgtgttattcttaactctttgtcatgaagaggtagtctcaaataatctggggatccacttccatccccacacttccctgcggagctctgttgctcttccagaccctcagaccttgtcttgtaggtgatgtcctcaccatatcagtttcccctactttcctccattcctccacatctttgacttctactatttggtgctttctacttccagttgtatcatatgtaactcccatttatgaaataccctacttccttatgatttaccagactattttaattgtaaaatttgaggagatatttttcgtttacatttatgtaagcatttcaagtttcagggcaccttaccagaatcttacaatcttaaaaggatatttgcccagaaatctagaagcaagctaaatgtcatgccaagtgaggtaatgctaggcaagattcaagttctcagacctctaggacttgctttggtttatacatccccacccccatgcacgcatgtacacatacactgataaatgtatataagcttttatkcacagacctgcttgtattacctgaacagttctttgtgttttgattctattgtgttctgtgttgctgartagcagttggtaagcaatggcatgtcatccttgtccctgattttggccgaatgaggacattcttgttgatttataacatgcacaatatcagctgaaggtttagcactaaataaactgcacatttggggaagataaggatcttgaaccacttaagtatggtctttataacttagagcccacatcttcatgtttactttctacaccactaaggagagagcatgctgtggagtcaatgtgtgctccaaggtacacaggatgagataatgggagaattggcacctagttcaagttgcctcatatcctggctatgacatgtatttactgcctgactgaaaattagttgcttatcgggaaaaatgtgaaattctgacattttgagttgctctggtaaactgtcgaatacaatttatttgctccttatttatgccattagttgcctgatttcaagtaatttagtctgattattgttagcttagcaccaggacaccactaattgaccaaagtacaaatttacatgtttgtgtcacaaggacatgagtcattattttatcctgtcaataaaacattaggcacttggacagttttatttaaaaaatttacagtgattataaaacaaaaataagctatacatatttttacacaaggaataaattatcctttaataactagtgagataatttcttttttcacaggatgctgacatttcaactgagatctgaaattgctgtttcccatctgcatggcctgtctccttctcttctcctccctctcctctgccttccccttatcttccttcttttttctcctttccttcccctgctctccctcctcctcttctaccctgtcctctcccgctgcttcctccccttcctccccctttctctccccactctccttttccctctctctttattggtggaagcagttttatatattgagagcattcagcatatcctgagtggcaagtctagcaactaaaaggattctgggtttggggtgtattttttggttgttattcctactttcctttcacattgttttcttttcttaggaacttgtaaaacttcatcggaacctaatgcaagagattcatgattccattgtaaataaaaatgaccagaacttgtaccaagtttttattaactacaaggaaaggtaacttttgaagtttaagttttgtgggtcttagcttgtaattatagtgaggattagtattaaaatagctaacaaatagctattactgctgtttattacattactacctgagcagtaattagaaygtgggacaattactttcagagtagtagtttgagttctatatatgtaattaaaaaagaaaaaaagaagaagaagaaggaggagggggaaggacccagtatggtgcttatttttttgcatcgcaaatcaaaaggctaagtttcttttacaggctttatcattactgagcgatgtaatcttcagtaagtcattttaactctctgagcctctgtgtccccatctgtaaacaccggaggtagattagctggtacttaatgcttcttccacttttcttccaattctggtattttatgacactctattttggagtattagattcgcagagtcagtttccctttctaagttaaaaaaaaatctcctgacaacctataggaattggagtatcaagaaattttgcttaaaatataattatctctcttttcaaatcaagcaacgtatttcctagtactaagaagtggctaatgaattactttgcatcaagtcttcgataaatattcacattttattagtagtgtcttttttccagtggagagttaagagaagcaataaaccaactgacctctttgcaaaatatttgtgctacagagataccttccctgaagtgggtcagattccatgtgatatgagttatcttctgtccagaacagttcaggtctctcgttttcctctcttcagatgatttatgttccttaattaaaaagtagcaaggagtaagaggtttaataatgaaggagttatatgtagtgattggcataaaattgtaatagagaaaactttctgagtgtttagagacaaagtttatctcttgtaagagctttaacagaaatttttaattttgtttttggaatgcatttatgtctactcaaataacattaacagtcatcaagccagtttgtaaattctgcctgctataaaaatttacatagaattaatctcattcaaagttggaactacaaattagtcattactataaaaatgagtgacccttattctatgactgtgtatgtggtatgtattaaaaataatttctactgctattttggttatccctaacaatggttttaaagagatgaagattctgcttgtttccccctccagttcattcttggtttttgtcttagagatttcttgtcttttttccctttcagattggttatttacgggcagtactgcagtggagtggagtcagccatctctagtttagactacatttctaagwcaaaagaagatgtcaaactgaaattagaggtgcctatttatttttagtttatgacataaagcaaaataaacctaaaagcaatgtrttcctstttatgatcagtgaagcagtacatttcccattattttaaatataatttcatgtcaattttataaaatatttaaacagctctataaaatagtaatatggtagtaatagtaacagtcgttaaaaatctaacatttatggccctgtgttttacatgcattatctcattaggtccttctgactctgtgaaataggtacaattaattttctcatcttatgagaaagctgaagttcagagagattatgaataacttgcgtagatagtaagaagtgcaggacgagtgagatacgttagataatgtatatgtagattwaaaatgtttactagttagctgggcagggtggctcatgcctgtagttctagctacctgagaagttgaggccaaggagtatgcacttgagcccgagagtttgaagctgcagtgagctatggttgcaccattgcactccagccagggtggcaaagcaagaccctgtatcaaaaacaaaataaaaaagatgtttactaaaaatatgacatttagaatcagatgtattaaaaggccatgcatattgcccacaggaaggaagagaagacgaacacaaatatggtaggattaaataacatgtgataagcactgtataatagggctctgtaagactgaatctacccacttcagtgtgggtagattgtagaggattcatctgaagaggcagcatttgagttaggtcaccaaagaatgggatgagctttgacagatgagattctatggagagcattcctgaacaattggtatgtattgaccagaacagttgggaaagtttgagaggtggcacgtaggccgatataaacagagtgcatgatcacaacagtatataagtctagaaacctaggttaagtcstgtttttttgtacatcatgtttttttttttgttttgttttttgttttttgttttttttttcctgaagaggagttcgaggacttcatgctttcaaagaacttttgaacaatgtttgttgtatcagtcactgtattatccatgtattttgaattttattaaatttcaggtagagatatatagccagctcttaaatttaacagcgtgtggcttatwtgcctgtttaatatcccttttccttttctttgttcagtgtagcactgaggtcaggggagaaggggcaggtgattttcaaatcagaagcccttcactgttttgcctctctggcatgatttcatagctcacaactcccacaaagggaaactattgcttagacagtttgcacgttaacaggccaccaagtaactgtactagatacgtgatstttttgctttatatcttaatattccttcattatgttgactttaagactggaggtagtttgagtcacccctaaataacatccttgtaacattgttagtgcaaagacttcctgctcctctttgcagaatagagcctcctaagtgtagagctgggagccactgtgactcaaaatatgatgataaaattaaattttacaacttatacacctacttcctagtagggcaacattaaagcagtttttcttaaaataaagatataaaattgtgctcccagatagtagtcagcaagttgtcaatcacacctccattatattctcagtcttgtttgagtgttgttcttccttctttcagagttattgtcaaagttttgcccaatgaccatactctgggactctaagtatgtagtttttgcagtcaatgctcgacttagggaaagagaggacatcaggctgagtttgaaaggcacagggtgaggtgcccctgctgtcctttcttcagcttaaaagcccacacttctaaccatagtcctgatttggaagtattaagtcggatacttagtgtaacacttcaacaaatactcagtgggagctgcgtgccgcaagccccagcatgatagaaggaaaactaccttattcttggtgtctttctgccttctttgtgtcttctgttttgtggttatttttgttcttgttgagttttttgtctttttcttctctactttggaaccaagataacatggggtgaagggcgatgaatctctttatcttgccctatcagcctggctcatcctacctcattttattttccattacaattgaattgaggctaagcaagtgactggatgttttggaaggattctttctacccattatttactttcaacacgaataagcattttacatttgagtctctatctcccaggtgtagctaattccagcaatgttggtttctttacttcctgagcctgtaacttagaatgtaaaggaactgactttttttcttcaacattttgaaactaatttccataatatagtgaattttaaatatataatatttctgttcctaccactgtgttgggatggcataacataagaaatataagctacaaccttaattccaagggccttaaaatgcagcagaggagataagacctactaattatagtaatattaacaatgtaacttyctgtttgagacccatgatccagagctctctacaatctgtagaagtaagaaactggttgaaatagttatccttctaatgaactgcagtaattgatgacacagctagcatgtcaggatgtgtccccaattcattttgactgatagctgtagacaracatactcattaagtcacggatcattagagttaatggtgtttttttggagctcctcataatatatcattccatgtgccagaaaaactaagtgtgggcaaagaagaaacaaacttgtgagcaamagtgtattttcttaagcacaactccgtctatgaactggaaaggtccttgtgctgggatgtgcaattgtgtcaggattttggacttatgaggttgctcactaataataatatttgtatggccctttttttttttttttttgaagaacaccatagttacgtgagaaacagtaaaatcagaaaagtgacttgtccaaggtcacaccgccaacagttgccaaatcttggctttaagttcattctttgacacttcaaagtaatttactcaaagtcataattattatcaaaagaacaaaccagtcaatactattttaaaataaacctttaggaaagaagagggtgaaattaaatacaatccaaggcttctaaatcttggagtttagtagtaggtttatacttgagcaaagttttaaagtcaaatattccatttcattcagttcagtaaatacttattaagcaaatactacattcttaggggcatacagcacaaatcatattggagtagatattacatatgataataattaaaagacccacaagacagagagagagtacacccaattgtgattgtaattgttaygaaaggcctaggattgtagttcttaaacaggaagatgtattttgctggaggctggacaaagcacatcatagttgagggaactgaataaaccatagttgagggtgggaagactattgacacttttgatgagtagggatgtgttcttgatgcctgttctataagtccactgggggaaattggtgggaagtacagcgataaagataaactgaagaagaccctggggggccatgattttgcactagagaaaataattttctttttcttttttcttttttttttttttttgagacggagtctcactctgtcacccaggctggagtgcagtgacaccatctcagctcactgcaagctccgcctccygggttcactccattctcctgcctcagccttctgagtagctgggactacaggcacctgccaccatgaccggctaattttgtttttgtattttcagtagagatggggtttcaccatgttagccaggatggtcttgatctcctgaccttgtgatctgcccgcctcggcctcccaaagtgctgggattacaggcgtgagccaccgcgcccggccaagaaaataattttcatacacaaaatagttctcttttattcatrtttagagttaaagtactacaagatttgtttttttaaattgaagatactttctgttatttacagagaaggattgttaaggaaacaaacgcactcatttattgtataataactgttctgcctagggcctttgcatcttttaatgtttatgactccctaacaaagtgtttttaaaacatttcattaggaatgttccaaaagagcaaataatgggaaatttactcttcgagacttgcttgtggttcctatgcaacgtgttttaaagtaccaccttctcctccaggtatgtaacttaaaacagtttatttattgtccatttattcactcaacaaaataytaatgaagcatcaactacattgcagatattccatgtgttgggcccaatccccttaaaattttgaattattattatagttaagtgggaaataacagaacagctggacattttttcttccttttagcagagatggtcagtagctgccataaatcacattttgtgtccttaaaacaggactgcctagaaaataattaaaaacaagtcaaaacaaataaaaatattttttcaaccaagtcttctgtagttatcagtatttatttatgagcacctcaatattgcagtgcacttgaattttggcagattaatcatattagacctcttcccttgtaacagtaagccaaagagaattgtgtgacattccatattgctttctactatactaaattataataagactacatttattttgaagtgattcttgttatagcccacaaagctatggtttccacggttagtcttctaaatgagggtggagagtcttataaatttaatttgatagctataccaggagactcattagttctgctccaaagaaatgtcttagtgtattagtctgtcaactctgctgatgcttgtgaaatgtcattttaaaaagatctactacctgtatgtgaaatacaattttgcgtcggctgtgctttgtatatcttgtatattaaatttcttgaactgtagctgcaaaattattagtcatctctatttttgttctactgagaaatcagaaaaattcaaaccctgattattccttaaaaatgcattaaaacatttatgagacctaaactcaaagcaacttagtcaaattggattttatgaaaaaataataaggacgactcaggcaatcagtttccaaggcatcctggaactaaatacatgtccaaaataaggtaataatttattttgtaactttggtgtagtcaagtatcgattgaagaatttagaaggtacagctttttaaaaaaatacctattttggtccttacagggttttacacagacttataaaagtataaaatacaactatacttttttgaaatttagtaaactgttccccctaatttcccttgggttgttttatatttaaaattttaagagtatgtttagttccatgatgactttttaaaatagggaaagttttatttggatactacacataggtaaaaattctagaaatgtttttccctctcaaaattctatggagtaaaatttatttgttgtctagaaatttgttgaacaaatgtggttatcagtttagacttttttacttactactatactttagtggcgaaatcacttgaaatgcttgatgatttgaaaccacagattcacaaagtgagaatattttatagtgggtgattkggaactttaataacatgacttttatttaatgaagtaaaagtaacttttaaggaataaaagaatagaatttttatggatttattatacttaatagattctgtctttaagttcttgtttatagcagaaacactggtagtattggattcattaaagatttttgtatggcttctctgtgccaaacatagtattaggcactcgtgatatacgacagaccctactcggataaagctcataatttagaaaggaaaaatgaagtataagctgccaagtataacacaatatgataggtacatgtaaggtacagaaccagcacagttaaaggcctaaataattatgtatagggaagctggggacctgagtagaggcctctgtcatagaagactccccagaggagtaactcttgagttgggctttaaaggaagagtaaggggtcaataagtagatcagaggggaagagctttgtaagcagaaaaaataatatttctaatgggattagatattagaacataatttaagaattgcaattaatttagtatgaatagaatataagttgtctgggtgaaagtggagggagaaattgagagaagtttgcagaattcagatcatgaggagtctaggaggtatgggtgacaacctgaagcttttgtggggcatcacagaagtctgagtagggtagagacaggatctgatttatattatagaaacctacccctgatgacaatagagtgactggactgtagtgaggagagactgcaagtcagaaggccgatcagaagctcattatgattacctggttttgttgttttttgttttaagagagggtctttctctgttgcccaagctagagtgcaatggtgtagtcatggctcactgcagttgggctcaagctgtcttcctgccttagcctcccaagtagctgagactacaggctcatgccaccttgcccagctaatttttaatttttttttgtagagatggggtcttgtcatgttgcccaggctgatctcaaattcctggactcaagtgatcctcccatctcagcctggaaatgtgctgggattacaggtgtgagtcaccatgcttggcaaataattatctgtttgaaaaacgtgaggatctgaacctaattagtggcaatgaggatggttccaagggggcaggatcaaagttaacatcaataggacatagtgagggagagagaacagggagaagtctgggacaccttttaggttttggcttaagtgatgacactgatggaagtgccatcattcaataaaacagaaataggatccaagaataggattctgggtgaagattgattaagtttggggaatgttggatttgaggggactttgaaataatgaggtagaaccatttagttggacggatgagtccgggactcgtgtgaattttgggttgagcacatacrtttcacagtaattggcccatgaggtgatagttgacattrtgacagtggttgtgatagaatttgtagagtatgtaaaatcaggggaaaaaagaggactagggtgaaaacttaaggaacaataactttctaagaagcagataaagaagaaactatgaaagactgaggaggaggcagaaatttaggatggacagatgaacaattttaacagcaataacaacaacaaatagaacatcctgatgtccctgaaatgaaaggagggatgcagttaaaagaatcaaaagctgaagccaagaataataaatgagtaaaaagtgtgattttaatcattatggaatctttcataacaatagggatcaatgtcagtgtaatggtggtggatagaattcagattcatctttgaaaagaaaatatctcatattgtgtctcrtgattttttggtgtctagttggtcttcttacagtttgaaatttttgatggaaatggagcccagacatattagatttatcacattatagagagaaaaccaataataatggtttatttgtaaaaatgttttctttagtatgtcttagttttaatttgatgaaagtagtrctaaaccatatcttccaaataggaactggtcaaacataccactgatccgactgagaaggcaaatctgaaactggctcttgatgccatgaaggtagggcagattcatcagtaatttgtttgtattttttattcttgcctaaagacaatggaattcaaattgcatwyycacacacacacacacacacacacacacacacatatacacacatatatatacacaaacatatatatatacacataaataaaatattatgacatgcctatgtataatacacatttgtttttagtggagaaaactggatttttttttttttactggaatagttatccttgcatggatttaattgttagacaacgcataaaactaagaagtatattaaaatcacttagatacaagtataaaaactttcataaccatggggaattatttaatatcatatttttttcccattcttttcatggtgactaatagaaaacgttggcttgtgtaagtcgtaggccagctggtggcttcagaaccccatgtaacttattttcctcatatgaggatatctgctaggtttacccttgtggatgctatggcttcatacaagtgaatttcagtttgttcagttttcaggaaaatacgaaaattatgaatagaaaagacagacattttgaacatactggggaatatgtaaaacctcagtttccacattatgttaaataaaaatgactttgaaacgaaataatatttgccaataacttaaagcgtaggcaaatatttgttctttaaaacaaaatggcaaggtgaccctgctcagagcagtgcataattacttaactgtgtccttgtaccaattcgtgttagcttcgctgtttggctgattgtctaccactaacaggaaacaccacataattatttattattattattaaaaagtcaaaccaagttccaaattttaaagaagtcgtttatggatctatcctatgaaaagtcagacttccatttagaacaaagttaggaactgctttttgcagagttctgtccctactgttgcagatgaatttaagagggtagagaaaaaagaaaaagagctcagaaaacaggaaaatctggagcacatgtaacaaaaatagctagttacagtatggaaagattagctaatgtttcctcaaatatgagaaaagacattttaaaataggtgaaggcacatggaaagacacggccagcattttatgttcactttaattcatgaattaaatttagttccagcatgttgtgctatttagttcctcacctctcctttacttctcctgaatccataaacgggttaactctttaaaattgaaccggtttccttgaccgaatgctctcaggaaccaagaagactagccgattgcaaaaataaaacagtcttgctagattcattatctaacttttggttacttttctcatgctaatcgttcatgattgcccttcttctaacctgtgtaaaaatatcatgctctcaaggtcagtaattaacgtgcttggaatttctattcttccgacctagttttctttttgttgctctattgtggtatattttgttttgtcttttaaggcaacaacatcctgactcttctcagtggtgtgacaaatgacagctcttcagtcttcccagctgtacttcagacattttaaaattgcctctgtgatgcagctttgattgactgggcattcattttactgtctttgaaaagttacagtggttacttttaccactaatggaattaatgatgtgttttctttcaaagcagtttgcatctctaatcttagtgtgccttctttttctacccttttctttattgtctaggacttggcacaatatgtgaatgaagtgaaaagagataatgagacccttcrtgaaattaaacagtttcagctatctatagagaatttggtatgtaattatctttccatccagcttcccctcacccccacatcaacsacattctaggagttgttgttgaagaaaacatagtttaccttcaagtttctactgttggaggttgttgccagtccctttgtttggcagtgttcatgtgggtgtctgagggcacctgcaacctgcttgtgtctagggactttgtgatggcttgtccctcttaccttagtcacactctgcctcttctcccagcagtctgaatctaaatataggagtccactttttttttcttttctttccctcatccccctacatactcatggctgattcctattcatttattcattttacatatatttgctgtgtgactattatgacccagacactttgcttggggctgggactgtaactgtgaacaagatggtctcaagattgaggagacagtttaaaaaaaaaagagttaaaaatgccatattgagattagtgctgtgaactggctgctataactgaggattacaaggggagtcctagtttagataagttggttggaaaaagtccttttaagtcatttgaactgagacctagcagataagaagcagccagccacaygaagatctaggggaaagtgacccaggcagaagccgtagcaggtgaaatgctcagagttgggcaagaaccaggtgtattcaagaagctgaaaggtaagagtggctggaaatggagagtgaagggaaggatggtgggctctgagccatgaggaatgggcagggcaattacataacacagccttgtaggccaatatgctgaattgggattttattgtgactgcagtgggaagctattaaaaggtttctatcagggagtattacaacagactgattgacatttcaagaagaccctgtragcaggcagcccagccagcaagctgttgaagtggtttcaagagaggatgcagccctggattaatctgtgggcagtgcaaatagagatgagtgaatttaagatacatttttggtagagcagtttcatcgctgctttctctgaaacattgtgaacctgtctctttcttttcacacatgcagccacatacccatttcaggacaccatcatctgccagttttccagtcacagtagcctctcatcatctcttcatatagttgcatttccaaaatgtggatttctcaatttactctctttctcaaatttgtcaagatttttttgttgttgtcttcaagattcagtcaatattccttggcatgatatttaaggtcctcagtgatctggacttaagctattttcctgaacccctccagctaataactgcccgtaaactttacattgtggatattttgctgtattacaaggtctccaatttgacatacgtttctacagttctgccttcaattgtaatctcagagcctagaatgtttttttcctattccctatcaaatttattcaaggtgcatctaaaataaatcccttttcctaatctcctattatttttcctctttagaattccatagcatatttcttggacagctgtgtagcctttaaamaattgtggtaaaatatatatagcattggccgggtgtggtggctcacacatgtaatcccagcactttgggaggccgaggcgggcagatcacctgaggtcaggagtttaagaccagactgaccaacatggtgaaaccccgtgtctactaaaaatacaaaaactagccaggcatggtggcacgtgcctgtagtcccagctactggggaggctgaggcaggagaattgcttgaacccaggaggcggaggctgcagtgaaccgagatcatgccactgcactgcagcctaggcaacagagcgagactctgactctgtctcaaaaaaaaaagtgtgtgtgtgtrtrtrtrtatatatatatatacgtatatatatatatgtgtgtatatatatgtgtgtatatatatacacacacacatacatacacacacacattaatgctataaatatatatagcattaatttgccattctaattattttcaaattagaagtgcattcatgatgttgtgtgaccgtctccaaaacttcatcttgcaaaactgaaactctgtactcattaaacatgaacttcccattcttctctttccctggcccctggaaactaccaatctactttctatctctgtaagcttaactactctgggcaccttatataagtgaaatcatacaatatttgccatttcatgactggctttttttacttagcataatgtcttcaaagttcatccttgtagtagtcatgtgtcaacattttatttttttgatttccatttgtttaaagctgaataatacatcattttatataaatacctcactgtttttcattgatgaacatttgggttgcttccttctttcagctattgtgaataatactgttatattattattgtcacaggtgtaccaatatctattcaagtgcctgctttcacttcttttagttatatacttggaagtggaattctgggttgtatggtcattatgttaatttattgaagaattgctataccattttccacagcagctgccccacttaactttcctactaccaatgcacaagggtttcagtttttccacatccttaccaacactcactattcggtttgtttgggtaacagccatcttaatggttttaaagcaatatctcatcgtgggtttgatttgcattttcttaatgactaatgatgttgaatattgtctytgtgtgtttgctggccatttgtatattctctttggaaaaatgcctattcaaatgctttgcccatttttgaatcaagttgttttttgtctttgtgttgtagaagctctttatttgtatcccagatatcaatcccttataagacatatggtttgcaaatacttttcttgtgtctgttggcttttcactctgttgatattgtctgtgaggcacaaaagtttttaattttgacaaagtcccatttatcaatctcraagaaataattgctgaatctattgtcataaagtttttccccattttcttgtaaaagttttatagttttaactgttatgtttgggtatttgaaacatttttagttattctttatttatggtgtaaggtaatgaagggtctacctttattcttttacatgtggatatccagttttcccagcaccatttgttgaaaaggctattctttccctatttaatggtgttaaccttgttggaaatcatttgaccatatatgtgaggacttatttctgggctctctactattctgttggtctatatacctgtttgtatgccagtgccgcatgattttgattattgtggctttgcaataarttttggaaacaagtcagtaagtatgagacttccagctttgttccttttcaagattgttttgactattcagaatcccttgagattccataagaattttagaatggaattttctatttgtgcagaaaacatcactgggattttgataagatacatttatttttatatttatagtgttaatcacacatctctgccctttattaaaatggaatttctgaaygttagtgattttcagtcaattcttttttcctctagcgtgtacagtaagtgttcataaacacttaaaaataatttagttatcagcctctgggaaaatagctcaytattttaaataattaactcagagcttttcgtccttgaggtcctagctcaagaaagccagcctggactttatagaccaaattagcgcgcgcccccccgcccctttctgtactccttcatggcaattgtgcgtttgtaattgcatgcttctgtgaatatttgttcctccactgggcagtgtgcttcatgagggcagtgtctgtatcattttgccgtacacctgttatggtggttggcacgtagtagatgctcaaaaaataytaattgccgaaccgtctcgtaatttggacccttccggttgagtctttcttttcatagctaatttcccctttaagaatatatactaattaaaatcaattgatgtccttgacataccccctgggattacagaggacagacttatttgtcatgtagacctgagctttttagagtaagtatgctttaaaagtataaaaaatggtaacattttaatgtaataaggtagttgtcttgagtwaatatctctactaatatttgttttyattttcatgtgattatgaaaaactctgacatgtgcattttatattttagaaccaaccagttttgctttttggacgacctcagggagatggtgaaattcgaataaccactctagacaagcataccaaacaagaaaggtaagaaaagaagaatactattttcaaaataagtaattagtgtcagaaaactgagaaaaccttaaagacaatttttccagtgtgaagtagggggaaaaaaggaagaaatacaaggagacagaccaacccatgatttctaaattttttaaatctagattatcttaggtattcccacctgggttctggtatctattagtttgtctaagttattaagaaggaagtaacaagtatagatgatcagctaggatacattaaaatgagaagagcgataaagtaagaacagataactaccataaaaacataattgaatttttggaatatatttttaaataaccaaaaataatagaaaaatgccctaagaaagaagattaagtgagaatcacgtagtaatattttcttgagggaaatttgcagatgtagttcttgaagattagtaagcttggcccggagtccttaattatgtatatatgtaatcatcaaacagaggtttttgtggttgacaatgattgttttctggaatctttggagaagcgaaagccagtagggggcagcatcagctcttgcttcttcctcgataaccctggctccataggtcctttaaacctctctgggagaaatagacgttaaaagtgatgcaagtgttacagccctgtgaatgtgtcattatcattgtgtataaaaaaaatgtgtgttaatcactgagagtttataaaaatacacaagtattggtattggatgatgtggttataaggtttattttctcccccaagttacgttgttcttaataagaaaaaagaaatattaacatggaaatttcaccataacgttttcagtttacacttggctcatataccattcagtttgggtttttaggtggccaattaaatcatgaggaacaatatagagggtaaaagcacagtttccaaaattagacctgtttgtgaatcctgttacatgcctcactagcagtgtgatcttgagcaaattatctaacttctctaagcctcagtttcctcctcaataaaatgaagatggcaatgataccttcccagcatgtggtcttggggatttaaattgagtcatgtttgtgaaagggatgaacacttctcaaggcattctggctgattcctagtaacttcagtagaagctgctacggatgtcattaatattattctataggtttttagcttttaaattaaaaaagataattgctcatgaacaaactttatggcttatctcacttggccctttcaacaactctgcagtgtgcattttactcttactatgatttttgcccatttttaaaatgagggaaccaaagcacactgaggccatttacaaggtaaagggaaattccacacacagttcttataacctcaaataccccgttgttttcagtgtatgatactacctgttgtctttaatgcaaagaaaaaaacatttggttgctttatacccaaaaaaattaataacccatgyttctaaaccatttaaaatcaatcaatcaatctctttttcccaggcatatcttcttatttgatttggcagtgatcgtatgtaagagaaaaggtgataactatgaaatgaaggaaataatagatcttcagcagtacaagatagccaataatcctacaaccgataaagaaaacaaaaaggtgactttttggaaactaataactgtaatttacttataatcttgaacattaaggaaaagtatgataatacrttaatgtgagatatggcttatcaatccagatgtttttgtttctagagattgattaggtacataactttgtgagaaataactggataatgccacagccagatctgatcatttctaatgccctaatgatccagataataaaacgcatttggcatagaaattgttatagatatgaagttgactacaataagcttgattgttcagtttgtacattgataatattgtgaggagtttttggatagttgtggtattcttgtgaatttagaaacatgttattaatgatacatattaatctaaggaatattaattttaacagtggtcttatggcttctacctcatccatacccaaggacaaaatgggttagaattttattgcaaaacaaaagatttaaagaagaaatggctagaacagtttgaaatggctttgtgagtatttctatttttaaaagtgcttttatttttactagttaaatcacttatgaataatgaacaaccaataagtgtactctaatgcttgtagcatgtataatgtgtacagcgacgggaatgtttttgctgtgagcaggagtgctactaggctgctggctgcttgataactttggtctcctaggagaggagttttgttgaattccttcaaaaagaagaaagagggagctctaatcttctgtttgactttcttataggcatgttttagttctttagctctcagcagcccaagaaaatattaattattctaatgataaactttttatgtaataactatatttttaaattatatacctttaaatagaaatgcctccaagtgtacatacacaaacagatatgtaaatgcatatatcttatttttaatagaaagattgaattattctgttttaactcgcttatttgaatcttggctaaaatgcttcgtgtatttaaggaatgctttaagggcttgatttctttaagtggcttttagttccrctgaggaggaagctcaacaaagaggtagaaaataaatcaaccctgtttcaaaaggaatggcattctgagacgtaataaccaagaacaggtcattataggtgtttctttttagttttgatgtttaaggattgaaaggtacacaatgaccctttttgtagaaatatataggataccctgaaataaaactgttagcaaaaggggaaattaaggaaaactacatttggaatttgtttcatttgggttctaagattatataccatttgttgacaaattctgtcagttttttttctttgttttaagaaatgctcatgttaatgtaaactagaggtaggaataggatgttttattgtggttctgaaattaggaaaataaagattctcaaggttattttatctaacattttaagagacaggattctatagccaaactatttacgcttataaagattatttaccagttgttgacaaattctatcaattttttttccttgttttaagaaatgctcgtgttaatgtaaactagaggtgggagtaggatgttttattgtggttctgaaattaggaaaataaagattctcaggattattttatctaatattttgaagacaggattatatagccaaaatatttaagcttatagtcaattctgggttcatctattatcactgccatkaactggctgcataatgaaagctaagttatttaacctctcacagcctcagtttcctcatctgtaaaataggaatgatatttatttcaaattctaggtaatatgtatcagcagagagctagccaaatagtrcaatagcagctacagctatgtgatattgaacaataggtgatacctattattattgctattattattaataataattgcatttgggattctagtatacttacaagacttataaaactacataacatattctagtatactattttttctttttaggaagtcacttggagttaaacaatttgaattggagtgataggatgattgggttagtggtaatatgcaaagacagagctgatctcgagcctttgctcttatatgctaggcttttttttttatgggtttcgtttggctrtataatcttcagatgagtgaaggaatgtctgcagagaaggaaattgaatttcatgtcctagagcaggcaggttccttggactgtatgacaggcatgtcagttactattttgttcagttgccataaaacaaacagttaatttgtggatatgagagacttgatggccaggtgtgatggttcatgcctgtaatcccagcactttgggaggctgaggtgggcrattcacctgaggtcaggagttcgagatcagcctggccaacatagtgataccccatctctactagaaatacaaaaattagccgggtgtggtggcacatgcctgtcgtcccagctactcgcaagactgaagcaggagaattgtttgaacctgagaggcggaggttgcagtgagctgagattgtgccactgcactccagcctgggtactagactgagactccgtcttgaaaaaaaaaaaaaagagatttgacaagataaatactattgtcagcatttgacttctctccttaagagtggttaccttgtagtctgagatagctgctagagctctaggtataaaatttatgttctaggtagcagaaagtaatcccacttttatggattccttgtagaaataccactcgcttctgttacataatactgaccaacgtatagtcatgtggccgcacctgccgagggaggctggcaaataaaacctttattctaggtaggattcttcctggctaagaattaaggttcttttactatggaagaagggaggaatgggtagttgtaggcaaccagcagccaccgccttacaggtttatacatataggggtatgtacggatttaaattgttccaccacaataaggatggctgcagcacatgcacagaacctgggtttcttaatctttgattgttttccaagcatctcagcaataaaataacacaccagtagaagtagtttttgttgttttagagttccgttgaatgtctatgcagatattgggagggtagaagtatctttttggagaattgctcagagttgaagttgagggcttctataaataagggttatattatatatggtwaaataaaatctgagcaggcatcagaatattccattgttttatttccttcttctttgaagttcatcatgtaggaaagccctgataatgtctgcttccagctttgtaagacaggttttgcctgtctgatgctcataaaaatagaataatataggtaaatcctgaagtttgattttgcctatggttcaaattttgctgcttatccattattaaatctgtagtactcctttttgataagtcayrgagaataaaagaaaataactcctgcagcatccatgacaatgcatgaagaacagcaagccttgtgtatctccacaggatggcttcttcccagtgtctttagtatcaacacgagtcccttgagttcccctagagtgctctggactattgctttaaggaattctgaaaaggaaagggaggcattggtgagagggtggagggaaatcaagggagctgatatttttaagagtgttgaaatgcttgccatttctatttacagaagatggcaattctgtttataggatgattggatcatttttatttaaaattattgcaaatcactgttaaggcacttaaaatactatgttaagcctctaaattagggctcttaatttagaacattaaataaggccatggaaaagcatgaacactaatgaacagtaagtatctggtgaacataaatattctccccagaggtgacctaaatctcagcctctgtctctcgcagtcatgttctctgaccttctttggccataaccacttccagcatttaaaatatgcagtgaaccacattagaacctgacagacctccataggaaaggctgaacaaagagaaaagtagcagtgacccacttggatacggcaggaggattcccccccgcttttttttttgtgataagtggtagcaggactgatatgttcttgaggttgttggaaaagttattgagccaaatagaccaaatagagtgcaagggctgtagttctggggggcataatgtaaataatgtatttaaatctttaagaggctgatcgatatgcattgcttacttttatttattccaaaagggttttattttttttttgtcactaactgtctctcacaattccatttagtcatatgtgaaacaggacggcaaatggttttattgggttaaactggttttcataatcatgctggaaaatatggatataactgcctatagcaatgttcaaaattttgttaagaagctatggatatgttttccccaaatccaatatatccattgtgcttttatgaatttttctatgagatttaaattaataaaccttgtcatacccgttttgtagctcaggaaactagcagtcacaggagcatttgagcaaatgtgtacaagtttgatgctgtatcatttacagtacagttgaggatctcagttcacaggagtttctttatccataagggtgctaaagtaagcaactggactcagatcttggcatctaaaactggagtccaggttttttgtgttttttgtttttgttttctcactgtgaataggatctagcaatcagacagttttcttaaatgtcccaggaataagttaaacctgagtaaaaaataaagaagtataattgtatttaagttggtgcaaaaataattggggctttgccattacttttaatggcaaaaaatgtttgtttgtttttttaaaaaaagaaaagttagcaaaagaaaaggtaaaataagaggcataccataagcatcacatgtggtagaaacaggtagattcagaattagccttcatagtgttttttgaagggaaatgaaaggtcctcttgcctagaatttcttctgaccgaccttggcccagtttttgaaattctaacaattcwcatttacccccttgaatgaagaaagactctttgagatgcatatgccatcactactgygaatatctaagatttctcgactgtgtaataagtgcctggcacagttctacatggcttacctaagggaaaatagcatagaggtcaggcctgtctactgaaatattagcccaggatgtttatcttttaaacacaaggactaatggtagtgggacgaagagaatgagaatgggggatggagattctagagctctggagggactctgggaccaggatgyactatcctgttggtcatccggagcggcagcccctgcctgagctttgcatttcccagaatgagccctgagaggaccttcactgttgggatggagcagggagtgagaatgtagccgttaagctccrcaaatcacatttaatctgaggcacagtgtttctttctaatttattccccatctacttccagaaggaatttgaagtcactcacaataaaaagcacacatgctgcagaattaaaaagaaaaatttaaataatccgaggtcaaatagaacagtgtttccaagtattatcttcaaactcaggctccactagacaagaatattttcttgaagtttactttctgtagtttatatgataaaaacaaaaagcatgtttctcacatttcaaatctagagttatatttcatcaaacataatttgttttaatctaaagatattgctcagatattttgaataccagagagagaattaccagaggaaattttattcattctgcaaatatttatcgtgcacttgccttgttgccagacactgttggaagccctgggcaaataacaatgagggagmcattgcaattgaatttaagtattattatttctaaatataataatattctgttaatatataatggattaagtttcaggactgaactcttgatatttctattcaaatcatctcttcctttaaccccatttacttaaggatcaacatacagagtcccaagaattacgcttgatacagccccctctctccacttgtaatcaatctctcaccagtctctgcacatcaaatctgaatagctgcctgaactctcccttgccacccctggtttacgtcttctgcatgtctctttagctattccctacctcttcccaaccagtccttcttcacaagcatcagagtgatctgcccctcttagaaagctctgttgggtgtttattgtacttgctataacaccagagttttcgctaggatggaagaaggccctgactggttttatcccacccatctttccagccccatctcctatcagttttccctgtgcttgtttctttttttctagttagattgtgtgtttcagttcttagagaatgcccaggcctcagatattcacacataagctttccctgccaggcctggtctttcctcctgttctttgagtagctggttctatatcctgcaggtcttggctgtaaatgttactttgtgagggagatctctcctgacccctatgctaagtgagtaataccaccttttctatattctctcacaattgtatttatattgccagacaaaaattatccaagcatcctgtttactgccttctcttcatccaacaatccctctgcctgttagaatctgaggtcgtttcagttttacttctcttttctcctaaagaataaggattctgttttgtttattggaagggaagttaagttgaacctcatggttagagatgtgggaaaggggaaaagaaagcctcgtggatctgggaatggaaagaaagtattgggtttgtttggtgtgagtaaggctctgggatagctatggcatctgagagatttgagaaggggaaaaggccttttgagatgcaggtgtttggaatctcaatttatctttcctttatgttctttgaaatgctaagtaaagaatgaaattatcttttgtttattttggtgtacctttagtggcccaaggctgaactgtctgggcccatggaatatggggttgccattagatctgtttgcctatttaatgtctgtttcttgcatgagggcagggatcttgtccctgttgttcacatgcgtgatctttcatagcacagtatcatatttttgttgtaaatttgaaattttactctgtaagttttctgacaaccaagacaagtgggaaaaaaaaagacttgatgagttgtggcattcttattgtgtggcaaaatattacaacagccctttggaggagagagtttttcctgtatggtaagaaggctatatagtgtggatccttaggtaggagacattgaaaaacatgttctctaccagcagcattagattttttgatattcttgaagttgatgccatagatgagtatttctcttttatgtaagccttcaactatgtaattgcagttttgctaaggcatttttatagacacctaacctgatgctagcccttccagatgtttctttctagtagtctggcttgcttggataaaatttttggaaccaagcaggatgggcaattctcattttatctagcctgtcatttaagtagcactgatctcactcatttgtatattgaaaattgtagaaaatatgcaagtcatatggtatttggggcctccttgctccttggagatgtagacagaggttagcccagattccagttttagggtctgaggtgctcaaggcccacctacattctcatatttctctctctgtccatgttcttgattcactgtggcttttttggtttttgtgtgtgtgtatatatttttttaattttcccacctgtcagacccaggagaaaggatctatgccttttccattttccacctgaaatccattcacagtctattttttgtaatgccaacaggcgtcacagtggggcttatgtcatgcatgtgttccctcggctgtttcactggtctttgacaccctcagcagcacctggagcatgaccctccccaccctgcactgctccctgcagaggaccagcaccccttgcctcaccaccccttcagggagcggctagtcaggccggacagagtgcctcccacacccatcctgggatttagaggaataaagccatgtcatgttacccagcaattcaaaattaagctctccagtgagtgtttcaaaagaaattggtctttgttgttaatttttgaaagacccatgtttctattattaaaggtttggcaacaaatttgacattcaaatgtgaaaatttaaaagattcactttgttaatatttttgcccagatggagatgcctacagtatctgcatgaagctgtcggagttctaaagcaggcctaagaaacagcaactactaccgctatgagtactgctagtcctctcttcccttcctgtcccctcctctctcctctttttcattttcttcatcaggaggtttgtttggatcttctcaaatgtttaaataagtttctgttgagacaacaaatttcgtctcttagaacaagggccagcaacattttgttgtagggggccagagagtaaatggtttaggctttgtgggccatatggtatctgtcagagctactcaattctgtcatagttaactacgaatgcagccatagattcacataaatgaatgagtgtggtatgttccagtaaaacactagtggttgtatttggcccgtgggctgtagttagtgacccctgtcctacagcacaaataagatgacttaggcctagagaattagttaatatatgttaccacaaaatgatctcagctataakgaaaccacgctgtggccttttgtagaagtgtgattttttttttcttttatttttagtatcagtgattcctgcttaggctatcatgatgatttagctccaaaatgttttttaactccaccaaaaaaaactataaacctggatgaattatctatatttgtcattattattttactgtctaattgaatattaaaaatgtctgctcacagaacagactgtatctattcaatttctagtttcattaagttttatcacatggtttattgaaaaggacaggtcccacggagtccaggccagtagcagccatgtagtaactttttctctattcagtagtcagccatatcaacaagaagcatttttttttttttttgagatggagtcttgctctgtcgcccagcctagagtacagtggygcgatctcagctcagtgcaacctccacctcctgggttcaagtgattctcctgcctcagcctcctgagtagctgtgattataggcacgcaacaccacacccaggtaatttttgtatttttagtagagacagggttttgccatgttggccaggctggtctcaaacttctgacctcaggtgatccgcacatcttggcctcccaaagtggtgggatttcaggcgtgagccaccatgcccagccaagaagcattgtttaatcagtgatgctctttgtgctcttgatgcattttcttcccagcagcaataccatttgtgcctgttatttactctgaaatttcctccctggagggcatactaaggaaaaccagaaggggtagaggaagcctgtggtggtatcaagagttggccagagggggagccttcctggatgagctggatgtggggatgacattttgtcacctgctttggcattttcttagtgtccaaagcccgtcagtgtctgtttggaaactggaggccttactggcataatggccaaaatatgtctataaactgtctgtatatttgtcagcccttttggattgttttttgwtgagaaattattttctctaaaaacctcacattcttcctccttaaaatgcttgcatgaccagttwttaatgtgaagaatttgtttatgggtgcagaatccatgccggcaccatcagttgcctctgggctgtgctgagagtctcatggtgctgacctattcacattaatctcccaagttgaagccagctcaactctccctgaatctaatgtattgtctataacctttcaaaattggcagttaagtcaggatagggaactatactggcagcaataaaaggaagtaggacacgggacagtgctcagaaaaatcacagctgtcatgaaatggagtctttcaatagcctgtttgatccggaaacatgcgaaagtatttcatgcatgacaaaggattagtaartattaaatagtattcttgttttgttattgcctagtgaggatcaagctctctcatttttctctggttatgtttaatatgtatttgatacttcttggcattcttgaacatgcttatgaggaaggagaagtcacaggcaggaggaagagcaaaggatgatatygaaatttccatcagcaaataagcattaccctggttaaaactaaatgcaaataaaattagtaagctgaattagtgtttgtttccctgaggctttataacagagcctttcatctgttgttgtttttttctttttctttttaaatgaacaataatagtacagccagagagtttaacctgacagtggtggttactgtgctactgtctccggcttgtctgagtagtgtagagatttgctcaaagagtaagattgttttggagttgtttgttgtactaagtcaacttggtatatggtttcctccaagtatatgacaaagtctccactgcagtgaattctatgataataatcaagctttaacctataagtctaaacctaacagttagtgtgacatgtactatttttaggctgcttcttgataagaaatgattagatcacaagaattactactttgggctatacaacacaaaataagctgcgattggaaactggcaatccttgcaatggaaacgatgggagaaacttagttttttgtctttatggggcagtagacaatagcaggctagttggggagatggcaaggaagtcatacttgaaacaatttttgaataagactatgtattgtgcatttcacaatacatgcccaggaagtgttttacacactaggggtagagtgatagacaagttcacttctcttgtgaagtttgcattgtaaaaagacaatatattttcttttcttttcttttttttaatatgctttaagttctagggtacatgtgcacaacgtgcaggtttgttacgtatgtatacatgtgccatgttggtttgctgcacccattaattcatgatttacattaggtttttcwcctaatgctatccctcccccattccctcaccccagatgggccccagtgtgtgatgttccccacccttcgtccaagtgttctcattgttcaattcccacctatgagtgagaacatgcggtgtttggtgttctgtccttgcaatagtttgctcagaatgatggctccagcttcatccatgtccctacaaaggacatgaactcatccttttttatggctgcacagttattccatggtgaatatgtgccacattctcttaatccagtctatcattgttggacatttgggttagttccaagtctttgctattttgagtagtgccacagtaaacatacatgggcatgtgtctttatagtagcatgatttataatcctttgggtatatacccagtaatgggattgctgggtcaaatggtatttctagttctagatcattgaggaatcgccacactgtcttccacaatggttgaagtagtttacagtcccaccaacagtgtaaaagtgttcctatttctccacatcctgtccagcacctgttgtttcctgactttttaatgatcgccattctaactggtgtgagatggtatctcattgtggttttgatttgcatttctctgacggccagtgatgatgagcattttttcatgtgtctgttggctgcataaatgtcttcttttgagaagtgtctgttcatatcctttgcctactttttgatgggttgtttgattttttcttgtaaatttgtttgagttctttgtagattctggatattagtcctttgtcagatgggtagattgcaaaaattttcttccattctgtaggttgcctgttcactctgatggcagtttcttttgctgtgcagaagctctttagtttaattggatcccatttgtcaattttggcttttgttgccattgcttttggtgttttagacatgaagtccttgcccatgcctatgtcctgaatggtattgcctaggttttcttctagggtttttatggttttaggtctaacatttatgcttttaatccatcttaaattgatttttgtataaggtgtaaggaagggatccagtttcagctttctacatatggctagccagttttcccagcaccatttattaaatagggaatccttccaccatttcttctttttgtcaggattgtcaaagatcagatgtttgtagatgtgtggtgttatttctgaggcctctattctgttccattggtctatatctctgttttggtaccagtaccatgctgttttggttactgtagccttgtaggatagcttgaagtcagctagcgtgatgcctccagctttgttctttttgtttaggattgtcttggcaatgcgggctcttttttgtttccatatgaactttaaagtagttttttctaattctgtgaagaaagtcattggtagctggatggggatggcattgaatctataaattaccttgggcagtatggccattttyacgatattgattcttcctatccatgagcatggaatgttcttccatttgtttgtgtcttcttttatttcgttgagcagtggtttgtagttctccttgaagacatccttcacatcccttgtaagttggattcctaggtattttattctctttgtagcaattgtgaatgggagttcactcatgatttggctctctgtctgtaattggtgtataggaatgcttgtgatttttgcacattgattttgtatcctgagactttgctgaagttgcttatcatcttaaggagattttgggctgaggtgatggggttttctaaatatacaatcgtgtcatctgcaaacagggacaatttgatttcctcttttcctaattgaataccctttatttctttctcctgcctgattgccctggccagaactttcaacactatgttgaataggagtggtgagagagggcatccctgtcttgtgccagttttcaaagggaatgcttccagttttttcccattcagtatgatattggctgtgggtttgtcataaatacctcttattattttgagatacgttccatcagtacctagtttattgagagttttcagtatgaaggactgttgaattttgttgaaggccttttctgcatctattgagataatcatgtgatttttgtctttgattctgtttatgtgatgaattatgtttattcatttgcatatgttgaaccagccttgcatcccagggatgaagccaacttgatcttggtggataagctttttgatgtgttgctggattcagtttgccagtattttattgaggatttttgtattgatgttcatcagggatattggtctaaaattctctttttttgttgttgtgtcactgccaggctttggtatcaggatgatgctgacctcataaaatgagttagggaggattccctctttttctattgattggaatagtttcagaaggaatgtaccacctcctttttgtatctggtagaagtcggttgtgaatccgtctggtcttggactttttttggttgttaggctattaattattgcctgaatttcagagcctgttattggtctattcaggaattcagcgtcttcctagtttagtcttgggagagtgtatgtgtctaggaatttatccatttcttctagattttctagtttatttgcgtagaggtgtttatagtattctctgatggtagtttgtatttctgtgggatcggtggtgatatcccctttatcattttttattgcgtctatttgattcttctctcttttcttctttattagtcttgctagcggtctatctattttgtgatcttttcagaaaaccagctcttggattcgttgattttttgaagggttttttgtgtctctatctccttcagttctgctctaaccttagttatttcttaccttttgctagcttttgaatgtgtttgctcttgcttctctagttcttttaattgtgatgttagggtgtcgattttagatctttcctgctttctcctgtgggcatttagtgctataaatttccctctacacactgctttaaatgtgtcccagagattctggtacgttgtgtctttgttctcattggtttcaaagaacatgtttatttctgccttcagtttttaatttacccagtagtcattcaggagcaggttgttcagtttccatgtagttgtgcagttctgtgtgagtttcttaatcctgagttccactttgatcacactgtagtctgagagacagtttgttgtgatttctgttcttttacatttgctgaggagtgttttacttccaactatgtggtcaattttggaataagtgtgatgtggtgctgagaagaatgtatattgtgttgatttgtggtggagagttctgtagatgtctattaggtctgcttggtgcattgctgagttcaagtcctggatatccttgttaaccttctgtttcgttgatctgtctaatattgacagtggggtgttaaagtctcctattgttgtgtgggagtctaagtctctttgtaggtctctaaagacttgctttatgaatctgggtgctcctgtattgggtgcatatatatttaggatagttagctcttcttgttgaattgatccctttaccattatgtaatggccttctttgtctcctttgatctttgttggtttaaagtctgttttatcagagactaggattgcaaggcctgcttttcttttgctttccatctggttggtagatcttcctccatccctttattttgagcctgtgtgtgtctctgcacgtgagatgggtctcctgaatacagcacactgatgggtcttgtctctttatcctatttgacagtctgtgtcttttaattgggggattaggccatttacatttaaggttaatattgttatgtatgaatttgatctgtcattatgaggttagctggttattttgcccgttagttggtggagtgtcttcctagcattgctggtctttacaatttggcatgtttttgcagtggctgttaccggttgttcctttccgtgtttagtgcttccttcaggagctcttgtaaggcaggcctggtggtgacaaaatctctcagcatttgcttgtttgtaaaggattttatttctccttcacttaggaagcttagtttggctggatatgaaattctgggttgaaaattctgttctttaaaaatgttgaatattggcccccactctcttctggcttgcagagtttctgctgagaaatccactgttagtctgatgggctttcctttgtgggtaacctgacctttctctctggctgcctttaacatgttttccttcatttcaaccttagtgaatctgacattggtgttcttggtgttctctgtatttcctgaatttgaatgttggcctgccttgttaggttggggacgtcctcctggttaatatcttgaagagtgttttccagcttgattccattctccctgtcactttcaggtacaccaatcaaatttagatttggtcttttcacatagtcccatatttcttggaggctttgtttgtttctttttacttttttttctctaaacttctcttctcgcttcatttcattaatttgatcttcactcatttataccctttcttccacttgattgaatcggctaccgaagcttgtgtatgagtcacgtagttctcatgccatggttttcagctccatcaggtcatttaaggtcttctctacactgtttattctagttagccattcgtctaatcttttttcaaggtttttagcttcgttgagatgagttcgaacatcctcctttagcttggagaagtttgttattaccaaccttctgaagcctacttctgtcaactcatcaaagtcattctccatccagctttgttccattgctggcgaggagctgcgatcctttggaggagaagaggccctctggtttttagaattttcagctttactgctctrgtgtctcctcatctttgtggtttttatctmcctttggtctttgatgatggtgacctacaaatggggttttggtgtggatgtcctttttgttgatgttgatgctattcctttctgtttgttagttttccctctaacagtcaggtctctcagttgcaggtctgttggagtttgctggaggtccactccagaccctgttttccttggtatcaccagcagaggctgcagaacagcaaattttgtagaacagcaaatattgatgcctgatccttcctctgtaggcttcatctcagaggggcatctggcwgtatgaggtatcagtcagcccctactrggagatgtctcccagttaggctacatgggggtcagggacccacttgaggaggcagtctgtccattctcagagctcaaacaccatgccgggagaaccactgctctcttcagagctgccagacagggacattttagtctgcaaacgtttctgctgccttttrttcagctatgccctgcccccagaggtggagtctacagaggcagacaggcttgttgagctgaggtgggctccacccaggtcgagcttcccggccactttgtttacctactcaggcctcagcaatggcagatgccccttccccagccagtctgccgccttgcagctcaatctcggactgctgagctagcagtgaacgaggctccgtgggcatgggaccctctgagccaggcgtgggttataatttcctggtgtgctgtttgctaagaccgttggaaaagcgtagtattaaggcgggagtgtcccgattttcctggtatagtctgtcacggcttcccttggctaggaaagggaaatcccccaaccccttgagcttcttgggtgaggcgatgccctgcccagctttggctcgccctctgtggccgcacccactgtccaaccagtcccagtgagatgaaccaggtacctcagttgtaaatgcagaaatcacccgtcttctgcgtcagtcacgctgggagctgcagaccggagctgttcctattcggtcatcttgaaacggctgcccaagacttatattttcaagtcagcattataatgttgatgcaaagcagtgataaattgcaaggtatatgaaacagattatactacacattgttttgatctgtggagaatgggattagaaatttcaatgtagaaaagtcctgtgcatgtgatgctgatggacaaattttcagagttattgggctcctgggcatctaagaaaggcatttgcaaccaaatattttttctcttcacttagaagtaagttgttgtaagttaagtgtatatgctttcgcttcaaataattaggaaaaaggtgccatttgacaccaatatataatttagaaaaactgatttgtcatagttgttttttcccatcgattctgaataccttttcataatggtcaaaatcttcagaaactatacagttttataaattcatacattctctgaagaggagattaaagctcctccattttaacaattcactgcttgagtctttcgtacaacttctttccaagtatatgctgtgcttggatgcctcttgtgatgagggacggactgcctctgaaattgcttgttttatctttggttagctttcactgtagaagattcttccttataatgaagaagattttactatagaagattcttataataactggagaagattcttccttataatgagtttaaattctttgtctgttaaagtataatttcctaatatcacttcttgggcccaaatagaacctatctaactcttccttacctggaaatctttcagatatatgaagattgctatccctctaagtccaggcttaaaacatattgttttatgaataaatgaaaagaaacttaatttaggaagattctttcattaacgtagcttaccagtgctaatgaggatcaggtaaaagtgtggatacattgaaagtttcatttcacctcagaattataggcagggtacaatgaatgctagatgctgttgtcctcacaaagaaaagtaaatagaacagtttatctttttgagatgtttagaagtcagtttggagacttctgattgaattgtgcatagcattttaatattctgcttttgagtatttaaaggatggcttcagattttaatactttaatgttaagagtatttagagtctgggacatgtagtgataattctttgctgttatatcgtgctttacaagtagtttccaaagcatttttggataatgcccaatctgattcttaaagagtcyggtgaggtagctaagaaggtattattccttttaaaaaatgagaaaatagtagagagattaagtattttttcatttccttagcaaatgacagaagctgagcttgcatctcaatctggggctttttctctcataccatgctgcctcatttgtagcaagaacacctactgttgttttctaaagatgaaagtttccttttcagtttgttttataagcaagaggtattcctgtgtagcatattcattcactagatgaaaaatatgatttagagtttaaatacttgcacttatttttcagtgattgctgttgggtaagaatttgatatttttataaaatcaaataataagtaacattgtgtatattattaacaaccatctgtaaggataatttttgcttcaaagaatttccttagagcaaagtaaaccaaatcttaatttacaagttaatttatttcaagattttttgatcactttattttatcacagtctaatatgattttgagccttatatgattaatgcaacggtttgattttatttggttttgtggtgttttcttctcccagttatttagataagattttagtctcagagtttaagttctgcttttagaagtaaaggaactgagaaggaaagcctcatggtctgaggctaagccctggccaattatcagggtggattcagatgatcgttaaataaatatgtgtgtttctttccatccagaactttggtaacattggatgtttttacataagttgctgaaggtatggacacagtatgataatgctgtcatccttctccttcagggtacactttagactgaccattgactagcttctccttcctggggagaaccaaatttgaagtggttatctaaaccatgtgtttgacccgtcacttattaaaatagtagactttcttctaaaatgttcctctaagaaaacactgaagtttgggagttcaaatttttgccctcaaagtagccagactattccattggtcgatggtggtccctgattgtttagtcctgtccacatattgttatttatctgtaacatcactatctgtacaaagcagctggctctttgaataaagaaaggtaatttcaaaagccacagtgccctacattaatgatctctaaaataaaatttttgactaaaaacaatactctttatcgtttgttatggtaaacaacaaaaaataatttttgtatttattatttttccaatctttccttgtatcagtccaatgagataattcatattttctgacattagcattgtattccaagcacaatgctatgctttggatgctcatcttgttaaataatcacaaaattatgatggagcagtttatcctgttttagcaaatgagaaaattcaggaccagaaatgtaagtaacttgcctgaacsacacagctcatcacagaacagggattccgtacccatgccccttcagtgcaccatgtcgtaggacatccttttccattcttttctttagagagtttgttgtccaaattgctggtaaggaataaaactcatgtttttttttaaactcaggttttctatctcctaaccccaaactatagactttctgcatttttctttgtttcttttcccttggataacaacagcaaccagaaacacaattctctcatctattatcatataccaaatttgccttatgtagtctttgactaatgacttgttggtcagaatgaactcagggatctgttctctgatagtacattaataatatatatgcattaaagcttcttctcggagaatatttgagctttgacatattgaacactggcattttaaattaaagctgttgctgtcagtgcattttaaaaactagatagcttcgaaatagtgtttcatacataacaaaatatacctgaggtcataagtagtttgctaaggcaaaactatgcctggcctggttaattgtagtaggggcttgaatagagttttccaattatcatgacctaaacatctttcagactgagaaaaaaaactaaactgttttgcagggctttgatttactagaagaaacaccatagagcaacctaatggattttctgcatactgtcggagctaggaataatgaatttaaaactattctgaatccttcaagacaggagagtatcaagattaaaatgatacttggtgacaattataattctatagttgcgccctcggcttgcattattgtttcttgtcttgcaaacacttttgtatcagattatattagctaagcagtctttttgcttgtggcattagactcatgcaagtttataagtagtgtgtgttaagcctttccctttgtagagctgatttggggacacggttttacacatatacatatacatatacatatacatatacatatacatatacatatacatatacgtatacgtatacatatgactgtcctcatgaagattttttctgtagggcagtgtaatagaaagaatccccgattggaaccacagaggtcatgagcaacacccacccaccctcactcctgctattttatagatagatcaattaacagatwatttttccctcaaatgccactatactggatggtctcagacttcgtatccagtcagacccagaagacttcctctacagagtaatttgcccaaagccacaggagtagtaaagagtggaactgagactattaaaggaaccaggtcctttaatccctggtgattcctcttcatttagaacagatcttgtgttagtgagtacctttccctaaaatgggggtctgaytctttgctctatatctttgtcatgaaaatctgccaattccctgtccaggagccagtggatttgggacagaggaggaagactcaaccaacctccagtggatattagcaataggacctgtttttccaccatctgtttgacattaatgtactgctcgctgttgacattgcagatttatttccagcaggccactcctgactcctgaatacttgatactagcatgaaactttctaattgcaggatacagtgaaatccaaagtgagttagaaatttaattaaatttcttgcttgtttaattgtttaatgtgtcgcacagtccagcttgcaattccatattcaattataatgaaactccccttagattgagtttgtcttggggtttgatggtgagtctaaaaagggtattgatgctttaagagaatccttggttttataaaatttcagtgtaagggattgagtgttttagtattaggtttgtattgactcttgatattgacacaagtctaaatgtgcaaagcccacaaaggctaaatcccataggcttatatttaatttaaaatatggctagctggccattttgaatatacttgctaggttgacaatctgaatacttgactgattgggaaatagtcaaatattaattttaaatgttcattagtagactgtttgtaattggtttttaaattcatttggcaaatgagaattcacatttatttaaaattgccaataaacctgatttcataaaggtgtttggaggttaaatgcctaataattaatttatgcctaagtaatatttttaataatttagaggaaagttaaagcagctgagaataatgttaatgatgaaaagtaatgaaggcttcaagattccaagatttaattgtggagatcatattcatcatcttaaaaacagaataggaaactggatggaaaagacattttagtggagcttaaaaaatgctggtcaaggagaacaaaattacgaaagaacccaaaccctatcactgacttggccatgggacccaggcaagcctgtcttcttctctgaaacttaattcatccatacttgaagaggggtttgaaaactatttgtaatctatttttgttttgcatggcaaaagaaggtagaggaagtgtggaggttaatttaattgtgatacaaaaataatgatgtaatcaaatcctcttttatttctacccaaccgttgttatgatgtttttctcttgggcttattctttttttattttcaaaaataatgttagatgattattactcattgtgtgagtgtgtgtgtatatgtgtatacatgtgtttgtgtggatttacacactagacaatgatagcatggtccctttgggaagattaaggtgatgacatgctttaaactttgtgtacccactctgtaaaccatcagtaaaattcaattagcaggctttattccatctgtagaaatataatgatgctaaaataatcaaaatctatttaatcaatttcattataaatgaagggattgcttgcattcaaaatcttaataaaggaaacgaggttggtagtctatgctgattcagtaaaacatatcgtatcttgcaaagccaaagaaattaactgtaaacccttgatcaaaaagcacagaaagtgtgtgatccagagagcttgataactgctagcttttagtgaagaaggctttttgatgttacaagcacaagaagccagagcgttattatgtagataattgattgattaatttaatcaatgactttctcaaagatggttctgagacatgactgggaaaactgaaatgagccagctggccattggcggtccacacctctccatgaaaagtatctgcagagcgcctctgccggagcacrgaggactttctggcggaattcctgtagcttgtgtgaggatcaaacctaagcagagtttaatgaaattctactttggagtgatttgtttatcttctgtgagcaatttctttctttctttttataggttgattgatttatctgtatgtgtattcctcagtgcttttccttgtctgaaccaaaagtgctttgcaaatatcagagctcagatttttaaaagatcattgatttttttcaaatatcctgaaggtaggctgtcacacattattatttaattctgagatagggatattgatagcataatattaaaatctttcattagagaatttttttttggtctagcaataacctaaattcgaaggagttttgttttccttcatctatcagaattgttatttaaaagtacccactacccaggacagtatggttactttgttgccttcaggaaagggaatattgtcattggcttaaaacattctactgtgactgccagatattataggtgcccaggagacccaggaaacaggcctttggttagctactgaaatttgccatctgggcacggtggctcacacctgtaatcccaacactttgggaggctgaggcaggcagatcacctgaggtcgggagtttgagagtagcctggccaacatggtgaaacccatctctactaaaaatacaaaacttagctggtgtggtggcacatgtctgtgatcccagctactcgggaggctgagggatgagaatcacatgaacccaggaggcagaggttgcagtgagccaagattgtgtcactgcactccagactgggcaacacagtgagactccatctcagaaataataataatgatgaatttgcctagcataaccagctcttcaaaagtttggtcaaaagccggtaaatgcttagtattgtgtagacgttccacagtgtccctctcactctctttactttcggctgcatatttccacttgttatcaccatctctgtggaaagctccattcaggatcagcaatcttcttgattcagaggaccattcatgatgttaaggatctgctagtgatgacaccagtcacacagaacaatcatgaggaggaagaatatggggaagtctttaccatttcctcctgggctactgttagcttcttacctggtctccctgctgccattgtagccacctgactcccaactgactgttgtaagagtgacctctctaaaccgacatgcccctctccatggttttatcatttctgattcctttattcactcctgatgtcactgtcttgctttaggtcttcagggtcttctacctagattgctatggtcatctctataactgtctccctgtctctcacctcaccccttcagcatggctgctagagtttcctaaatacaaatatgatctggttatctgcatacagtcctttagtagtcactccttggccacagaacaagatcagatttctggagtatgcacaaatggcatttactatctggcctgtgctcagctctagccttttttttttccccccaccacatccagtgttgcaaccagactgaattccttcctggcagcttccagaacatgccaggctcctttatacctctgcacctttcatcatagtgttctttactggctcgggatctgttctctgctgaggtstgctagggaacatctatttatcttttaagactcagattgaaagcagctatgcccttttcctgtgccaccccccatcctatactgtaggattgtccaatctctctttcattctccaccatatcttacacctttgggaatcactttattaggtttacttcttttcatgtctctatcttcatcctagattgaaagaactgtaaggccagaggccatgtattttttgtcccrgtacaatgcttggtactcatcaggcatttaataaacacttattgaataaaagaatgtctgaagcagctgaataatagtataagacaactttcagattgtaagtgccatataacttcagagaaaggacagatcattatacactacagtaatctaggatgctctcaaagaaaaagtggggacctatgttgcagggatagatcacatttggagtggtagagggaaggaagactattcatgactaggaataactgtttggggctgagacggaggtgaacatttaaagagtactttgaataaatgggtttctttacttatgatgaaatactatgattggagataccattttcctaattaaaatgttgctgttgttcttcatgactcacatattaatttctatactccttaatattgggttaagagtcaaatcagagttcactctgttagtcgcttcacgagccttggacaagttgcttgacttttctgagcttcaatttagaaatgaaaaaaatggagacataatagctacctcaaaatgtgtattgtagcatttacgatgtgttctctatttatccaatgtcagatatagtacaggacactttatgtgtattaagtcttgtaacctttatgtcagctccattttgattaggttattgtttttgttctaatttacaacagaggaaaaacaacggtaccaccaagagaaatatggaagtatggaagacatcatctcagattgttttggaggttggaaggaacagctcctctgtatagggtggctggcagcagtacttaatggtactagcgcagctttgagttcaagggagagagagttgggtctgctaagttgcgggttcatccatgaagttgttttgtgccctgtgatctaatatagcttcaactcagaagctggaaacattactctggaatcctgtgtctggcagtgtgtcaagcagccaggcccagatggagaatccaggtgtatgttggcaaaaacagggtaggtccaaatggagggtggtggcagactgtggaggacttacttgagggctgagctggtggctgcagcatttttatgggatgttccctatttgtgtgggaagacaaccctgaaggtgaatttgtgtggagagaaaacacagaagggcascaacacagcataagcacaagtcaggggaggctgtgacatcagatgggcgctgaatgcttgtggctgggaggacaggcaaggcccaaaggagtagctctctttttgttgttactgttgttttgctcttcatggataaatttgttctacagcagtttttaagattctattatatgtggagtaccatttatgaggatacaaaatacaaataagaggatgtcctcaagttggatacagatagtgaaacaaartttacaaataattacacaataacatgacgaagtctatagtggagccaaacaaaaaggactgcaggaacactaaggggtaagctaaaaatcctgcctgagagaattaagaaaggcttctcagagragataacatttgagctgggtcctcaagaatgaacaggaattctccagtgggaaaggtcactatgaatgcaatgattagaactacttagtaagcgtacaaaaaaaaaaaaaaaaaagagaggataatagggctttctgacactacttttccagattcgagggtatctagtttgtttcatcactctttaaaaagaagcccaaggtatcttaaaggatgaaacagcgcctcggtgctgctcttcrtcatagaacctcacctcatgccatggcttggaaagctctgcaggcccaggcgtgtcctcttatactcagaaaacaacccttcaaggtcatcaattccatttgtattcttattggacattgtttggagcatagtaggcattcagtaaatgttctttgaaataagtccatttgttggaatgtcttgaaaatattttttgagggtggttgtattttctttcttgagacwcactggcacatgtgtctgtttcaagtcagcaaggctgttccaatttttgtcttaggagttttactttctgtatgcttttttgcctcatttgggagtttacattatttcaaaatggatagagactgtagaatagagaatcccaaaatcacaggacaattgaagttcattgacaaggatagtgagaaaagtgtgctctgcagaatattttactctgagtttctctaatgtaattagttttgagtggggaagaaaacccaacattcagcagaaaggcaggaatagaggatcaatctaatacatcacagtggagaatgaggctgtgttcaggccattctgcatactccgaaactcttaagcacaactgactctgcagaaaatatgtctgtctcaaacccccgtttactgtcagttcttttggatacccagatactaaccaccagaataaagtccagcccaaatctcagggtttctggactgtaatactagttagctccattaatacttgccttcatctgccaagaagatatttaaaagtcatttgcaattatgggtccatctcaggtttggattcattttcttaagggaagtatttggggactactgtcaccccatattgtaaggtgaagacacaaggcaacaggttgagtgaatggtggccctcagtcatgctgggtctggaggaagctgaaagctaggctgagattgctacttagtttgtgtagtttgatgttaaagcatcatcacgtttttttttcaggcccaggaacaggatttagaagcttcaggttttcccttcctgtaaggtagccttgatacctagatgttgtgatttcctttgtggagagaaacaaacttctgggcctgtttctacccatctgctgttgggttgaaagcacagctctcatcatgtttctttccttccgaagtgtctgatgtgtttctctgctgcctctacaagcacccattttcttctgtatccagccttgtggcccttatgcctaccctgttttggttctaaacatgggaatacctcattttctcagtgcttttcatccattccttccatctcaagtgctgaaaatgtctcagaagtcctagaccttgataaaggttattggccatgttattctcatctgtctgctcctgctctgctctgaacagttctggaatactaagacagccatacagtagcagccaatatctttggatgagtcttcttactttaattattctgctgaatggacatatgctcccctcactttcctcccccaccatagctgtccaaatctatttgaattccgttaacttcacgttttctcatgccctgattcagtctcttatgcctaaatttagtctcgaagcatgaaaccataaaggattctccagtccaccctagaactctggacattaacttaaaatctgttcacccatatcaagcctgtgctgtgctcagcttatacctgtaaacactgatctcttctctcctactctaatacaagttttatttgtatcagctctgccctgggtactccaagaataggatagccaattatcctctcataccttatcttctctgacagagaaatcagagttcttgcattttggtctccactgagaaaggcaattctgtgactgcttgccacatggctccccaagtcctgctcaagttctcacctccttcacaaattgttgatgtatgtgggccttgtctcttcaactttatggcaggctcgtagaggatacgtatcttcataacctgtaagtcccactgggcctagaatgttactaaagcactgcactttttctcttgagatggagttttgctcttgttgtgcaggctggagtgcaatggtgcgatctcagctcactgcatcctctgcctcctgggttcaagtgattttcctacctcagcctctcgagtagctgggattataggcatgcgccaccacacctggctaattttgtatttttagtagacacggggtttctccatgttggtcaggctggtctcaaactcctttttttttttttttagcaatattaacagatggaacttttatttatttatttatttatttatttatttatttatttatttatttatttttgagacagtgtctcactctgttgcccaggctggagtgcagtggcatgatcacagctcactgcagcctcaacatcctgggctcaagtgatcctttcacctcagcctctcaagtagctggcacttcaggcatgtgccaccatacgtggctaattttttatttatttttatttttttattatactttaagttttagggtacatgtgcacaatgtgcaggtttgttacatatgtatacatgtgctgtgttggtttgctgcacctattaactcatcatttacattaggtatttctcctaatgctatccctgccccattcccccgaccccacgacagggcctggtgtgtgatgttccctgccttgtgtccaagtgttctcattgttccattcctactgatgagtgagaaaatgcggtgtttggttttctgtccttgtgatagtttgctcagaatgatggtttccagcttcatccatgttgctacaaaggacatgaactcatcctttttaatggctgcatagtattccatggtgtatatgtgccacattttcttaatccagtctatcattgttggacatttgggttggttccaagtctttgctgttgtgaatagtgccacaataaacatatgtgttcatgtgtctttatagtagcatgatttataatcctttgggtatatacccagtagtgggattgctgggtcaaatggtatttctagttctagatccttgaggaatyrccacactgtcttccacaatggttgaagtagtttacagttccaccaacagtgtaaaagtgttcctatttctccacatactctccagcacttgtttcctgactttttactgatcaccattctaactggtgtgagatggtaactcattgtggttttgatttgcatttctctgatgaccagtgatgaggagcattttttcatatgtctgttggctgcataaataaatgtcttcttttgaaaagtgtctgtttatatccttcgaccactttttgatggagttgtttgattttctcttgtaaatttgtttaagttctttgtagattctagacattagccctttgtcagatgggtagattgcaaacattttctcccattctgtaggttacctgttcactctgatggcagtttcttttgccgtgcagaagctctttagtttaattagatcccatttgtctattttggcttctgttaccattgcttttggtgttttagtcatgaagtccttgcccatgcctatgtcctgaatggtattgcctaggttttcttctagggtttttatggttttaggtctaacatttaagtctttaatccatcttgaattaatgtttgtataaggtgtaaggaagggatccagtttcagctttctacatatggctagccagttttcccagcaccatttattgaatagggaatcctttcaccatttcttgtttttgtcaggtttgtcaaagatcagatgtttgtagatgtgtggtgttatttctgtggcctctgttctgttccattggtctatatctctgttttggtaccagtaccatgctgttttggttactgtggtcttgtagtatagtttgaagtcaggtagcgtgatgcctccagatttgttctttttgtttaggattgtcttggtaatgcaggctcttttttggttccatatgaactttaaagtagattttccaattctgtgaagaaagtcattggtagctggatggggatggcattgaatctataaattaccttgggcagtatggccattttcatgatattgattcttcctatccatgagcatggaatgttcttccatttgtttgtgtcctctttgattttgttgagcagtggtttgtagttctccttgaagacatccttcacatcccttktaagttggattcctaggtattttattctctttgtagcaattgtgaatgggcgttcactcatgatttggctctctgtttgtctgtaattggtgtataggaatgcttgtgatttttgcgccttgattttgtatcctgagactttgctgaagttgcttatcatcttaaagagattttgggctgagatgatggggttttctaaatatataatcatgtcatctgtgaacagggacaaactgatttcctcttttcctaattgaataccctttatttctttctcttgcttgattgccctggccagaacttccaacagtatgttgaataggagtggtgagagagggcatccctgtcttgtgccagttttcaaagggaatgcttccagttttttcccattcagtatgatattggctgtgggtttgtcataaatacctcttattattttgagatacgttccatcaatgaaacagactttcaaccaacacagaccaaaagagacaaagaaggccattacataatggtaaagggatcaattcaacaagaagagctaactatcctaaatatatatgcacccaatacaggagcacccagattcataaagcaagtccttagatacctacaaagagacatagactcccacacaataataatgggaaactttaacaccccattgtcaatattagacagatgaacgagacagaagattaataaggatatccaggacttgaactcagcaatgcacyaagccgacctaatagacatctacagaactctccaccacaaatcaacagaatatatcttcttctcagcaccacatcacacttattccaaaattgaccacattgttggaagtaaaacactcctcagcaaatgtaaaagaacagaaatcacarcaaactgtctctcagaccacagtgcaatcaaattagaactcaggattaagaaactcactcaaaaccgcacaactacatggaaactgaacaacctgctcctgaatgactcctgggtaaattagaaactgaaggcagaaataaagatgttctttgaaaccaatgagaacaaagacacaacgtaccagaatctctgggacacatttaaagcagtgtatagagggaaatttatagcactaaatgctcacaagagaaagcaggaaagatctaaaattgacaccctaacatcacagttaaaagaactagagaagcaagagcaaacaaattcaaaagctagcataaggcaagaaataactaagattagagcagaactaaaggaaatagagacacacaaaacccttcaaaaaatcagtgagtccaggagctggttttctgaaaagatcaacaaaatagatagacygctagcaagactaataaagaagaaaagagaggagaatcaaatagatgcaataaaaatgataaaggggatatcaccatcgatcccacagaaatacaaactaccttcagagaatactatraacacctctatgtaaataaactagaaaatctagaagaaatggataaattcctggacagatactccctcccaagactaaactaggaagatgttgaatccctgagtataccaataacaggctgtgaaattgaggcaataattaatagcttaccaaccaaaaagagtccaggaccagacggattcacagccggattctaccagaggtacaaggaagagctggtaccattccttctgaaattattccagtcaacagaaaaagagggaatcctccctaactcattttatgaggccagcatcatcctgataccaaagcctggcagagacacaacaacaacaaaaaaagaattttagaccaatatccctgatgaacatcgatgtgaaaatcctcaataaaatactggcaaactgaatccagcagcacatcaaaaagcttatccaccatgatcaagtgggcttcatccctgggatgcaaggctggttcaacatatgcaaatgaataaacgtaatccatcacataaacagaaccaaagacaaaaaccacatgattatctcaatagatgtaggaaaggcctttgacaaaattgaacagcgcttcatgctaaaaactctcaaactcctaacctcaggtgatccacctgcctcggcctcccaaagtgctgggattacaggcgtgagccaccacacctggcccaccaaagcacttttaaaagtctttactggctggctgtttggtcacaataatgtttatagtgaatatgcctttttctttaataaacacatttaacgttttaaagttctttttctgaagagtgatttttggttttgattgttgatagtggccttgattcatgccaaacttataaaaatcctggtcagtttatactgagcttctgcacatagagttttatataaaaccaagactttgtatttgaaggatggaatgttgatttaaacaccttttttgtacataatcattttagaatttgaagaggaaaaattaacaaagcttgtcagattacctttcagatttctttcttttgttccctaatattaccttgtaacaataccatctccatctccgtatgcttctagatcacattaattccacagcaaactttatattatcagacataatttgaaatgtgatacaacttaaattcactgtgccagctcagcattcctaattcatgttatctgcagtgtttgaattatagttcagatttattggaccagagaatgagaaaatccaaattctctagaattgatttcttacatggaaaggctgacacagtgggagatgtgttgctgtttaaaacagaactttgagacctccccacccccgttcagtgataagagaatgaacaatgcattttaatggaaaaattgaagtaaagcaagatagttcaaattaactggagaaccatgattgttggttccagaaaaattcactgttgtattctcagtgtttgaaaatgactgtcacatgataggcactcaattaatttgttgaatacatgactaagtgtattataagccaagagaagttttaatatgcttattacatgtttaatacaagaaaagcattatctcaatttattcaggatatagtaatacatagatgatcatttatactgctctaccttgatgaggcctctagctttccactaaatgtttgtcacttatgatagcaataacagtaatagaagtagcatctagcatttatgtaatactttttatcatttagtaagtactatttatttattaaaatgcacacatatatgttctcacttgtcttcagaacaaatttgagtgctcggtggaacaggttctaaacaaatgtgagatccctcttctcccactcctggatgttggccttgtatggtaggaagggcaggtatagttctttgattggtgaggaaactaaaaatagaaagaatagtttatgggccaaaagccacactttaattttgtaataaacataaacctaaattacagataatctgacatcttttccactttaaatttattatagatttaactgactttacatttcattcaataatttctttgcaatgtcactgaaatgcagtgacagatgtatatttaaaattactataaagcccatcatgaataaaataaagaagtgtaatatatagtagataagaaaatactatttttcagagctaagcatgatctgatttttatcagtattttgaaagtatttattcatttccctggataaaagactgtacgtgatttggaatataaggaaaggaataggtgaagatgtcccttctgaactgttttttttaaacttggtttttgaaggacccgtttgtttttcgttttcttgccctttcaaataaccagcagcataattagtatgctatggtgttatgggaacaaattatgaataaacaaggattaaaagattgtatgaatatatctttcatacttacttggaggatttaatttcacaatataagatattttaaaaataaatacttggattttatcctggaaattttcatattaatgaaagaaagaaaaacctatttaatgagagctttaagattgtatcttatgggaaagtctaactttaggtataaaaggatcagttttattttgagatttttggctaagactttacttaaagattgctttgtcagaactggagattttaggagtgcctatgacttgacagaaacaactgggatagactattctgatgttctttaatgtttaattggtaattctaagggaagaagaaatactttggtaagttagatgcatggtccagctagcttaattatctgtcttgcgtgctggggactatatggagagtgattcctgtccatcatagtattggtctcaaaaggtcaatttctagttcagacagcttcaggtctcctttggtctccaggatttgcatatttatctgttttatctttagttttgatggaaaaataatgcgtataagtgaacatctattaagataatagctttttgttttcgaaatttctcctaaattataaggcctgatacgtctagagctagtatttgaacattcggcacaaacgttaaatttcatatgtttagaataattagttcttaaattcaaaagatatttgactagccaaaacgtgatgtctgactttataggagatgatgagcatttaggtgatgatgtataagtgaaatatgtcctgaaaggcccctcatagaattggttttactgagtaatactttggtactaagtccttggctcaaatcaagaaaggacagaaagggaaggcacacagttgtatttataaggatgtcgttgaagacattggttatatatcacacaatttcccttttatgaaaacccttcagtgtatcttttttcttttatcttttccttttttggggccagtctgacacgtgaaatgatgtcttgttatttaaatgtacatttcttttgattgctagtacatgttttatgtattgtttttattttatttttttaacaaattgccctgctaattttcttgctatttttccaattgggatgttcatttttttcttatggactttcaatggtacttgtgtattgcaaggagattaatcttttaccatacatattctaaacatttttctgctttctctaattttttatgtgttttttttatttaaataaaagtttgggtttgtttttctaagtgaaaatgaggccagccatcttttgtttgctttcatttcctttaaagattatataagtagttatcaatattttctccaaatacttgtatttttgttttttgttkaaaataaatatcaggttcctatctaaattttacatttaaatgcagaatataagcctcatgaaggcagcaattttgtcgattttattccttatcgttggctgtattcatggcacatcataggcatgtaatatgtatttttcaaatagatagtataagtctttatctaaactttatattgttataaaaatgtgaatagaaatctagctttcttaacctttttagaaagctggacatgtacttttaagtcatatttaagcctgctgtttttcctctgtcccgaaattcttcctcttgctttccacctatttctgtagaaaatccttctgtggtaatacaccgacaaggtcataatttacgtttcaagttttcctaacgtgatctttctttgtagcacttgtcatagctgcagtttcatgattgtttgtggaattatttaaatgttcttctccccgcttccaccctacaagccaacattagtcagggactttacttatttttgttcatcatcatatcccactgcatggcacatattagataattaataagttttttttaaatgagcattttattttttgaatagactaataaactgccacaaaaatcacataccaagtccttgcacatattcggtccccttcaagacttttacattttatattattgatctgtctgttttgttatcagtcccatacaaatttaataactatacttctaaaaacattttagtatttcttaggttatagtggcttcccatatactctttacaacaggtgtgtccaatcttttggcttctctgggccactttggaagaagaatttgtattgggccacacataaaatacactaacaataacgatagctgatgagctttaaaaaaatcacacacaaaaaatctcaatctcataatgtttcaagaaagtttacggatttgtgttgggccacatgtggcctgcagaccatgggctggacaagcttgctctacactaattcacacagtttaaaacattttccaactattctcacatatttatcttctggttgtattttataatcatttgtcaagttaaaaaaatctcattgtatatttataagtgtgcgtgtgagagagagtatgtttgtgtgttggtttgcaaggaaggatttgttttaaatttgtaaatcggagagaggttgtgtatttataataaaatattccattttcttatttaggagcttgctatgcggcttttaatttattgaatgcgttgtygggcacggtggctcacacctgtaatgccagcactttgggaggctgaggtgggcagatcacctgaggtcaggagtttgagaccagcctggccaatatggtgaaaccccgtctctattaaaaatacaaaaattggccaggcatgctagtgcatgcccatatccagctactcaggaggctgaggcatgagaatcgctcgaacctgggaggcagaggttgcaccactgcactccagcctgggcgacagagcaagactctgtttcaaaaaaaaaagactacttacgaatttattgaatgcatttatttctctcagttaatttaaaactttattttatagaacctaaacttttcatgttaggatttttcttagacattttcatgcagaaactagttaacatagcaagctcgaatttgctatctttagaaggatttgcttacagggttggcttgtccttggctgtcatctgataacttgacttcagaatgttccctgtggtactaagtgataaggttatttggtgtaccaggggtactgaatttcattgtgccaatctgcctagacttaaaaaaaatgtgatttatacttccttctgggattttttaaaaatattgtggctgagtatgtaggcagagagtgtctgtgtgaccagtccctccaaaatctttgcactcggggtctcaagagatttttccagacagagatgctacacatattactgcatttctttgctagagagcattagaaacttacacacagatctcttcaggtgccacttgatgtcttcatctctcattagttttatcacttttaaatatcttctcttagtttttcctgatagtcccaatattgtcatctctaaatgaaaattctgtgtacttttttacaatatttatccttcacattcatttttcttgtcatattacagtgattagatcttccagaacaatattgaaaaatacagttgacttcaaaaacttttattttcaatataattgtgatagtgttttatattagatatgttttctattatctttagtttgatattctttatcatagtaagaaactatcccttaatgtctagtttatttagtttcattagaagcacacaatgcattttaagtcttttttgatacctgttgagacaacccaatttttttgtttctttattaatgtgataaattgtttcacatatttgaaaagccttatttaaaaagagtcatgatatcgctaactatcctggcgataaactatccatattattttaaatgattttaaaaccttgctatggaaaataagattaacttaagtagtaggcttattgtaatttattgccacttaaataatagaggttaatagaaggatgcaagaagagagccaacttgttgtatcatggagaaaaataattgtaagtattaataataataaataaaaataagactgtttagcatatttctaaaggacattctcaaataagtaatctgtatttggtatctgttggccaaaatatatattttctgtattttagcaacacacacaaagctatgtgtgtgaatacatttttataaatcgatgtatttttgatacaaaaaagcctgttgcattcagacaggtgtttttgaagcactgacatttgcttccagctctcctacttttactttcaatgcaatatgatgaaataaaccattttatgtatactacataattgccacaatgtccatactggtaatacttgattgttaatactgatagagcatgagacagcatgatgtcataaattggttctcatcttatttgctctgtaattggtcatgatcattacagatgatttcatcttgctaggatttgcttcctttattctataactatattactaaaatgacatagtgattttaaaatttacagttaaaatagagaaaaatgttcattttaagcatgtatgttttaaaaatcatatgtattattattttacattgtattactaactacactgtcatacttattactgaaatatatgtatgagtacgattatagttttttgtaaaaatattgtattcgtctgttctcacactgctaagaaagacatacctgagactgggtaatttatttaaaaaagagatttaattgactcacagttcagcatggctggggaggcctcaggaaacttatagtcatggtagaaggggagacaaacacgtcctttctcacatggcagcaggaaggagaagaatgagtgcccagtgaagggggcagccccttataaaaccatcagatcccatgagaaataactcagtatcatgagaacaggatgggggaaaccatccccacgattcagttatctccacctggtccctctcacgacacgtggggattattggaactacaagataaaatttgggttggggacacagccaaaccatatcaaagtttaaatattttctcacaataaagagaggatatatgtaagtaaacataaattctgagatttaattgaaatttagtgaatcatgtttttcttcagtgttctttcacataagaggtaattttttttggcttaataaaaatgtctcttatctttcctttacttcttccatctttctatctgataatgtggcaaaaggcagcttttgaaaacaaacaaaatactacagtaaaagcatattttttctgatttctatcagctatgaatatctagcattaattttcctggtagaatgtttgatgactataaagaggagactggtaagaaggagaagatgcaccctccacacaggtcagtggggaggcggacttacaagtacttttagtgctacttttagggcggtacaaagttactgaaagcctaggaggtctacttaactcggcatcagatgttacataaagtgttatggaggctgacgtatctgaatttcagcattgcttccatctcctctggtaactggccccagtaaacctatctaacattattttctagtgtgtctatattaggattctttagagaaacaaaaccaataggatagggtgtgtgggggggtatgtgtgtgtgggtgtgcgggtgtgtatatgtgtttgtatggaacctgagtttttgaggaggtatttttaagcttgaattgaccgaaattggtcatgatttcagggaaggaaaaattgaatcacaggaagggttaagagaaaatgtacatgtagagggtgtgagggagagggaaaaattcattgtgattttgaagttcccagtttggaagatggagtaaatgaatcagatatgtcaggaaacacatggaarttgagttttgtatatgctgcatttgagatgcctgaggagcagttaggaatgcatatctggagaacaaagaggtccaggctagggggaaagtgaggtcttcaacttaaggcctgtgatggagccaggtgagaagagaacatctaaggacagcatgtaaagctatatgaagccctaagagtgtcaacattccttgccctataaatgtttgattgcctgattagttatattcataatgagttctatgtgaagcaaaagaaatgggaacatttgattaatctgcaagattccattgacattctcaaaagtaaattgtcatatgttaaggcagattactaaaatggaattctttatgtgtatcagcatgactgagcgagttaactaatctgtttgacactcagcactcatctatagacaacccaaccccatgattggtcctactatatccacgcttgtcttactataaaggaaatctctatgtagtagcagcagaacttttttttttcttcctcaactaaatgtgatgtcaatcctgtataaaatctcacttctttccttggtccctgccaacctatctcatgtctttgctcatttgactccagctgaaggaggcttctttctgttcctgcccaagggcttgtgcatatggtagttactcaataaatacttatgaaatggatgaatgactctgccttgtagatttgttctgagaagtaaatgtgaraaagtatatgaagagcctagtgatgtatctggtacattagagatgtgaaataaatgcctcttttgaccattttaattttttgtttctccaaatctgtaatcctgacatttctgtcgtcttctgctgcaatctactttcccaacccttctcatccagccagcttactgtctttggtttcggcacccccacaggccacggaccatgtatgatctcctcagtttgtacttcagtgtgaactgaagagatcacagtttcatacacaaggtttttcatacatgtaatctcttgagttaccctcttacacttcaataattacatayggattcctagtcccaaggacactgagcatataagtcgttgtgctggagattctcagaagaatgggtgtcctctggggacttggtcacagacctaaaaagggactctttaccagtcacaaagcactatcatgatcacacccttattatatggatttggaatcagcacttcataaattgtagccaacattgattgaacaccaaatatgggtcaggcagtgttctaagcacgttacatatatcacttgatgagtttggttttattggtattcctgttttatactcactaacttgcctaagatcacgctgctactgatttgcaagttaggatgtaagcccaggtggtctagtttcagattcctgtccttacctatgctttttattcaatactgcctcagcagcagtttcagggtcatagagttaacatctgttctttagtgtttgattctagattttaaaaataatttaccattttagttttcaaataattctaatagtttctttctactcttttacctaccactttaagtctttattcccatagggcagctactgttaacaatattttcagaacctttttcatcataatttttttgtaaaacatcttagtggctttgtgattccccctttcagttgtttattttctgaaagttcagcttattcttagttcatgaaagttttaaataccagtggtccaaacacaactccggtatgttcatgtgtgtgcctgtggatgttccacctgtgtccgaggcagatttttgaaattaattaacttcttacctgtttggaacttatttacatgagtttctgcctgaaggagatgtacttctgtttgaaaactccaggttgatgaatttttcgggttgccaggactcaaacttatttgacaaatcatctatgaccctatcaccttgatgctcagaaacaaatgaaccaacagcccttcctgactaaggaaacaggttttgatggagttttcaatgcatggctttatggactcaagaatcaaatgttttctgaacaatgtgaagaaagttttgtttctagatccttatatgttcctgtgtctccttttctgtagaaaagctctgcaatttttaatcagtaacacaaaaatgcctccatggaaatgtccataattctcagcgtgcagtggaacattttccgaaaaagtgaggtcaccagaagcacagagcagagaaatcccagatggcactaatatttgatttcatttttagcacgctcatattcagcagatggattggaaggctgacctctctgacacttctgcatcactgcctgctactccaattgcctttgcgaatgttttttcataaggcatctcctggtacctcagagattgatgcctggtcgcctgcctgtgttatgcttcatttcgccaggattctgtgtggttgagagttgctgtattctataaaaggggaaatcctggctcatcagtatctcaagcttttcctacagtctctcaaattgcgtgtaacrtctcggagcatatcattttagctttctaggtgtacccctgatttgtatccatctttaacttatcctagtctaattttctgccctcttttgccatcaaaaataatagcaaaaacctcaattacttttgcagcaacctaaatagctaagccaagaataatgtaaaaaaaaagttaaatgttttcaaaatacctactaagtacaaaaatttgattattttaatatgaacattgctgaatctcctccttgagctatagtttcagtggccaaaagcaaagacctgagttagagttcccaatcatgctgttttctttaagggtaagctctactttagagtaagtgtcagttttcttatttgtaaactagtgatattattcgtgccaggcagttaggattgatgtgaagattaaatgaagaaatgaatgtcatatggttgtcacagtctgtggcacagagtaaatatacaaagaatattagtttgtggtgtgcaaaataacttttgtatgtataatataaataaaatataaaataaatggtaaaattattttgtttcattattacttagattgtgagtaaagtgaaatgttaagaattttttaatgttcacactaatgctttattttaaaactttctataaaattactgtattccttgttatggaccattatgttgtccacacatctatttagagatgaccctcttctccctcctaccctcacctgctagtttatatttcagtggcgtggctacagacaaggaactatcagataagatgagtatccagtgggtttttttttttttttttccaggcaggttgacctatgtggccatttgttaaagttctctgagaatgctcaattctgaggaggattaggttgctatgtccttccaggttgcttgttcccacacagccagattctggtacatatttgaatgcatagcatacttttggcttagaaaacattgcacatttagtagtcattttgcttgaatcagatctctacctgatgtcattttgatgaatttagggtttagatgactaaattgcagctttgttgtgaaactttctatagaaagttatttttttcctttttttaggtctaacataagrccagactatgcagactccaatttccacgacttcaagatgcataccttcactcgagtcacatcctgcaaagtctgccagatgctcctgaggtaagcctgctcagtcctggttttcagtttaaaggaactgatataattgctaagtgtttcagacttttctaaccttctagccaataggttctaaagtggggaatttgccttagcagtctggatcccacaaacctttgccaggctttctgcctggacagtcctttcagaagctctggcaagctcgtctccctctaccragggggtaccttgaagagcactgttgatactttttttcttcttcttgcagtaatttcatatgggcagaattttgcaccgtttaatataccactttcttatttcacctttcaggggaacattttatcaaggctatttatgttttaagtgtggagcgagagcacacaaagaatgtttgggaagagtagacaattgtggcagagttaattctggtggtaagtcatgtttattgttgcaattctgtttttaatgaggacataamatttgctaaacataattaaggcctaatttactctgaatatgtgtttattgtaacatatctgcttttgaaactattayttataagcacaattagaaaaatgcttaaaatttayrtgagttttctgcataactttgttttaaattatttaaaatttgtgtgacttttatacatatcttggagacagaggtcttcaagagggagttggatggtttcatgtcactcatttctttaaaagccctaaataaatgactaaaaccatacaaacatagccraaaaaatagagtaacaaaaacaacagaaagaatatattcttctatctttagttcttaaatttcctttttattcttttaaatatttagctcaggaatgctaatggctccagaagtaaacatcacacagactaattcatgaattaatgaattgaatacattgtcattttgcagcacttaaaaaagagcatatatcttttgggttttatgtaaatattttccccttggtttttaaaaataatgctgcatgattgttacatgagctagtttctaagatggctggcagttatgcattcagtagcctattgcctctttctgctcctcttgggctctcttccttgtctttattttctggcttctttattcttccctttcttcttttttctctttgtccttttcccccragtttctctgtgtttttatcaataagacctttcaaaatcagtaaaacttttgaacacaagaaaggatctttaacagcttgagttcaaaaggtagccatgtcaacctttgattttcccaaaggaaaaggtggacattgaattattttggataatgtgaaaaagagtgaaacagagaatagctcatttcggagctgagttcagaaaayaggcaattgtagaaaaggtgaatcctattagacgactgagatcatagcacattcctctcagacattttaaaaggaccctctgtgccattctctgtgctaggcatgagcagctataaagtgacagaccttggcatgagttgagcacctacactgtgcctgtcctgcctgggtgctctactgggcatcttcttgcatgagctcattccgtcttcagaatggccctgcacatttactgatgggggtcggattgcttatgcagtttactcaagggctgttaaataaacttacctcttacttctgtcggaaagtcagaaacagtttacagagttgtaaaatataatagaaataaaaattattgttgttattctttaattgccaccccaatagaatttatcacttgaatttttgttgttccatctttatatgccccattctttaatctctttggagacagttaacattttatttgctcatagtaggctaatgtttatataaattccaaggccctgtcttgatgagatgatatctgtgaagaatgtaaaatgatcccatagttggcatggttctaaaggaaatagtgtaggagaatagtttagagtcaagcagagatggttgaaatgctagctttgcrccatttgttagctatgtgagcttggggaatttacttaaatattctgagcttttgtttattcattttgtaaattagacgattattatgaggatacagtgagataatgttgattcttaccacagtacctgagcaaagtgagaacttactattttaatctaaggtgatatagtgaaaaatcaggtttttttttttttttgaaagacrtgggcttatttagtatttttattgttttcatgatctggagtacacgtggatgggaacgttaaggagcaccaaactttaaaataatacgcaagtatggcattaaaaggacataaaattttttaacttttacgttataaaagtcaataggaaatcrttgaaaattcctagtctagtcaaatagaagagtcatatattctcagtgtctgttcctaggtaattatttcaatgtactctgtccttacataagtcattttgtctatggcagtaaaatctacaagctctggagtcttggtctgtttgaatcctagcttcacaatttactccttgggtgattttgaactccatttacttaccctttgtaagtattggtttcttcccttatgctatggtttggccctgtgtgcccacccaaatctcatcctgaattgtaatccycacgtgtcaagggaggggccaggcaggaggggattggatcatgggatttcctccaygctgttctcatgatagtgagtgagttctcatgagaactgatggtttcataaggcagtatttcttgctcttgctctctgtctcacttgtcaccatgtaagatgtacstgcttcaccttctgccatgattgtaagtttcctgaggcctccccagccatgtggaactgtgagcaaattaaacctcttttctgtataaattccccagtctcaggtattacattatagcagtgggaggacggactaatacagtaaattggtacccagagtggggggcactgctataaagatacttgaaaatgtggaagcgactttggaactgggtaatggatagaggttggaacagtttggagggctcagaagaagacaggaagatgtgggaaagtttggaacttcctagagacttgttgaatggttttgaccaaagtgctgataatggtgtggacaatgaagttcgggctgaggtggtcccaaatggagatgaggaacttgttgggaattggagtaaaggtcactcttgctgtgttttagtaaagagactggtggcattgtgccccaccctagagatctgtggaactttgaacttgagagagatgatttgaaattggaacttatgtttaaaagagaagtggagcataaaagtttggagaatttgcagcctgatgatgcgatagaaaagaaaaacccattttctggggagaatttcaagcttgctgcagaagtttgcataagtaatgaggagctaaatgttaattgccaagacaatggggaaaatgtctccagggcatgtcagaggtcttcatggcagccccttccatcatggtcctagagtcctaggagagaaatggttttgtggactggatcaagggccccactgctgtgtgcagcttaaggatttggtgccctgtgttcccagctgctccagccatggcgaaaaggggccaacttacagctcaggcctttgcttcagagggtgcaagccccaggcctttgcagcttccatgtggtgttggacctgtggatgcacaaaagtcaagagttgaagtttaggtatccgtctaacaaagatctaataaccagagtctacaaggcacttaaacaaatttacaagaaagaaacaaacaaccccattaaaaagcaggcaaaggacatgaacagacacttctcaaaagaagacatttatgcagctaacacatatatgaaaaaaaaagctcaacatgactgatcattagagaaatgcaaatcaaaaccacaataagataccatctcacgctattcagaatggcaattattaaaaagtcaagaaacaatagatgctgctgaggcagtggagaaataggaatgcttttatactgttggtgggaatgtaaattagttcatccattgtggaagacagtgtggcaatccctcaaagacctagaaccagaaataccaactgactcagcaatcccattactaggcatatacccagaggaatagaaatcattctactataaagatacatgcatgcgtatgttcactgcagcactattcacaatggcaaaagcacggaatcagcccaaatgcccatcagtgatagactggataaagaaaatgtggtacatatatcatagaataccatgccgacataaagaggaatgagatcatgtcctttacagggacatggacggagctggaagccattatcctcagcaaactaatgcaggaacagaaaaccaaacaccacatgttctcactcataagtgggagctgaacaatgaraacacatggacacagggaggggaacaacacacactggggtctgtaagcagggtgggggaaaggagagcatcaggaaaaatagctaatgcatgctgcacttaattcttaggtgatgcgttgataggtgcagcaaaccaccatggcacacgtttacctatgtaacaaacctgcacatcctgcacatgtaccctggaacttaaaataaaatgaaataaataaaataaaactttaaaaaatgcttattgctcatggccacttgtcttcaggccataaggaagttgaaagttgactgcatagaccatgaaacaatgttcaatcactttggcttttgtaagcttacctttttaagaatacttactgacaaaatttgatttaaaaataaggattcttatctctagagtcttcctagctgtttaactcagctttggcatgctgccttgccaacaactcacttgcacttataatttaattgtagtgacatagacagcagattttcaaagaactgaaggtggattttcaaattcctcagcctcataacctttggtgtgtgatcatcctggcccaccttcaccaagaatcctatcaagtcagtttagccggaatcgcccttatatgtgatgtttcctctcactaattttccatccattgacctcaccctcctccttggctataaatctccacttgtccatgctgtatttgaaattgaacctggatttctttctcctttgcaattgttcctgaataaaatctgttatcacaacttaaaaaaaaaaagagagagaaagaatcgagctttgggaagctctgcttagatttcagaggatatatggaaatgtctggatgcccaggcagcggtctgctgcagggtcagggccctcatggagaacctctgctagggcagtacagaagggaaatgtggggttggagctcccacacagagtccccactgccactgcctagtggagctgtgagaagagggccayggtcctccagattccacaatggtaggtccacccacagtttgcactgtgcctggaaaacccgcagacactcattgccagcctgtgagagcagccaggaggggggctgtaccctgcaacgccataggggcagagctgcccaagaccctgggtgcctacctcttgcatcggtgtgacctggatatgagacatggagtcagaagtaactgccctgctggatttcagacttgcatggggcctgtaggccctttgttttgatcaatttctcccatttggaacaggtgtatttacacaatgcctgtacccctattgtatcttgggaggaactaacttattttttattttactggctcatagttggaagggacttgccttgtctcagatgaaactttgaactgtggacttttgagttaatgctgaaattagttaagactttgggggactgttgggtaggcatgattgtgttttgaatatgaggatgtgagttttgggaggggccaggagcagaatgatatggtttggctctgtgtccgcacccaaatctcatctcgaattgtaatccccataatccccacatatcaagggagggaggtgattggatcatgggggcattttccccatgctgttctcatgatagtgaataagttctcaggagatctgatggttttataaggcagtyttccctgctctggcttgctctcttgcctgcctccatgtaagaattgcctcttttgccttctgccatgattgtaagtttcctgaggcctccccatccatgttaaactgggagtcaattaaacctcttttctttatgaataacccagtctcaggtatttcttcctggcagtgtgagaatggactaacaccttgtaaaacagggccaataataacacttagattttaaaatctttttaagcaaatacccctatttagtgccaggtactgttctcagtacagctgctcctccattaatgatggggttatgtcctcattaagccattgtaagtggaaactatcgtaagtcaaaactgcattcaatgcacctaacctattgtacattatagctttgcttatcatactttaaacatgctcacagtacttgaaatacagttgggcaaaaatcatctggcaacacagtacactgtattgtttgcttccccttgtgatttcgtggctgactggtagctgtggctagctgctgctgcccagcatcatgagtgagtctcattgggcatgttgctcgcccgggaaaatatcaaaattcaaatattaaagtctagtttctacggaatgcatgtgactttcataccgttgtaaagtggaaaaatcataaatgaaccatccaaaattggggaccatttgtactttaccattgttaactcatttactcctatataaattctgtgaagttggtattattgacatcttacagatgagaaaccaaggcacagagaaatatgcaatctgtctaagtttcttgttcaatacaaccaagattcaaatccaggcaggccagcccctaagtttgttcttaccactgggctctgctaccagttacatgaatgatctgtgatgatgatatgtcagatgtgtcaaaagcccagtactgaatcctagtaagtaatcatgtgcttgcctttctcagtgaaagggagtgattttctaatggttttttaggcagaacactttaattaaattagtaactacccagtgtttttaggtttgaatgttctgtagtgctgcgagaagacatgcatccctggggaccatacctaccttcttcccatggaaactctcaagaccggatggacttaagacacattcagttctagggcctcttattttaagatgaagaaacaaggtcataaatatatgaaaataagataactaagaataatactgttagtgccctgcagattgtagataatgcttactaagatatcctcaattaaaaagtagcatcattctctaaactttggtatgtaattcattacaaagcaggaaaatgtttttttaaaacctctggctaaatttgctttttggagtttgtaacatactctcttgctcttttgattcttttccctgttttgcatatttccattgacctccattccccttctgttttatacgttggtgccctttctctccctctctccttcttttaagttctttcctgctcaagattttgagagaccrgtaacaccgaatgctcatagttcattagcggtaygaaatggtaaggacctgcctaggaggcttcctttttttactctcagatyggggtttgctgggtagcccttataaggggcartgtctttagggggaagaagaatctctgtatcattccatcagtagcctgtaccttctgaaagctggaagccatggcatcttctcctcaccctcattccttctcaccctggtataggtggtaactgtgggtagagtgtgagtttgagcttggtaggtctgatgtgagtgtggtaaagtaggtactattttgaagtcttgggcaagctagactttatgagctgcttctcagcttctcaagctcaacattgacttaagtcttgtgtgatcctttgggcatccaggaataattgcttgctgcagttcagtaatatagtttttcatgactggcctaggatttggaggaaatgctggtgtaggggagggcaggaaaagggataagatatatccaggggatggagacttagtttacttgaatagggcttttgcatggagaagagtgtgatatgatttcagcagaacttgactttgagggaaatcatttcaacagccaaattgaaagcaagggagtactactgacttaagacaaactcaaatgtttacatagatcagacccccccttaatattaaatcataggtggtttgaaattcacccatactttacagagctttatagcaataatgtttaacatagtctaactatactctcaagcaacaaaaagagatcctgattggatcagtgtggatcaggagtccacttgtgatccagaaagctatgactagtaggagttgttataaacattgcatagttggcgtgaaaggcaattccaaaaaggggagtaggcagaggttggttaatggatacagaagtacacccagatgggaagaataaattataatgtcctatagcactataggctgactataattaacaataatttattgtatattttcaaatagctggaagagcagattttgaatattcccaacacaaagaaatgataaatgtttgaggtgatagatatgctaattatcttgatttggttgtaacactttgtatacatatattgaaatatcacactgtaccccataaatatgtgtaatactgttggttccctgcagattgtagataatgcttgcttatacagatatcattgattaaaaagtagcatcattctctaaactttgttgtgtacttgattacaaagcaggacaaaacattttaaaacctctggctttgaatgtgtcaattaaagataataaaataaaaaatttaagagggggagcatgctatctttattcaacatcagacttgtttatagaaagggatagtcaaatggagaagaggtactagttgtacaaaatgacagggtaacccaggggctcaatgagaggtagataatcttttactctaccttttaatggacagatccatggcacatcacatttaggccttaccttacttgacctttctctttcatttaacactgctaatcatcctccttgatgctatccttcacaacccatcatgcgcccatgccatcttytggaaatmtgattgactttcctggtttagctacarcccacaccccaggtagataaaggtccatctgtgcatgaaacttctctcctgaagtatgaattttaaattaccatcttctccttacatatcccctcccatgcgtcttgcattgacctcaaatgtctcatgactaaaatcaacctcattagtcattaccgcaaacttccctctcctatgctttgtcttagttaaaggcccaccatccaaacactcacatagacctgggtgtcarcgtcttccacatcttgattcactttcctgttcttcttrgctctcctcctaagtctctctaggatgcattgataatggtgttgatatacacagaaaatctcattgtctcttgcttgaacaactcaaaagtttcctaattccctgctcttaatcttattcttayataatttataaaattatcttccgtctgatggtttcattctttcacatactgtactttacatttcttacagaataatgtccaaactttccaatatggcctacaaagctctaagtaatttgtacagctcattttttaccacttcctcctatcccccaacctataacacgactctctttaactactcacagttctccaaccagtttttttatgtctgtgtatctacatgtattttgtttttctattttactgtctttccttcccttttctgtttagtaaacttaatgttcattttcaaaaagtcaatgcagatgttgcccccactttgaaaaccttttctgacactcctaatgcctgggctttattagtctgtcagtcctctgtgctcccctgacatcatatgtttacttttatcacatttattataattgactctatgttcatctcctcaattagactgcagccctctcaatgataggaaccatacctaattggtgttttgacctcaaggaagtagtgaggaatggagtgagtgaatggatcaacaaatggacagacaaatgagtaccactgtagtgtagcagggcttctgggccctgaagatcactataatcttagaatcagaaacaggagagtgcaggggattgtacagttttggttccaccttcgtagagactagagcttgactagattgtggaaaagtggaataaaaaccttacctgagtccctggctggtactttatgaatgaaaggtagaaaattaggtagaccttttagattcctttctagtatttttgcaaggaaaggctcatggcctaagcatcgattgttaggcctttgagaggagacacctgggttagattaataagtagcaagaaaatgaagcaattcacagaatgcttgatgacaaaaatgcctccctttctgaaaaaatctactgcctgatccagtcgatccaattgttagagttctcacttggctcttactatttcctctgcctgaaacatgctcccttttctccgaacagttccaaggaccaccctttcattgctttctgtccaaactctttgccaatcattaacygtaccttgaccatccaatggtagcctgaattaaattgttctctaattatttctatgtaggctttatgcatttgccaaggttaggctgttctgtggtaactaacaaacccccaggtcccattggctttaagatataaaagtttatttctcacacatgcactgtttactgtgagttcagtggcccttcagagtagctcccttctaatcagggaacccagatcagtttgatcttgtgactttgccagcttgacacatgggttctagggttgctgacttacagacccatagcctggaagtaagcagtgccatttttcatcaagtccattggctgaaactagtcacatggcttcaacctaactgcaagggaagctgggcaatgtaatgaaacacatggactatttggtgtctgtctctacccctgttagattatatgctcctttgctgttcggaatatgtttctcatcttttgtgtccaccccttagtaccaagttcagaggagtggcacttaatatcatgttgttgttgctttttcccataataggactatttcaaccagaatataatttttaatgatgttataggatgtggctaaatattattaagcatttgaagtatctcttaacacttctttttgttcaagttagccctttttggatgttgtcttccttgggttggaaaaccttctatatttcatgctctatatcccttatattaatctagtcttcattcaccctggaaatgataattacttgacaaaaatgcagtgcatttctgaatgaagcacctcatttgtattaatatgtgattatgacagattattaactcaagtgcatttgaagtatgaaaaaaagatgtgttaagtttattttgttaataagacaaactatgcaacttggaaacaaatttgaatgttggatgattagtttatgtcttaacatttgaggatgtgcatggatataaarggcaggcagttccactctccttttccctgaacttgagttgacttcttcacattcactatggcaacctcaatgatcaacacatacaggagctctgaagtgcatgccaaaactttccaacgttaataatgaataggtatgaactccactatgcaagcttctctgaacgagtmactgcaaagctaatgtaattttagggtgtcgtttccttctcacagtacaccaccgcgaaggtctaatcccagacagcaatctttatggacatttgcttttccccycactacactacatgactaagcccctttggtctccacttcttactctgacattgaccagtatagcttgctttgcatcctctcagtttaaacaaagtaacattggaagggaaatactgttggagcaaacgactttggtataatgcatcttttcctttagtgagaatgcaagcctcagctgccctaatatttaactgaagcagatccccatttgcttatctgtttaattgcacttttatctaggccagctgctgctcctgctgctgctatagccactcctaattggaaggacgttgctgtggtatcctagtggtttaaaactgagagactgctacctagaacctgcacccacattggtatctgaaccgggctcctttataaatcatattttacattttaacataaaagataagctttcaggatacaattttatttcagccttctactgctaggcattttatcacagtacttttacgtgagctgaagattgaccattgatttcataaccaaaaatgactttagttctgcataatattacttaaaactcataaagacaattttatacttgagtagttattattccttccatctatttgggtcagtttaatggtacattaataattattaatgtgaattggaatctattatatggttgtattcctattagagcccctgaaaagacttgaaatcaaagcctctttctaagtattatttatagtttatggtttgctttattttctttttaaaacattgctgtatatctgagtagtgaacatagcatttgtgaaagtgaactttctccaaaatttgatcagtccaagcattttttagttgtaatgtctcacagaaatagcactttagtcacgatgatagggtaccttcaaaaactgtactggtaattacttttctgtggcccctgttgagataggcagtcttactggacattgatgtgtttartctgaatagaacttcagataagagacaaagcaaattgtgcaataatgtatgaattgagagccacttgtattgaaaaacaaaataggacagaattttatatttaaacaagtaaaaattatttaaattttcacttgaaatttaaagcttccatgaaaattgtttctcttgcaccaataatgcacattgaactctgtgctggcattaaagatggagttctgcaaaggctccaagcacctcagcaacaccacttctcagaattatattaagccagttgggacatgatgaaagaatgcaaggtataaaccccttgagggcccatgagtcaccatctagaaaggttcttgaaaggggaagaatgttttatagtttgatcaataggaatctgagaagtaggctgcagggtaaatataagttgaggattaaaaacttttggaaacttgaagaattgaattacaatcctaagaaagttcccaggagaaaaagagagatacagaaagagagactttttcatcccatctcaaccagcagccaacctttcttctaggtcagagtacagccaaaatagatttgatgataatcagccctaattatctcagctctattgcagaactaaggcatgaacagagttttctagagatccaagtgcccaccatagtagtttcaggtggataccaaaaggaagtaaaaatggggttgcaggcttcaaaacttagagcaacttttccatagaatactccatacaaaaaggtttcttattccattttttcagccagaatgaaactttactttgaaaaatatatgtattttcagtgttgcagttgggttttcctttctctccttaccattattttagtgtcagtgaacaggctattgcattagtgtgggtatgacagtttagattgtgtttataaaggaggcagtctgtttaatggtatagtcactgtcacaagcacaaaagcataaatacaggagcctggctaagaatttctgaactcagcagattctaagagttactgatactcctttgggttttgccttattcttagaaaatttacagaatcctaccatgaaacatgattaaataaaaacagacttctaggagctgctatttatgtggcacactcagcatgatcagatcagagtgcaaacagctctatgccgtatccatgaatgcagcaggcctctccttggcagagggtgaatgtggtggccatgaggacaggaagggatagcaaggagaaaggcaaaggggaagccctactaaaggactcatgcccttggagttgcatccagcacaaagccccttttcaatttttcctatctgggttacacagagaaggctttgtgtagagcatttcttaaagcacccaatcagaaatgtgaggaaagttgcttctcttgatgagacaccagaggaaggaagcaggagacaatgacaagggaggaaataaaggagggatagctaagtaaggtagacagctaagtctagtttgttcccagtgttgtaccagtctcatcagtgccgtgtctgggtctcacagcctctggtgttctatgatggatcctctcttctgccaagagctggccacctggcagccaaaccctgcacaagatatgaagagcctgtaaatgcaggacttctgttcctggatctgctcctctgatgaagaggtgcaagtgtctccgtagctacttgaccaccgtaaataccattgtttcctcttcctgggggtcacccagagaaccctcatggaacatggtgtgacaactactgacacatggggttatcataggttttatgccatgaataatacatttaaagtatgttgtaaaagacttactttgcaaggacctaaaaacacttctatgggaagaatcagaaaaaaataattatttttgaattgaaattcaggtgcacactcatttatgaacactgaacccaaaagagctgaggtttccccaattttggagctcgtgtagaaagctttcctcaatctccttggatggaaaacttaaactgctcccactgtttagcacttcctgcagtttatgactctcagttcaggctctaactcaccagtaggggaatagggatattctggtgtatatgggtctttctgggcaaaccagtgaagcaagtctcacagctgttctgtcaagaacccaaattcccctaacctgggttctaagactgggccagccaaatggcacttttatagaacctcttcccaaaccagcgctcttgggcgatctttcttctgaaacgttatgtgtttccaatagggaggaaaagaagaaatgaagtaactttttgtccaggaatactcctttgtaaaggttgatttcagggctagcaaagatgccttcatagaaggcagttatttgtgaaagccaaggtgatggggtttgaaattgacaaagggatgaggacttagcttttcttctgaaggtgactttctgcccatggatcttccatttccattaatcagaagtattcgttaaaaaaagaaaaaaaagaaaaaaaaaagctagagagaaaagaaaaaacaaaccaacctcctgttccatgccccaggcaatcttcttgtgtaaagcaatctgtggcagctagtcaggtggcctggcaggagttttccccttcaactctggctgggagcttcttagaatctcttaaagaaacatcctgcagagctcccacttaggcctgctctttctgtcctgatgtctctctgtggcatcttttcagatgcttctttagaggatcattttggatggggaaggtataggcctgggcttatgatgatgagggatttcctgtctgtctggagaagttagaacatgtataagtgctcctgggtatggggaaaggaggcaaagatgctgcccaccagttttccaagtgccgtgtgcgcccttatccccagaacgatcctttgctcttctactatagtacgcatttgaagatctcagggcccttataaccattaggcatttgcagggcctgaaatgtaatgaaggaattgttcttcctatttctggaggtaaactaaatatgaaaagaaaattagcattaaaatcaatcctgactcagtttttttttaagttccatctttaactcaaactgtatttctgccaaaattaaaaataaaagttatagccacttaacaaaaaacaattcacacgaaatgttgtactatgtataatttgctattgttacaaatcgtcaatgcagtacctttgttagcttagtgtttttagattcttaaaacgaggcatgttgaaagaaaggttgcatttagctttctcttatgcctataaatttagtgtaagcccctgttttaaggagctttatgtggtaggactgacattgcttaataaacaatggaaaaagttaagcataacctagaagtcatttaaaactgtgagtcactttcctgacaagccaatagggtaagagaaccaaggttgcaaaataattactagcccagcctgagggaccgtggaaatatattacaggtatcagttaagaaaacaaagcagtggtgttttaccactctgcagagaaagctaaggttgctaaccaaacaaaataactttacactgacaatgccaatttttacatttctttcagaacaagggacactcaaactaccagaggtaagattaacattttaaatattttttataacctttgcatttcaagttgtttgctaacttaaccaggcttgggcttttacactgttaaatgtgccttttaaaataaatagaaataaacagaaacagagggaacaaccaagtgattgtgaacaaaatgcaaaagttaaatccaaggaatgttcactgtcactgtccgaaggtcttaggtagagaaaaaatgtgaatatttaatcaaagactgtgtatgaaatgggactgtaagtacagagggaagggtggcccttatcgccagaagttggtagatgcgtccccgtcatgaaatgttgtgtcactgcccgacatttgccgaattactgaaattccgtagaattagtgcaaattctaacgttgttcatctaagattatggttccatgtttctagtacttttccattagagcagaaagatgatgattatcacatcctattgatcaaatgaagatctagtaacatttccttttggtttaacatagagtctcctaatggcttagaagtatgtaatccatgttacctctcagaataaagttactttaaaaatccaaaaaaaagttatttaaaaaaatacaraagatgatgggatatgtaggaagtaaacagcaagttgcccawcattaaatactttcctgttgaaaatactgtcaatggtgttgtttgatgttgtttatatagagttccccaaaattataaaatttcagacagaaaagattttaatggttcccagacaatcattgccttgaccttcaaccaaaaataacagatttcttacctgactgcccctccccacaaatggccatagcaaaacatttttagaaatcatagaaaaataaaatacaaactatgtgtgattagttatatgaaccaaaagtacagtaatctgaaaatttcaaagtaacgatgaaaattatgatttgtaaattaatatctaacaattaaaacctctctttaaaagtgatattagtatgtttttaatcyaacatctagtaaaaataagaaaaagtacagcaaaatataagaggtgcttgtctctactttttgcataagtacataatttgaacatataggatatcaagagtgtgatataaagaggctcatatgcacctaatcagtgcatctgttgattatattttaaaacctaaagtctagaccaaagaatgcataacaaggtgatttttttaataggccatatgagtttctttagagctaaaataaattaaccaaagagttcctttagtgtttcattgacaggtaagatttttcactagggctatcaggattcttccagcagtgccaaggatcttgcaaagcagccttctttcactttctcattgctattattatattattgagaaagaaaccttgtagagttctgaactttacctcagtgttacttaacacttatccttttagatatatatattattttttccaaggaagatggtttcattttaattaagtaatgtgaagtgggtgtgcttacagaaagaaaatatgccaataagaagtgggtaataattttcatgtgatactaaataattctcacaggcacttttatactttttaaattacatgtaagcctatgatacaaggaattaattttcacattgatttttaaaaatatataacatcagttttttagtgacttgtttcactcttcaatataagtataatttttatttactgtgtgactgtactaaaaatctctgttttgtgtggatggaggattatagtaagctctgaggctagtcaatccatttggaaacttgagtttgttttaagggagaaatacagcaaactaatattaagaagcagctctcaccctataccaggtgtgttcactctccaaggcagatgattgtatgctgctcaggaatcttctcataagtaaatagtgaarcacttttgtaatttgtaagctctgtgatttttattttttctcctctcttgaagaccttctttctctccatgtaccagtttataggcctcctctgcttccctttcaatagttatgattgtgaattttttttaaattttgcactttatttgcgaggtaggtcagttttcactagccacagaatccgtggggcgtccataaccatacctgggctgtacatctcacatcccattctggagtggaccttcggaaagttcctctggctccaagaagcaagtttatcattgcatacatatttagctactttaaatccmtttttttttagagggaaagaaagataaggcaatggtaatgaggcaagaaataactgccaagtgcttatagaattgagtttggttcctgccccccctccccccgccacccccccaaccagcccaccattgttaggtagatcaaaggagactgagaaggtcctggagactgattctcatggtggtgtgaagctgtaactgagagctccaggggtggctactagatgtgtcctctcctcctttccgttctcttcctgctggggacaagggcctgtccagctccgtcctagacttttgagaatatagattggggaggggagtatacgcatagagatgacagaatgacaaatgaaatttgcactttaaaattgttcaaaatatgatctgctgaacatctccaggtttttcaatataaaatactttttaggttcttttaaagtataaaaaaatcttagcctctccaaatgcagttggtttaggggcgtgaaaattcctccgatgttattttttaaatacaccagttcatagtttattccactgcacacccttcctgtagaaaggtttctgttttcagagtgactgactttcagtggattttcaggaggaagaacctaaagtataagtagtaaggcaccaaaagagtagaagaattactttgtgtgaatttaaacatttaaaataacaaaaagctaataatctatcacttaataatccttaccatgtggctgtaactgttccaagcatttaaggtaaattaactcatttaattctcactgcaaaacctatgaagtcagtgctagtattatctccattttatagaggaacaaacaggcacagagatataaatttaactgtttgtgttcaaactgaatttgaacttagggagtattattctagaatccattctcttaatacttgcaatgtgtagcctattttaattctaaattcaaggtgtaagaacacagagttgctcttgaagtcagggtccccttttcacattttaagtttatagttcctacatgggactaatttaggcattctaggaatcaaaccaaagagttaaattcatttttttttgccttcctagtactttgatagtagcaggtataaaatcagtagaaagacagcttctattgtgcattaagaagatgatgggatatgtagcaagtaaatagcaagttgcccatcattaaataatttcctgttgaaaatactgtcaattgtgttgttcgatgttgtttatatagagttcctctaaattataaaatttcagacagaaaagattttttctttaaattagtgttctttcatattatcagacatgagtctgtaactcattatgcttccaatttttgtgccttggctaccaacaaatctagagcaaaattttcctttcattcacartgactcttgttacagcttttctagtgcagctatccatcttgctcarcatagcttcaatgctgattttaatgatcctagcagtcttttacaaatccatgttgaaagtagttggagtaaaaaccaaaattacattttaaaaatttctccaatttgctttcacctgagaaccctgcaagtctgctggatatgactttgaggcccttaggaaggctggaaaaaaacctcatttcwtccatttaacttgtgaatgaaaacaacagaaagaaccctgagagaaatccatggctaatgtgtgcttagcacagccaagtgtgctctgaatgaaaccaagtcttcacacacagatacaaaccccaacacataaaaagaaaattgcttttgtgaaaatctagattgtatgatagtcatagactcagcatttcatccagttgcataataaagaagtgaaatcaagcccttcttaattagtgagattactgtagttaggtgggaatgagtttaatgctttagaaataaaatatgtagccatgcattttcatagatttaaaatctcttgttttgtgtttcatctgtaatttttgtaatgcaaagttgttttcttacagattcattttctataataagaattcatttttatgattcacaagctgcatgtctgttttgttttttaaagtgttcagatacaactggtctataattaaaacactattctcatttaagtgttggctaaaatcagagcttcagatctttgttttgaggttgtataccttcttcagtctggtctgtgaggtcccataaatagctgagttagagttttatgagatcagtttaaggctgttgttgctcatatgtcttggctgggaacatattctaaccaagatggctgctgggctttgttctctccatcgtcactatgacttaacaaattgagtcccaatatttggagttggcaaccaaaaagattttttttcttactgttataaggtaccaacaacttatcaagtgtaatgatatacacgtggaagacttactagaaaaacaaataaaacaaactttaaaaccatattctgatcaaatttagtcatactttgacttggaaaatgtgcaacattcatttgctttccaaagtgccagtagtaatacaatttaatagtgcaaaattaccaacacatatttgttttgctttgttttactttactgcacagaaacggaccaatggactgcgaagaactcctaaacaggtggatccaggtgtgtttctgattaaaccttccataattatggcttcagctaagtgcttatgaaaggatatgggaattgctgtggaaagtgaggcatattgttggcctttgttcctcataatttggtgtataatgtgtgaccaggaggtcatggtctaacgtgtaaatcattcacatgagtaactaccagcaactaccagcattgcactctttccacagtcagcagttgagctggttatttgcttactgaacagcctcagggtgcctggttaatgctcacatatccagcaccctccctgtgttcctttgtaaatctagtaagaaaaccagccagctagctgscacttaaaaatcactgttttctaagtaagtaggggagagcataaaccagacaactggtacccaccctccatcagagaaaatttcttaattctatatccatgctattttataatagcagcatgttttttggggactttgtgacaagtttcctctccggagaccaattatttgtctgcagaaaacgttcagttgttttctatttagcattgtgagatttgycctgtcattatgttagtataattatttttcatccattatgcaatgccttctttccacagtttaattaccaaagattttttatgtatgtgatccttttgttgtgwgtaaaaggtattcacagttaaaggattccaaatacacgaacttgatgataaaccaaggggaacatgagaaatagagtagctttgctggaaaataatctggactatgtgtttcattttgttttcctatcataagtggtattcacctagttgtaaagtttagttttcaaagcattatagtttataactgaaaccacacccatggtagcattgccagtttatgagctgtttaagatttataggagctttgttgcctctggctagaaattgcctcacttgtgtcctgagactagtttaaatcttttaactacagaacaaatttgaagccattaaaaaaacrggggttctggtttactttttaatagttctgactttcccaagacwatatcctttgcagaggactccctgcaataatatttagaagtgactttctctattattttcagtaggggtatatgactgtgaacataatatttttgtcttattttgtgtgagttatagtattgctgtttcagaaaaattacttaacctttataagtgttatttttttaatgtattttttctttcttctcccctcagggaaatgcatttttgtatttgtagtatgtcaataggaacatatttgactcaaccatttatagccaaaattttctagaatcccttacattatttagattagtaaattcccagattagaaatatggcaaagtagaacaacaataaaacagatttatactcctttatcctaaaggtgatggctttgtataggtacagtttttttgttttgtttttctatttgtccaaagactttagaacttcatgaagaataaacttacaagagaagtgctgttgtatttatgtttgtaagaacatacgtggctgggtgcagtggctcacgcctgtaatcccagcactttgggaggtcaaggcsggcggatcacgaggtcaggagatggagaccatcctggctaacacggtgaaaccccatctctactaaaaatacaagcaaaaaaaaaatagctgggggtggtggcgggtgcctgtagtcccagctacttgggaggctgaggcaggagaatggcgtgagcccgggaggcagaacttgcagtgagccgagatcgcgccactgcactccagcctggtgacaaagcgagactctgtctcaaaaaaaaaaaaaaaagttttccattacgtataataaatgtatatgagtgtatttttcctttttccatatttttggaaataaaaaacccaaacacttgatgatcttgcctgttgaagctgctgatatagtaagcctatttcttcccacagctgtcttttgatttaggcttgacttatgtatttaaagttgcttgacttttggatttctgcctctttctgctggttagttgcaaagcttctttgttcaaagttaacccttgcttgatgaccagcgtgccttgatcctcatgtggctattgtttagagattttcagacaaaatgtttaaacaagggatcagtaaagttgagtctgcgtagacaaactgcttccacaatgcattatttgctgttagtatttctaccatggaagttcctttgatttttttttatcctacagttaatttacttaacatctccaagtgtcaacacatgactttgcagggcctcacttaaagtggcttataaaagcaactgattaaagagtttaggaggccgggtgtaactacttcaccaggtccaaatttcagagccatgttcaaaggtatattatatatattctctatagcccttttgcactggaaaggaacttaatgmatagtccagtgggtagtaggtgcttaataaatgctacatgaattaataagtgatgatacagtttttatgtatgcattgacattctttctttttaaattcctcctgctgatatgctaatgaaacacagcatagtctagtggtgggaagcatggctctgagccatgttgcctgggcttgggactggccttagctgtttacttgctgtttgaacttcggcagtttgcctcctctctctgtgccatagtttcctcatttgtaaaaggaaatgaataagaggacctaccttacgttgttgttgtgagcattacgtgagctaatatatgtaggccaggcgygttggctcattcctgtaatcctagaactttgggaggccaagtgggaggatcacttgaagccaggagcttgggactgtggtgagctgtgatggcaccactacattccagcctgggtgacagagcaagaccttatctcaagaaacaaaagagcaagtaaagtactctcaaaggtgcccaagtaaagtactctcaaaggtgcccagtatatagtaaatgctaagtatagcaattactatatcaactaatttatattagagcatgttctttaatattggactttttgtcatgtgaaggagaataatattaaatagaccctgaattttatgttgaatttctgttgaaataagaagctacataatcacagtcattttcagatttgttgttattcccccttaatctaatggctttcatgatcttttgcttatctttaccaataaacatagtcaactgtgatagttgagaggttttttttttggtgaaattattagtgtttgttaytgcaataaagaagcaaagaaaaactcccaatattgaaaacatatattgtggggtttattsaaatccaagaaagagtgaactgtaggtttgtgttgtagcttgttagcacatttaaatcattcactccctattaataattgtgattaatctttatagacaatatttgcaaatggctttgctctttattttttcttgtcttctattgtgtgctaataaaagtatcaacttataatcttggctgcttttataaatatagtaatgtattagatgcaaattctggtagctcttttgaatttcttaaatatagcagggaattttcatcagtttgtacttttcttcctaagacagatgttggtatcaggaaaataacacttgtaacagacatatcaattatttcaggaacacggaggtgctaggcctttttcaagaacatgagatcataaatctcaagaaaatctgagcactgatgtaatatttttcacctaaagtggcactcaaggtcaaagttaccaattaaattttaatactgagctttaaaaatttccttctgtctcagtgtaggagatacaagatttatttcagtttgcatgtggcaaatctgtataccagggcatgtattcttttcactgggtccatgtttttagattattgcaaaattgtcttatatttgtggaactcatagcatcctgcatttaagcctacagtcactagcttttaaacacttcaggcgaccattctgtgttgtgctgcctaaagattatgtggagtagatgggaaatgtttaaatagcttacactctttctgatcttaagttattcttgtgctttgtgataaccttgaataataaatgaataggtaatgattaaattgataagagtcctttctgacaactcttgtttctcagatgctcattgttagactcttgattacaaagagttgcatgtggcttagaaaaactgtcttttcttattcaccaaggagatgtcttactgttttgtagcagagacatcttcaaagatggtcacttcctctttcaggtggataggattgacatataacgccattctcatttgttattgtatgaagaaaggaatctaagaaatctttctttcattaccaatttcatttcttatctgacattaagcacaggattgtcattaattataaaacatggcccctttccgcaaagaatttatrttcttcctaggaaaggaatagatatagacacaaagttctgattgcataaatgcatgtatataaatgtacatataaaatttttaaatattatrtactatttttgtgcagatttattacrtatagcagtgtcttaaaaacaattagtgaattgtttaataaacatataaaaagatctaggattacacaatacatacaagaaagcaaaacaaattgggaaacacaaatgtctcaaattgcttttaagctgggttacatataaatgttttcatttatataaataaaaatttttatactggtttattgtattgaattacaatttaatactattgttcttagtgttttaatttcaaaggattgtgaaatttattccaagtctaaacagaattgttgatttcttttagatttgcttttaaatgtaatgtcaatatgttcaatagagaaattttatatttttgtttccaaatagaaaacattgagaaaaataacaacagagtgttttcaaatgcacttatctaaaaatacattttatctcttttcttttttatgagggagacaaatgcatattcctgaaggttttagtaaatgagcttttgtctataataaatagtaaagtttctatagattagaatatttccatattaatcagtcaaacctgcttctgtcttttctatcacctctaaagctaatttctcatcaaatataaatcttaatctaaatattgggagcataattgtaaatgtgtaaaaatatatttcacattgaaagaaatgaacttgaaaaaactgggacagtaaacccagtgattaagattcattgcagagaaatgagaaatccaagctgtgaacaaatgctgaggagcatgctctggtttttaaaatagccgactttttttcaagcttctatgaaaccatggacaataagactagttttgcactaggacagttgatcttcttgtagtcattttcaggactacctttctgattcccttttccgtgataacagatttctgaaatgagcaccacagcctcttgctcgcatctttcttggttggaggaggatttatttctccccttcaaggctcattccgagttcacaaaggatcactacttctgttgtctggcaggtctgtgcatgccttgccaagcctgtcttttatactggtcaggcaccttcagaatcagaacaaaggtgaggtgaatatctggagatgtgcatgggggtgcttttagatggaaaatatacatcagtaatatgactactgaaataacagaatgtttgaattatatttagaacctactctgggccatttatgcacttctaacaatttctattattgtagtagttatgttttagaagataaagtatatatctattaaatatttagaagaaaatcctgaaaaagaagtaatgaacctagtgagctacttsraacatttatcatcaataaactgttccttacttagaacgtcagatatggagtggacttcctttgccatatctatggttatgctggttgaataccattccatttcagaaaaagaaggatatgccattgtaatgctaagtagataaagaaaagtcagtaatttcttatgggccagcaacctctgagaggcagatgattttctttcagcacttaggtctgaagtaacttaaatgaaaggaactaactgggtcaaaacatattgactttgtataacaatwtttgatgcaaatgatatccaattgatttcaggagaggacattgataaagtaattcttaatataatttatgatcttatttatactacagttctatgtagaaatagcaagattattatcaaattaattagaaccctggagtgctatttgtggaatttctgtcaaaatgactcatattggcaattagttatctttcagcatattcaaatcaagttgacttctaaatttttaatttgaatgaaaataaaagcttatgtttggttcttataattgtttttatggatcgtttttcctttgaggctcattcattttcttctatataggtattagaaacgtggaagttcctctgcctttgaggaacttggaattttgctggagagttaagacatacaaacataacttgtcaaagtaatattgtagagtacatgatgaactaccaaagtgtgtcgtataggttatgaatgatctggttgactgtgaaggcagatgagggagaattttttgcaaactgaaggacacaggacaaggaaacaaaatatctaaaacagacatcagtaaaggtaaatttactagaactacatatgtttaaatgaagttatcagtctgttcctaggtttgggtcagttcaattatataccaaccaatatgcttttgattaccaagtgacaaaaatccatttcaaactagcttaggaaaaaaaaaagttttctgacttaggtaactggaattccaaagcattttggcttcaggcagagatggatccagggactccaactgatatcattagggttcagtttctctttgtgtcttagttctcctttctcctctattggcttcttgtcaacatgcacctcacagaggtttttctcatgtggaggcaaagttgtctgttagcagctcttcatgtacattgtccccacagctggttaattcagagaaaatagaacatctttctctcagtaaatccagcagaatcccaaggagagctttaattggcctagcmtagaccatgtgctcttctctgaagcaatcactgcagccagagtgctctgttgattggccagcctggcttctgtgctcacttctcaggtgggaagtgggattgaactagcttgtccacatggaattttttttctataattctgtttacaaatgaataagagagaggaaagagaggcttggttttagcagattaaaatgtacatctattattgtgtgcaacaagtttcagacagttttcatccttgggcatactgtgcctaggttttccacctctyctaccttgtcctttttccatttgtaggatcctctgtttgatagttctctggtatccaaaatggttgatgtggagaagtgaacctaaaataggaactggagattcccaacaaaggtttattccaactggaagctttttgtttgcagtggtaaaagaaaacactaattttcttgccacatatttgatcttcttgtagccctgtcatggtacctcactgtttttagacagtgatcatccttttttctactgttatctactgacatgttagcatagattggtttatcggattagagaactgaggaaacagaacctaacacagcatgttttgtggggacagaattgaagaaaggtgccatccttaaaggaaaggtcaggrtaagaatgtgggagagccagatgatacagctcttaaggcattaaatttaagccactacctgcttcacggcaataaaggagtaatgaggaaagaaagagaaggagagatctttttaaattttatctgtattaaacatrttcatgcataatagcacttttaatctccaacggtagccctgtgtggtggtatagactgagggttctacagtggcacagatctggatttgtgtcctgcctctctactaactagctatatagtcttaggcaaataaacctgcttatcatctctaaaatggaagtaatagtagcagccatctcctagtattattatgaagattaaatgagataatgaagtatcaaccaagtttagcacatactaagtgctctgaagattatgatgatagtggtggttattgatacatatagatacctgtattttctattgctatgtaacaatttaccatgaatttagcagcttaaaacgacacacatgtgttatctcagtttctgtgaatcagaaatctaggcatggcttagttgggttctgtgcttcagggtttcttacaatacttcacttaagatatcggccagggctggatctcatccgaaggctcaactggtgatgggttcactttcaaactcacttacactgcttttcgcgggattccattccttttggactgtgaactgagggccttatgacctggaacacttggccagaagctgtcttcagttctttactacatggacctactcaccatggatgcttgcttcatcagaatatgcaaaccaagaaggtgatagggtttccttgcaaggtggacattaaaatgtataatataatcacagaagtgacatcccatcacctttgccatattcttttggctacccacattcagggaaggggattaagtatgtcagtaccaggaggcaaggatcattggggtttttcagcagagggaaccaaagttctgagaggttaagtacttcaaccaaggtcacacagcacttggtgggtgccaaacttaattgcagcatatttggctttagagaccttatccttcgacatcttctgtatattttacttatgtcaagctttggacagagaaaagcttatttcctgtggtctagctgtatagttctgtgcaaattagcagtgggatctggtctgattttcagagttcattagtggctgctgttaccaagcagatttatgggtgattttattttatgcattgttaattttgaaaatgttaatctgaaattgctacagtatttcaattaatttgggtgattaaaacttagcaccagaagaatccctaccagaagataaggcagctaattagaggttctgaaacaaacaactgtagacactggcactgaaacacgccatgtgtatgacacccagcagaactcactctgcttaacagtttggaaatggaaagaataatttctgccagtctaaatattaaacttgaatgcagttgaattttttaaaagctattttaaggagttaactatttgaatcaatatatagtttttaaatatcatgcagttctgaaaaactaccttcagattattttgcagtgttggcttttggataactgcagtagtgacagaaatacaatagatatttgttgtccaagtattatttaaaaatgaggcagcatacactttttaaaaaatgacacttgagcttcttttgctagagttttgcattttgtaaagtttatcttaaaatattcggaaaatataaggaagtgtagaaaaagttctctggacaaattacctataatcctctcactcagctaatcaccctgtatacttttgttacacacttttttcctcatatgtttattttttatgtgcagccacatgtttattaaatgcctatgtttccagtttggtattctccttttatcacttaattttgtttcattgagcgaatttgttgattcatttgttctttcaactctttgacaagtatactgacttggtgttaagtgtacaagaatgaacaagatgtgttttccctcacacaactccctatgtcctggagcaaaggtaatggtgaagatttgagatyagggagatacagagggtatacttaaaagaggcatagactttagatatgtgagcatcaggaaatgatgtctaacctggaatccaggatatgagcagggatcaacagcatctaaatggagagaagagggttgcaggcagagggaacagctccaagaaaggccctgagttggagaaggcacaggatggttagggttggagcaggagagccattcacaaagagaatggaaggaaaaccaaggcaggatcttggttgatgcacatcaaggaattggactttattctgatgaacagattgagcctttggaaaggttttatccagaggagtgacatgggcagctaggactggttgaaaagatcaccctagccgcacttgaatcttgagtcattaaatactcttcagaaaaaaggaagtgggttttagtataatttatkgttgaacattagtctttctaatttttatttttataaatgctttgaggaacatctgtgcatgaacatacttttccatatggctgattattatttaacaatggcgtcatagaggtacaatatctgggtcaaagcatatgaactcctagattttggatgtagatgttgccaaatttaccttttagaaatgttacattgaattatgtccccacatattattggggtatgagaatatgtcttattttatgcccaccaaccttgtattgttcttttcactataagtcattagataggaaaataatagtatcttactatcatatcatagtagttgataccataatatgaacttccttgatttttagtgagatagattattttaatgtttttggctatgtgtatttttttctgagaattatctattatgcttactccctctttctattcaagatttggtgcttttctaaattacttgtaagaatatatgtgtgtgtgtgagagagatcaatcttacatttatcgaaaatatttttatattttttttctggtgtatttgtttctatataaagttttaaatttaccaggagtcaaagttayagacattttatttatgatctgttttactgcttttatgcttagaaaattttccctcctctgacttattaaacacctacttataattttattgtttaatttttgtagcatttggccatttaacttatttttaagtaataacttatttaacttatttttatttaaggaatagattttaattctgtgactaattccaaatgtacattaaaatgtttttcaggatttacattacaagattttacagaatttaaatttatctttttttttttttttttttttttgagacagagtcttgctctgttgcccaggctggagtgcagtggcaagatcttggctccctgcaacctctgcctcccaggttcaaccgattcttgtacctcagccacccaagtagctgagattgcaggtgtgtgccaccatgcctagctaagtttttgtatttttagtagaggcagtgtttcaccatgttgaccaggctggtctcaaactcttggcctcatgtaatcctcccgccttggccttgcggcgtgctgggattacaggtgtgagccactgcacccagtctaaatttatcttttttgttattgcataacaaccacaattatattgtgtactttttgttttgtgctttattatacacatagcttgctaaaattgtaagttatcttgtgcaaagcatgtcacaatacatgttctgtatatataggaaattacgttttaaacaaatataaatacttaatattgaaatastcagttttgttttgttttttttggtaaaatatgacaaactaagcctaacttccccaaggattttcagaagtaggaagaaaaatattctatggctctgccttttgagttcagagtagctcctcccgttgttcttatttccttttgtacatatgtgtctccctttattttacaaatcctcctcatcttaatttactctgctgctcctgggagtgagactagacctattattttaaaagagctttagttttagtaattcttcatctaagtatgaaaatttcaacttctactttatttgaagtatgcagtagatatgttctcatttcaaaaacagtgtggagattctacactttcaagttctaatttggcaagtcttatatgtcatcatgaaaatattaggtgtttaataaatagactttcttggagaagtcggttgtaagcaggtagaataatgactttggattcctgcctggcatgttgccccttatgatctgttcacagaacgtgcttctggatgtccagatattaaccgttgtgatcatagctacctcttatatcaaatgccccaacaaaatcgtgtgatgtcttcagttcaggacagagctttccttcttgggagtaagaattactctttcagtttgtctagaggacgtgaacatgattagataaacaaaacatgaaagtgtacatatatttctctacctccacctaccattataggcctaacattatagcttttcactcccagaggaagaaactttgccatttcaaaaaactgtaatgccatgctttggggatcccagatttaaatattttatgcatcttccatttaaattcaagcagtatccaagaacagaatctggccaatgattttgagaaaacgaaatggcaacaccttcttggaacctcaaactgttcaaggatttttttttctagcaaaacaggaagaaattgggggaaaagcatatggactcaggttgagcatatgatgtattttcaactcgagtcggcactttactcatatttgtagtgtgacttaaaattaatttgggtgaagcactcagatttgagggaggaaaaaaaatccctatttgggactaagtcaacatttgtggcatctcattaatcgctgccttatgtaactgctttccccacctaaagagaagctactgggatgagaaaagtttataatattaatgccaagtacagatcttgcctctcccaaaaggagttcattaatcaccatcgaagcacaagaacaaacatacttcatgtctcttgccagtttttttcaataacatttctgaaaggcaaaaaaaaaaatatgtttaatcttcatttgcaaaggttttaatttggctgttatttaatttgtgataatgttatgtaaatttaacatgctctgagaatgcccaggcatagggtatagaagtagagtgtgttgrttaagagtttgggcccatggatcagagagatctggatccagattcttggctttgttacctcctctctgtgtggtcataacacaggcaaagcacttcaagctcagtgcttgcttggcacgraatagctggcmaagagccagcagtgatggaaattcttactcttactggtaggaagcagtatgggcatcaagtttgaaaacatgaytttcagtccaagctgctgtgcaaatctttggacaatttaataagcctcagttttctaatctgtaaaatggagatgaaaatactcaccctacccacatacactggcacaaatgatataatgtattaatcaagatagaaaactgaacctagccatggcatacaaaatcatgtcatataattttgaaaagtgcaaagttgtgaaatcatctttattttgccatgtatctcagattctcaactgtaacattatttgggtgatcagtgtgtagtattgattatattttagtgtcagccatgtagttactctctcctctaaggagttttttattaccattcactggaaaatacacagctttttctttgcaattatttctttacctcttttcttctgccttccaatttaaaattcatgagtaatacagcacctcacgaatagatgaaagggatgacaatctaaaaaaaaagaaaaaactaatgtaaacctcatgctggaaaacagaaacaccaatttaaacaatcataaataggaaaaacaaaaaaacctgttgtgcaagaaaaggaggctctagtctacctttatttacaaccatcagctaccgagtatcaaagataggaatggatccatggtgaaattttcaggmattcttgaaaatgtgtttatttctttcttgtctttattagatgtgccctgtctccttcatttctttatttccatggcccctgctactagaagcattgtaaaaagccaaaagaagaacaagaaattctgaggacatgggtgaaaatgcagccttgaggtttctgaaaataacaggagacagacaaggctggtgtccagcaacaatactgggtagctctttttgtccccacttacacagcgaaggataaagaagagatcctatggacacttagtaaggattacttcatgttttaattcaaagtactttggaaagaagactttgagcagagtggaatagcaggaggtttttgtaaggtgaaatagaatgaaagtgcagccaagaatttttctgtcttcaattttaaagaacaccggcataactcatttttctttttttcccctgtgttctttttgaccttcttagcagctcctgactttctcccttggggatttttctctgtatagtcagcgctgactcccttagaaatcctgaaccccacacccgtatcgcgaaagagttgaagagaattcaaataaacacgttgagataagtagcttgtgaactaactgttacagcatgcctctgtaataagatactgccagctagaagctaaaataaagtgaaattccatttaacatgtgacaatcaaaactgtatgtttctcctaaaaatataagctaaagttaatgttagacattagaaattcatactgaaacacctacattcatttaatggtaaatttctttagaattgttagtttcctcctctctagactgtccaaacatagttcctgggaccacgcctgtagtttctttctctcactacaatgaggaaaaagttgatggtttgctaatctcttattctacacatttcattgtactccatgactgcaaattcatctttgtatgatttatatgtcaatcagcatgttggtgaagtagccatggaatgaatgttagagtgatatttgttgatgtactagaggttttacatgctttatttttaatttcacaacaaagctgtgagaggtattatgcccattttacagatgaggaagctacactgagagttgtgacaggtgtccaaattcatgtaagtaataaacgctgaaactgagctttaaaccaaatccttataaaacttccatatatgtgtttccataactagaagaagcattgtatgtttttaactaatttagcagtcttgtaggaatgcattcattaaatcagtgcactttatcagaagatttattttttagccaggctggctacaattatggatcatgccagatgctcartggagggaggaagtgagatgaagtaggctaaagagaaataatcttggtcagattgaagaaggataagcactcttaattgtcaatatcaaatgaaaggagaaatatgaccttgatgtgaaggcttaaggcagggttgctatcatatgactgtctgggtcctggatgagagaggaccagctgaggtgattggagagcctgggaaagagcttctcggaagggcccagttgggcaaagggcaagcagacactgcagatggcccctcaagtctctgccaaccttgggatgctacgattccaagcaaggaaggaagctcattccacatagagttttagatctttcattagtgtgcctttgattttaacgtgattagaaaataaaatcatagcaaaatatcaggaaatgaccccaaactaatgtaataaatgctgcttctgtttgttttttatactgtcttttcccttaatgtcttcattaagatttgtgtagaaaacagggttttaagcaggatgttgctattttaaataatttatagaggatgattgtttttctgtgttgtgatttgtttgtgtgtgtgtgtgtataataatcctaacataaaccatcatcagcgaaaccatcactaatgatagcaataaaccttatcataaattcatttacattattttgtgtaaaaattgcatctcatttcctaggcacatatggagacattgttggattatatttcctgcattgctaccccattacaggcatgctcttacatgcatgtgtgggtggccagacaatataagtggttaaaaaattagttttgtagttagcattgcacagctcagtgctttttctcactacttagcagtgtaccctagtccatcctttgttactgggggtgttattagcatccaccttccagaatttctgtgtattgattaactgagagactatattgtggaacattagcacagtgtctggctctttgtccatactaataaatggtagatattagcatcacctgatttttgccaccatctatacattcctggagcagaggtatagaaggtgagctaaaacctatagaggcagcttctggataccagactctcgaggccatagccatgctgttgtcttgttttgattttaagtgtccagatccattagagcagaggcagcagtacaagctgctggctcttacatgtttggcttatgatgcctttttgaaaatcaatgatacagaaactccagagctaggctgcctaggtttgaatgcagtcttcactatttaccagctctgtgaccttgctsaagtcacttaaaccctctgtaccttaacttctttaaaatggaaataataagacccacttcatagggttgtcatgaggcttaaacgagttaatatatactaaggtcatagaacagggactggcacataatttatatatatacaaattagctgggtgtggtggtgtgcacctgtagtcccagccactcaggacgctgaggcaggtgaattgcttgaacccaggaggcagaggttgcagtgagctgagatcgtgccactgcattccagcctggtggcagagtgagactccgtctcaaaaaaaaaaaaaaaagtctcaaatgatcttgccatagaagtatgaaagggagtgagggatcagaagccacggtgatcttctgtgctgcttctggaaatagtggctcctggtccagacatcacagatttcacctacctgccatagttaatggccatcacagtcctgaaagcccacacaccaatttccaaattgcagatatcaccttgcttcaggtcactctggcattctccaagaactatatttttgagaaataagacattaactcttatatttttttcccttaagagtaagaacattgttcgttattcatgagtgccagtagccagttctgtgactttggtagctcatttaacttttctggacattattttactcttgacaattggtgggttggatttcatgatttcaaatacctgttcacatcttagtatcctaatattctttctacagtgaagaggaagggtaaggtgaagggctaaaggaagataatgtgtgtggtgaaaatactggcataaaaacctctattcttcaggccacgtggtgttacttatgaacatagtgaccttgggagcattttctgaaaatactcttccccctccytgttttgattctggaayagtttcctttttcctcacaattctaccttccttcaacagttgcatttacagataatatccttcaccgtttgtttctttatgcatcactagtgtgtgtataaagcagagatggcaagagctgccatgcattttggctgtgtgattttgcaaccaggagacgacctagtaggtatgcagcaatactgacatggagagatccctcctccctctggatcaggctgggacagagtgtttctagtattggcctgcaagacactggctctgccctcagcagggatggctgtgtgcagtcaggtatgtaaaactagttrgctcccacccttgaccttgtcatatgaccgatcatatgaaagtgtatttgtgagctataattattgaggtatctgccttatctcccttgctagactgatagctcctttgaggacaaacacctggtctttatctttacatttcctagggagatttagtgcagaacccttcacacaaaagtgtttagcagtgctgtaccaaggagggtggatacaatgggagtagtctacctactagtggggaaggatattttatcactgacattgctgagaattgctggcccatgtgataagaaaaaccaaaccagctttgattaaaagacagttttattattgtttttaaattatccccagacaatgcaccccttgttgtccagcctgacatgaaccactctcaacccccatattttcccacaatctaacccttcttctacaccactggtatttagtaaattattattcaatttgtcagctgttgtaatagtctcccaattgttcgtcttgcctccaatcctgacttcttttattgactcctccagactatcagaagaatgatttacctaaaggagagacagcatggcctctcctacttaaactcttcagcgcatactcagaaccagtctacagtatattaactataaaaggcccccaggagctgattcatacctaacttatttctactactcctgcaatagcagagatctggtaattttccacatgtactgaattmtttcttgccactataccttgggtcatgctcttgtttctgaacaaaatgacttgacttctctatttactctacttctatatctggttaattcctatttatctatcattcatccatctaaacttaattccagtattccctcttccaagaatcctactttataatactccatatctggtgtgcattgtgggtccctctcccatgacaacattgctatagtattttttttaatggtctgggtgcacatctactttctgcaatctttcataagctccttaataactggagcttcatcttttcatatttatacccatrgtatctggaacatagcaggtgatcaggaaatatatattgaactgaattggaagcgcaactttataaaagggaacactggtttgtggtgtgaaaattctttaacctttttgaaaagccgacctatgctgctgctkcttatactttgaaaattaagaaaatggtttgttcaagcactgtagttctcacttataagtaggaactgaacgatgagaacatgtggacacatggcagtggcgaggaacaacacacactggggccttttgtggggggttggggagggagagcatcaggaataataggtaatggaagctgagcttaatacccaggtgatggtttgatctgtgcagcaaaccaccatggcasatgtttacttatgtaacaaacctgcacatcttgcacgtttactctggaacttaaaagttgaagaaaaataaaataggaggggagggcaaagagtgattgtacaaaacaaggtgaaaaatttagaaaacattatgtaatagctaatgtatgcttattaaaccattaagaaagagaagaaaaaaagaaaatggtttgttaatgagccagcagtcctattttactaattgcttatttttgagactaatgtacaaaaataatgaaaagcattacatttgagtattggtgagcccatactatctttgttaatttttttcatatcataagaacaattaataaaagatttcaaacccacagcatcatagaacacagacatgtcttataaagtgatattttgataaattttgcaagaatcttcaagtgaaaatcatttgtctctaatatcaaccacttagagccaaattagaacaataggagtttcatttaagatccataagtagctgcagtagagtattactatgacactatttgctgaaattataaaggggaatttgctggtaccgaaagtcaaggcaatcagatttttcagcggaggtaaaatactaccaaatgcttcattttgcaaattggcatttttttctttgaagctctgaccactttataggcaattatcttgaatcatgtggcatgtaagtctgcttattacattcttctagctataatatgtttggtgaaagagcttatcaaaccatttttttttcattatattcattttcratccaaagttaccaaggattcaaaaatctagagaaagtttatgggggttacagaagacccagagatattttcaaagcctttccaatagaatactatgcatatttatttttttaagagtaatatttggaccagaaatacttggtttaggacagacatttctcatctttctttcattataaagttattttaatgacccagatttacacaagcctgtaaaacagtgtagaagtctgtatcttagaattccatttgaatatctgcaaagggaaagtatatttttaagttactgaatacactttgcattaggtaattatcaccctcagatgtttccaattaatcctgactaaccagatgaactagagtaacacaatattccagtcttaaatacgttttttggtttatacaagaatgtggatttaccgcatatattcttaaaacataaattcttcaacatatttaaaatatgcttagacttgtaaagaactgtaattgaaaacccagggaagcttcaggaggacaagaccagcctggagcagcccgagaagtcgatgtgcaggtcattgctgtggatagtgagggtttcagtgttggggaatttctgctttctgattgacacctgccccattgtgaaagtgctttcaactgctggagttggataaggttaccaacttttagcttcattgctttgccccttattcatatgactaatatgtctttttctacccattaggcccacagaaagtgtgctttcgttagcgtttttctgggaagtatggtacctcgcagagctttcatttggttagtaaatgttcttgctaaaacgtcagcacataacctgtcaatctggttgcatttgggctataagaagctttaagaccagtggccttgaataaaatccattcaactcttagtgcttttaatgaaatagaaaagataactattgggcctctaaaaacattgatcattgaaaaacagcagcatttgtgctctggaaatgcactgtgtgtgtgtgtgagagagataacttatatccctgtgacattattgtctccacttgaggcagatatttttttttcccttatagaaatcctttcaggaaaaaatccaaactgagcagagtaaaaattgagacagtattcttttgtgcatgttttttgagcttccctaatgttttaactttatagtttttttataaaaacaatttgtcatattttaaaatgyaattttaatcactcggaggaaggggactaggtacatttgtattcatgtcgtgtggggatataagtttgttgacagtctcattttgcaaaatggatttaatgctgaaaaaatcatagcaattcattttttaaaaataacacagcctctttaaatacagtgctctagttttcaaattttaggtctatgccatgtaaacaattattcacattatgaattaaaattctgtttgcttacagagcagcttaattcttttgcttataggcacatagtgacttgaaaatctaagtaataattgttcatttaggagaggaaaataccttcctcaactaatctgtaataccaacttaattttccgtggtaggtagggaaattcggtatcaccaagtcctgtaacatgttagatatacaacagaaccacagttgtaatgatgttgttctaaggacttacagtctaaagccattccttatttgaaatagagaatttgacaacacatatacacgcagaatggccccatattgtcatatttgtacaagcaaaattagtcaagaaatgcagaaaaattttgttaaaattattttaaaatatattctttaatgataaacatgcacatatgctttcatttatttaacaaacttttattgagagattattggacaccaaacactatactttggataaacaattgaacaatttcatggtccctggccttgtaaagcttatattcaagtggggagaaagcaaaacaaaattaatatacaagttatgttaaataactataataaaaattcagaaacacagttgaacaaaggaatgttcagtgtatctgcctgggagggttgcgaagacattgcagaggcggtgcccttgagggattagaatgatccgaaagcatagccttgcactgtggaagtgagtggtttacttcgcggaggatggtagcaagcactttgggtgcataatgggtcgtgcaagagtggcacctcttgtgtgtacatgtcacagagctgccccgtgaaggaggctggtggggactgagctccagctagcagatcctggcatgggaaagtgtctaccctggggcagaaacttttgttaaataatattataaagttaactacataaagtttagaaaatccatataaggaaaaaagttctcataattttacacatcagatgaaacattgttaatattgtggcctatgtctttatggattttttttctgtacttctttatgtgtgtgtgtatatagatatatttaaaaacaaaaatgaggtcatcttgtatacactgctgcttgtaacttgattttttccctcaaccatatgtttgaacattgtgccttccctgaacacttgatgagattatgtccttttggtttgtgcttccgtagcgtttgcaatttttctaatgtaaaacacataatgctttrtaatatttgcctgtataattttccttttccctgttagactctaagtttttgaggataagggaaaaactgccttgtttattatgttgttcacattccaagcagaaaataagcattgggtgtgtttttaaaaaaattaatatgcatagtgatgaatgaatgccttaggaaaagatgaacaaacagaagctgaaagctgaaataccaacaaattatctcctaggatctccttcactttgcagccacagtgaatgatgtgttccataaaagggaaaatgggtgtaaagtgaaagcttcagtctgtcagacagggaggctataaggccagtggtctgccttggcctggtgcgtatttccgtctttctttctgtgaagaaatagatggatgtctataggagctgccacatgagttagtttcttttctagttaccttgtttcaaagccaagggagccaaatctcaaaatgccttcccactcacttggataattaagatgaaaataacaattatataactgtgtagcagaaaagaagtctttaagtttggcaccttgaaagcagtgctcactgttgccactggtactcgaaaagtaatgactctgtgggaaaggtctgcaaagaaaggaatctccctttctgagcattgcagggttcaacatgctatgacctgaaactggaacaagtgagaataaactgggaaagaaaaaaacatggagtggggaaagaagtgagtaaattgaaggtgaatyagatgatccgtgggaatactttttagatgccaaggaattttcatttcagttgtaggagagatttccctgatacatcatggcatttctgaagctttcctgtgtcttgaggtgggggaaagggaagtataaatgtttgccattaagaatttggtagtattctggtgatttattcattaacattgtgcggatgagggatggaaaaggtctagtttagccctcaccactctcccttttgtttctcattggagattttattacccaatcaatagattttacagaacactatttgcaggttttaactcatgtataaaaagaagccttcaacaaaaaccaagtgcgggtaacagcatatccttaataccagcatatccttaatactatacataatagctgatgtatagtagaagctcagtaggcatttcctaaaaaatatgactaaatcgggatacatttctgtagattccaagaaggttatgtaaaaatacaaaatatttttatgtttatctacatatatagttaaataaaaataaaagcacttcctcataaaaagaacaatcactttgtcagtgcttctgcatactttaaagaagaaactttggaatcccaggtggttctttttttggacattgtgaagagctgaagtctataggattcgtagaaatgtaagtagttatttttaacaggaccatctgtggccattaatatatttagtaaggtgaatttctttgatgaatttatctaatctccattcgcatttcctatgtatagttttgaagtaacaagtcaggccttttatacttttttttttctgaaagatggtattttcaaaaatatcttaacataaaaatgcttagcctccaggtcttaaaaatataaaggattccctatttaataaatggtgctgggaaaactggctagccatatgtagaaagctgaaactggatcccttccttacaccttatacaaaaattaattcaagatggattaaagacttacatgttagacctaaaaccataaaaaccctagaagaaaacctaggcgttaccattcaggacataggcatgggcaaggacttcatgtctaaaacaccaaaagcaatggcaacaaaagccaaaattgacaaatgggatctaattaaactaaagagcttctgcacagcaaaagaaaccaccatcagagtgaacagacaacctacaraatgggagaaaatttttgcaacctactcatctgacaaaggkstgatatccagaatctacaatgaactcaaacaaatttacaagataaaaacaaacaaccccatcaaaaagtgggtgaaggatatcaacagacacttctcaaaagaagacatttatgcagccaaaaaacacatgaaaaaatgctcatcatcactggccatcagagaaatrcaaatcaaaaccacaataagataccatctcacaccagttagaatggcagtcattaaaaagtcaggaaacaacaggtgctggagaggatgtggagaaataggaasacttttacactgttggtgggactgttaactagttcaaccattgtggaagtcagtgtggcgattcctcagggatctagaactagaaataccatttgacccagccatcccattactgggtatatacccaaaggattataaatcatgctgctataaagacacatgcacacgtatgtttattgcagcactattcacaatagcaaagacttgaaacccacccaaatgtccaacaatgatagactggatcaagaaaatgtggcacatatacaccgtggaatactatgcagccataaggaatgatgagttcatgtcctttgtagggacatggatgaagctggagaccatcattctcagcaaattatcgcaagaacaaaaaaccaaacaccgcatgttctcactcataggcctgttattctttagctatatattgtattattgtgtgtttcacgttgaacgtactttattgaggccattaatttgaaaggaagtacggttttctttcattagaaagagatattgaagtattgtgcccagtaggtaaattgaggcaaaatggcatttattgaaatgtttacatcctcatataaattctatgccaaaataaaaactaaaacctacattgcagattttctagtcgtatttcctctcgtatggctgtactaatagcaattagttagcaatttctcttccatgactgtactaatgattaagttgttgaacataacatttttaacaacaccagtgaagcacctgaaaatgcaactgaataacaagtatgaaaatgctgttttaatatccagttctgttttatgtttataattaatagaactttaatcataatatgtgttctgtgaatcccagagaatattttgctacaatctttgcatggaatcctgtgttttsctctccctatggtagctgtgtggaacttcagttgacctctgtggtagtgtcatgctagatcagaagtaatacgtccaaagtgatatgaaccactgtggtgtctaagacaatatatacccagaggcaactctcgggacaaaacgtcaaaaaggattaagttcctgtgtataacaattctttcttagccgtccttttctatagtgctcattatttcctgagatagccagaaagggaaaattaagagaacataggccataacatttgaaattcttaaaaartaaaaactgattcttatttgtaggccatgatttaatacatgtggaattttcttataaagtcccctttatactacattgacctaactgctgttaaattgttttgtttcataagctgaagtcttactttaattattcaagatacagaggccgggcgtggtggctcatgcctgtaatgccagcactttgggaggccgagacgggcggatcacttgaggtcaggagtttgatatcaacctggcgaacatggtgaaactccatctctgctaaaaacacaaaaatcagccaggtgtagtggtgcatgcccgtaatcccagctacttcggaggctgagacaggacaattgctttgaacccgggagacagaggctgcagtgagctgagattgtgccactgcactccagcctgtgtgacagagcgagacatcgtctcggaaaaaaaaaaaaaaaaaaaaaggattgtcttgactgaaaatgggaaatgtgtaaatgtgttgtgtgttgttgtatatgctgaggtcagaagttaggcttatatgcaggagtaatgtttactctttttctactcttgggaaagactgtcataggtggtcagagaggaaaggacattgcaggcagcacagagagctaggataatttccttttttatatttttatttttattgatatataatagawgtgcatacttttggagtacctgcaataatttgatacactgatatagtcacatcagggttcattgggatatctaccaccttatgtatttatcttttctttatgcttggaacatttgaattgtgctttcctggctattttgaaatatgcaatggattaatgttaactgtagtcaccctactgatctattgaacatcagatcttctttctgctaagtatatatttgtacccattaatctcttcatctgctacctactaccccacttcccagcctctggtaaccatgaatatactctatcttcatgaattccacattcttagctctcacataggagggagaacatgcaatatttgtctttctatgcttggcttattttacttaacataataacctccagttccactcatattgctgcaaatgacaggatttcattcctttttatggctgcatgtatggctgaatgatgtttcattgtgtatatatgccacattttcttatccacccatccattgatggacacttaggttgatttccatatttcggttattatgaatagtgttacaataagcaagggagtgcaggtatcaattgaatatattgatttcctttcttttggctatatacccagtagtggaattggtggatcattctgtagttgtattttttagttttttgatgaggctctatactattttccataggggctgtactaattagcattaccaccaatagtatatgagggttcccctttctccacaccctcactggtgtttgttatcctctgtctttttgataaaagccattctaaatggggtaagatgatatctcactgtggttttgattttcatttccctgatggttattgatattgagaatttttcatatacctkttgacgactaatatgtcttttttgagaaatgtctactcagatctttagctcatttttaaattagattatttgtttcttcttagttgtttgagcaccttctgtattctagttattaattccctgtcagatgaatgttcacaaatattttctcccattctctacattgttgattgtttcctttgctcttcagaagctttttagtttaatgtaatcgtgttctatttttgcttttgttgcctttgcttttgaggtcttacacaaaaaaccttttcccaaaccagtgtcctggagcatttctgtgaggttttcttctagtagtttcatagtttgaggccttagatttaagtctttaatatagtttgctttgatttttgtatgtgctgagatataggggtctagatttttagttctgcatatgggtatccagttttcccagcaccatttactgaagagattgccctttcctcattgtatgttcttggcgcctttatcaaaaatgacttggctgtaaatgcatggatttatatctgagtttctatctgttccattggtctatgtgtctgtttttatgccagtgccatgctgatttggctactatagatttgtattatattttgaagtcaggtagtgtgatatctccagctttaktccatttgtccaggattgctttggctttgtgttatgttcaggtgcttttataaactgtgattgaacagttgtgcatgtgaactttgtgctaagtgtcactggtgttttagttgagaaatgaggcagaaataaaagttttatttcagtgtgtcatttctatgtataactcttaattttaccagtggactgcctaccagatgatttataacttcttggcacaatttgttattattttaacattcttatttttctttatagcctacagtttacatttttattgttgtatatttttattatacttttagaatgtaggtactatttcattattattttcatatgattagaagccagtgtatatctaacattttccttttccctgttagactctaagctttgtggggataagggaaaggctgacttgtttgagtagcttgttatgctacatttgaataagtgaaaaccataatataattttggtatttaaagttgattaaagaaactctttatgtagaaaaaagatgggaaactaaaaatttggggagataattagactaaggataaagtgagggaaaaargaaggaaggtcagggagagagttagtagttttcagattgatggttgggggaaaaatattgaagtatcaaaggacaaagcaataccagtactattcctaaagttaatattcacctacatttcaaatattttacattgaaaaattgtagatgacaaaagcttataggataawgccttaaatttttagtattcccaattaatttataggaaggagacaatatatatttccaatattataatcccagggttgtagagattttgagactaaatctctgaaattcctacaataatctaaaggatttactgttgtctataaaagctatcattctcactagaaaattttgagtctgatttcttttccagctttcttggaaaagagtagtgatgcattcattaagtattgaaatctgaaataagtacttgtgacctttctgtaatctaatctaaacttatttttcttggtcaatcaaagattccaccgttagtgggtaacaaagtgctttttggaaagaacaccacttttgcttttagctagaatatgcaactggacttaagttgcttcatatgtaaatgaaaatatttggctaaataagaaccttctttgacacaggcactgtgctagcatgtagtgttttcgtggtcagaacagtactacttcaaaagaatacacaactcagcatggtttcagatgttttcccctctctttattatagacactgttaagaaggaatgttcctgggaagggagcaattttttcagttaatgtatattcataggtaaatatgttggtggttgacacttggccccagggaaagggaatttaaaggaaaaattttatctrttttcaaaaaatgaagacacatagttagcctcctcctatgaaacattggtggctttgaataatagttatacatttgcttgattttaaactgataaatgtatatattcactctgctcatgtctgaatccataggattgtaactaaatggttctatctgacttgaattccttttttcacttcagaaaaaggttaaggaggaaaacttcaaataaaaataagggagggactaaaccttagagttacctgttagatattgtggtgattgcggatcctcagagtttgaaagtggactcatagaagtttacaatgactgagcaggttagaaattcttccaagtaagtattttaattgtagcaccattttataaataaaagactactcttctgcatttcccttgttctatttcagaagtttgttatggaagaatgtttgtaagaagggtagagagattgttcaatttatgtgcatttttctgtagatatgttgatagttgttctctgagctaagggctccatagcctctttaaaaaaaaaaatcagcacatcgaaatgatggtgcagagtcatttgcattctctgaaactttgccagtcagaaataccaattgcacatgctcttcattttagcttataaatcaataaaccctgtctgcatgaatctgaatcttttgggaatgcatctgaatatgctctctactactcaagcagaagatcacaggaaggagggaggtcaagagaacagagaaaaataaagaaaagcaagcaaataattgagtgtataggaaataaaaaagttgggtgtttttctttaacataaatgatgcaagtcatctcatttaaagtgtattcaggatgagtataaattattaagagggccttagtaagaacctttaaggaatatattagcagttttacatgtcaaaaacaattttatttttttggaaaatgtcagttacacttagcatattgatagttgggtagaagcacaaataaataaaagtagtttaaaagcaagtaaaaactaatgatcaagtggcagtttgtttctataataccaataataactgaatatttgtatcattaaaagctaaatttggctatgaaaataaatgtttatcatacaaatttaggcaatataaatatatatatgaaaacaagaggagatagatactaacaagtaaacagataactatgtgaattgcaagttcataatgtagactgccttggctggacctgttacaggaaaggggtcccaatccagaccccaagagagagttcttggatcttgcacaagaactaattcaggtgagttcatagagtaaagtgaaagcaactttattaagaaagtaaaggaataaaataatggctactccatagacagcgcagccccagggactgttgattggccatttttgtggttatttcttgatgatttgctaaacaaggggtggattattcatgcctcccctttttaaaccatgtagggtatcttcctgacattgccatggcatttgtaaactgtcatggcactggtgggagtgtagcagtgaggactaggagaggtcactcccgtggccatcttggttttggtgagatttagccggcttctttactgcaatctgttttatcagcaaggtctttatgacctgtatcttgtgctgacctcctagcgtatcctgtgacttagaatgccttaaccgtctgggagtgcagcccactaggtgtcagccttattttacccagctcctattcaagatggcgttgctctggttcactcrtctgtgacagacctacttgctccaggtatttaaggaaccctaagaaagcatgactaaaaagagtgagcaagtgtgaggctggaacaagatgaaactggagagttatcaggtgccagaaaatatatagggtcttgtatgcagtgaccaggagttcaaatttaattttaagtgcagtgagcaagtttttaataggaaacttattatataatttattatttttttaatcaggctgctgtgtgtaggatggtcaaacattataagattgaatgaggaaaagccaattagaaagacagtgcttgaactgggaggtagaaatgaaggtggcaagaaatggtttgattagagagaaattttagagatataatcaagtatatgtgcatgtgtgtgcacatgcatatttggaagggtggcctttgggagagaaagggtccctccctccctccctccctcccttccttactttgtttcttccttcctttttgaaaaaaaataaataaataattgagataaagagcacaacctatggcaccatggtgtttggtcacagtctagtagatataaactctgtacgaagacacaaaaaaaaggtgctatagtctggtacctacactttatactaaataaatactgttggtgtattgagtggtactgaagcaagaagattgagtatctaaaggagtgtatgtttaaggcacttaaaatgcacttaagggaatgttggtaggtgttttagtctgtttaggctgctccaacaaaataccatagactctgtggtttataaatgacagctgacagttctggagtctaagaaatctacaatcaaggtgccagtagattcagtgtctggcaagggccattacagatggctgtcttctcagtgttctcacgtggtagatggggtgagggagctctctagggcctcttttacaagggcaggaattctgcacatggggctccacccttgtggcctaattgcctctcaaaggctccacctctttcrttcatgtccctacaaaggacatgaactcatcatttttatggctgcrtagtattccatggtgtatatgtgccacattttcttaatccagtctatcattgttggacatttgggttggttccaagtctttgctattgtgattggaaatcatcattctcagtaaactatcgccaggacaaaaaaccaaacaccgcatgttctcactcatagatgggaattgaacaatgagaacacatggacacaggaaggggaacatcacactctgggactgttgtggggtggggggaggggggggagggatagcattagaagatatacctaatgctaaatgatgagttaatgggtgcagcacaccagcatggcacatgtatacatatgtaactaacctgcacattgtgcacatgtgccctaaaacttaaagtataataataataataaataaataaataaataataaaataaaaatttaaaaaaaaaggctccacctcctaataccatcatgttgggaattacgtgtcaacatatgtatttgggggtacataaacatttagtctatagcaatgggtttattagtagaaattatatatgagttttaaggagtragaatagtagttcagattattttttcccttgggttggtggatgagctgaatattcagacatcagtaagtatatgccaggaagaaggtaaagtatgttaatgagaacttgacctgttcaataaatttcaagtaattcacagaatgagtgtaggaaaggagtaataaaatgggccagaccctcaagactgcctattatcaagtttaaattttatccattgctttcatgcagtgtcactgaccttttttctgtccctcaagtactttcaagttctttccagtttcagagcattcacgcatatggctcagtttgcctgttacatttttcctcccaaatgcctactgtcttctcctcaggtcttaaccctgacctgatggcctacccttaaataaagcatcccccactccacacacacccctgtcactctctaatccagaatctctttctaagtggttctttatgatacttttatctggtattattacattgattcacttgcttttgtgtttgtctcctccactaaaatatgagctttatgagggagggatgtagtcagtcttatttatggtagcattcacagtgcaaagccaatatcaatgcatgaatgatctgtaaatatttgctgaataartgaatgaacccatagaacaaagaaggaaaattaggttcttgcaaagtgcccttaatcatttttacttttacgctgttatcttctcctttagatatcctttatgagtggactgataatggttcattttggttgcgagaaagaaaacatgctcagttgctctgggagctgggtgtttatggtaggaggttaacaacaacaaaaaaaaagccaaggggatcatctcaataatcactctggacctcagtgccttagaagaagggaagagtacaggaggctttaagggaatctttctggaccaaccattttataaactagtgatctcagtcatcttttgtttacagaagtcagaaattgttctttgctgacttagatatctgcctcctgcttccatgttctgtaagagcaaatattcttcaatgagtgctgctcctttagactgtctctcttggcctcctcttcagcygctggtgtctcacatgttaagcctatttattgcagtctttgagttaagttaatcaccagccctgaattacttgggtgtagtcagatgagcagaataatgtggtttaggtgataataaccttatgtagaaagaactccctgtggctgctaactcacacgtccacagagctgcatacagacgtgtcaggctctaagagttctacagattgtccaatacagtgcttgctttttktttgtttgtttgttttttgagggcttttgaggctgtttttagaatatattactgggagttattaccttcctcctggaatttgcctagtattggtgagctctcagttgttcaccacttgaagaaaagttctacctcctcctttcctgcttcccaagataacaccagacatgtggcgggtactcagatcatcctgaaacatacatcagccatgtcaagtggcctcttttctaccagtctcattccctgtaggttgcatagaatgaccaacctgaagtagggaagcctgaactaagagtctataaattggatttttgttccatttttgcttctgattagctgttgactttagacaatttattttagtatttagttttataatgtgacaaataaggtggttagactaggtgacaatactctgtaaaattgtgtaattgtgttctttttctatctttaaagaagatgataagatagctcagggctatgcttctgaaactggattccttacatccctgggaatagctgtttgccaggggtctgccaagtacatggcattttctcctgaagctttgaccttaaatattttagggaaacattttttccaataaaatgtacatgtataacagaacagaatgttaaatttgcatggattttcaagtaacacatgaaattttatagttattttatatttggtagcctataaacacctttttaataaaggtgaaaaaaacttccaaagacattatcatatctttcatccttgattcatgattcactaatactccagtagacagtgccaaagagtgactagtcagtggttatgaagttgaaggaaggcatctctgcctcatccttgtttttatatgagctgtgacagtgctatttccattatttgagtcatcattgtttataaaaataatgtaggcttctctggtgaaaattttaaaaattattgatggggagtgttccctttgtgaacagtcagttctttagaccagtttgttttccaccaaattgcctgcttctgttgtagcatggaatttttccaccaaaattctatgccgtggttccttttactcctctctgaagaccagcagatcaatgaaaaagtcatgctytcttagaaagagccctataagctgtgatgkcaggggaatcccagcacctagcatcccaggctcaacctgattcttaggacctgattcttagattgtgaacttgtatcaggaaaggtccagatgttaatttataaagggttttttagttgggaggatgacaggcagcacttatttcactgtaattttctcaaaagcaaatttggcagtggtaggtgttggtcatggtgttttgcacatgtacccacaagaatgtgattcccaaacttggctagagtttggatgtcacacctaggaaatttatagaaaaaataatgtacatgttttagggtcctacccaagaattatgaaaggaaaatttctgaaaatttttatagatatgaacatttatttgttttaaagttccctctggatggaggtccatgcccagttgtattgttatctcagagttcacctgtctgtctattccatggactgactataggctgtttgaaggcaggatactttcccttgctttcttctgaaactgccatgcccagcacttatggaatgctgaagtcacatttgatgaatgaattaatatgttatgcttgtgatcagtttcccaggataaaacatctacatgttctgatatcttgtaaaactaattattttttaatgtggctgtgtttagattttaaattgggcctcagaggtgaaaggctagcatattacctacagcccatttatctagtaggcagtactctcctctaagttattgcctcggggaagcccattgcattagggcagtgataacagcatcatgaatagatactaatctatgttgtagcaatcgctcttcttgccctgcttggaagacacagtggttgatgctcctataattagctgttcagttcattgaagtttgaaagtttatgtgaaaattatcagtgaaacaatttatatctagaaaattttctaatagggttctacttagaattaacttttaaaaaaagcacatgtgtcatttggagtgtgtcactcttagcggtactaaattcagatttgaaaggaaattttgtttcaggtcccccttttaaaaacacttctgtattgttttgggaaactccagcattctrcatacctacatgtagctttagttttatttaaccagaaacacacgactattagtagagtgtaactatccttttaatattgctaatttgtttgttaattcctcctgcataagtttgacttgggyattttgtctgatgtaagaccaagcacaattactaatgtgagcaaaagttaatgagcaaaattgtcaagttatatattaagggcatagttagctgtacaacaaagcttttgttgtaggggataaaacaaggtaaaataattaaacatctggcaggagatctaattttggcttagtattttaatcatattctcttggataattataattgattatataaaagttttaggaacttctaagattgcccaaatacatatggtgaaagtacatgtgattattttgcatttaatgtctgaaggtagttgcaatataaatattcatatttgggtgagcaacactgtaactcagctaacacatctgttgtaaataaattctggagtggagagaaactaaacaattgttgggtctgtattttcccaagaagagagaagcaactttctgagattagttgtgagtttataatataatgaaatgtgtatttcttgtcattttttaaggaatatgactgtctgtttccaattaatcactgccagtgaggaaacttagagttcaagttttgtagtttacgctactttgcacctcagcatcctttgaagtatggtagccaagggaaaatatggagttttttaaggaactggtgattttaagcctgaacaaattttgaaagactaatctatgaaaaggagatttgccatcttcagcataattccagatggaaggcagtaggtcaatggagagaagttacgtagagatttttaagtaagtttcaagaagaccttattaataaactctgcaacaatgactgagttgtcatggggatgtgtggtgaatgttctgccctggacatttttaaacagaggttaaaaacctatcagaggcatattttctaaggggagaagaaaacctatattaaattaatactaaatgactgttcgaaatatraacatctgtaaatctaatttattctccgttcttgatctcatttgtgaagtgtgatgccttctgtggcagtagattgtgttaagaattttattgatgattgaatgctgacgtcaggtttaacccatttcctcttaatcgcaattttttgtcttccagttaatgtgagtgtgttcacattcttagcaatgtaatggtgcctttttcataagtggaaagatattaaagggcattttggatagcaaccatttatcccacctgtattgtagaacacctactatatgctaaaatcagaagcaaagagcaagttgtcagaattcattatatcgctgtgcccttgtttcattccttttatcctttgatctctgtacccctgacaacagatcatgctgaaattggaagtgctgacagtaagaaataaattgccaaagataaccctaacaaatgaccaaaaaaaaaaaaatacattccattatatcataaactcacaacccattccacaaaaaaccatatgagttgaagaaacactatactttgtaagttgattatggctgaatagaggttaatgacaatgtcctagtggctatttcctgggcttaagcataattcttggcaagggttacacatttttgctttggggaagaggtcagcaacatacctatagtagtgtgctactaggtgaacttcctaaatgaagctcataaccaagaagaaagcaataccagaaaagatagagtaaataaaaaacttaggaataagtgggactagaaaagctagaatagctaagtcctattacttgaccagagtatactagtgtatactctgtatactcgagtatacagagtatactagtgtatacatactagtgtatacactagtatgtaccctttgtaatgttaaatataattttacatgttatgggcatgtggtgggcattccagtccatctacagaaagacatatgaggcagcattgctccatccctaacaccttacagcctcttatggagcctgggcatttctgtattttaatccctaatatatatttgggtggtgaaatgtcatcaaagttaattttttcctaaacactctgtgaattttcagttgtttcttcttaagaatgattgacttgggcatgttggcaataaagaaacagctctttccatcatttgtcacatgacgctgctccctttttatccctgtggctcttggcaacagaaaactgcagtgaagtccacggctcagaactggccccagtatttgagaccacatcagctctttgaggtttaaaagatcttctttcttgacttccgcctatatttaaaactgtcagaaaaacaaaattacccagggagtctaccaaacaagatgctttccttgccctaggtatgctcaataaaaaggaggtgaactgcaattctctcccttaaacacggagttaactatcatgcaaaccagactccatttaaaaaattattccactttatattacatcctcttccacctgttggagttcttaatcacttgtgtatgggatatttaggtttcattttaaattagcagtagcaacttaatagaatatgtaaaataaactctctatactaaaggcatttgcagtgtattgagagcaagtctgttaaacatttaactgagaggagttctcttatagagtgttgtttaggggaaagtcaatgaaatctgctgttggtgttagggtgagaccttataacatctggtagggaaatgctccatgaatgtgagattaaaatcatccctctgggggttctgcggcacaagaacagaagcaaaggaggatgtagcaactcctgacaagcctcagcagtcccagcagctaaactggggtgaagggcacagtgtttttcaacctctgcctcctgattggattgataaacaagtgttgactaaaacttttctagtctgttcagtttatagccacacttgtttttctccctctggcatgttgttcaaaagaattttgaggactttaataaactgtttgctgaagcatttcatgtagcttttgagagttttctaggtaacttggacatctagaactgaatgacagtcattcatccttctttacatgtttagtgcagcattttcagccagttacagcttcaccatggttaatcattagaataaaaagtcctgaagcttaataaaggcttcagtccttaaatgtgcaaaaaatatcatgtttatgagtggacctctcttagttgggagcagtttcacctgtaaatgaataagtgactgtgaggttgtccattgtgaccagtattgctgcacctagacccatgttcarttgaagctgctgttctctcaaaaatgaaatcgtgaactgaggccttcattgcacattcaaagaaatacaaagagaaggaatggatctgtatttcaaatatcattggtgctattggcttagacatattccctttattgggtctgttttgcaagcctaaatttgagcctgaagagtttctccatatgaatgtcttaagtattgcagtggcacatccatcacctttttgcttttgaattacaaagataaccttaagatatgatccatatactgggcaatgtgatacatacacagaaaggatgagcctcctcagtgatgaaatcagccagtgcccaagaggaaagtaataggcagaaaggatagagttgrtgaaaaaattgattcttttccattaaactgtacgtgatgtgttttttatgaagcaggcatcagctgaaggagaaatattttttcaactaaaaaagagattgatggtaagggagaggaaaactatgtcagggatcatgggataaatatgtgtcttattctattaccatctcatataatgagaaagttgaaaatcattctattatagttacttaaaatgtttacttggacttggtggtattaacactttttaatgttaataatgacattttttgtaaagttcatgtagacttcatgcatcattgttttctcarttctaaaacttgtttggcttattttcaggtttaccaaagatgcaggtcattaggaactattctggaacaccacccccagctctgcatgaaggacccyctttacasctccaggccggggataccgttgaacttctgaaaggagatgcacacagtctgttttggcaggtactgttgttgcaggaaaggggtcctgatgcagaccccaagagagggttcttaaatcttgcccaagaaggaattcagggcgagtccacagtgcaaagcaaaagcaagttgattaagaaagtaaaggaataaaagaatggctactccatagacagagcagccccgagggttgctggttgcccatttttatggttatttcttgatgaaatattaaacaaggggtggattattcatgtctcccctttttagatcatattgggtaacttcctgacgttgccatggcatttgtaaactgtcatggtgctgatgggaatgtagtagtgaggacgaccagaggtcacttggttttggtaggatttagccggcttctttactgcaacctgttttatcagcarggtctttatgacctgtatcttgtgccaacctcctatctcatactgtgacttagaatgccttaattgtcagggaatgcagtcgagtaggtttcagcctcattttgcccagctcccatttaagatggagttgctctggttcacacgcctctgacactatccgaattacagtttgttagatttaatgcatgatttattactgcttaaagaaaaatgactcttgtctttagaaactgcatgctttcagcttcagaaactttacatgatatgcggaaaatattttttattaaccttttttatatttactaatgccaaagttgcaacaaaaattggaacactagagaaaaatactatcagtgctgtggggtcataattatcatttttattaaaaattcctactttaccagagcattttttccaaaccraggacctctgggtatgatctaatttgcatggctttaatatattaacagttcacttcaggggaactacctaattagcttgcctgtggccatttctgaccatatttgctttttacctacccacagtaatacctggagttctcagaggtgctctggkcattattcataaaatctatgaaatgtgaaaagtaagtgagcatgttgatgtttgcccatgatgaaatctctcttggccggtggacctttttatttggttgaaactttttttgaacttaggtaaatatggtattatgttaagattgagtaaagctgttcattaaattctcgaatttcatgtgtatgttagaaatatttcccaatgatgttgaggaaagaattcgttaaaaaatctattgtgcattgagggaaaaataagtgaggaccaacagaaaggttatcacgagtgaaatgtggttagaggtaaaaagagagaaatcagagaaaagactgttggataataatcaattgtgcacatgcagaagggacagctattttatttgcttacatctattttattgtctgtcatcttgttatataagaatgcccaaagattgaacgtttgtctctaaccaccatttcaattgtggtagccagtgatttttccaaagctccaccattcttcttaagtatcccactccttccaaacttcatccttcccagaaaaagaaaagagagaacaacagacttgaattctaccacctcttcagaccacttctgtgtctgtcagcttaaccagaaaacatacttgcatttgtagccataaggttcctcacattcaagacttatctttcttcttggactttttatcccgtattccatcagctggcttttgactcctaaattttcaacttcattctctccactggctcattttctatagtatataaatatgctcagtctcctcccatattaaacacataactcagccttttgtctggtcatgccagacactctttcaccctcttcctctccacaaccaaagctaagcttgttggggaagtagtctatgctcactttctaccactccatgtcctattcataagccagcctcttgcagaaactactccttcttggatcattagtgcaactttatataaaaacagctttgagatggatggtaaactgtgcatagtttaagtgtacaatttgataagtttgaacacacacataygtacatacatatatataagtgaaactatcactataatcaggataataaacatatccaatatcatccctaaaagtttttgtgccccttggtaatccctccatcatgctccttcctgttgctttgttccgccttgcrcaacaaccctcagcaaccactgttctgctttcagactggagatgagtttgtatttttttagaatttgatgtgcatcacatagcatatattgttttttgtatggcttatttcacacaacatgattatcttgagattccatcacgttgttatgtgtaatgatagttctttctttttatcgctgattatcgttccatgtgtggagatagcacaatttgtttacccgttaacctgttgatggactttcaggttgccactagtttttggctattgcaaatraagcttctatgaacattcaaatataattctttgtatggacataatgcttttatttttcttagatactaatgccaagaggggaatatatagatcatatgtagatatacatttaagtttttgagaaattattaaattgttactcaaagtgcctataccatgttacatttctcccaactgtatttgtgagttttaggtgcctcttatccttgccaacatttggtgtggtcattcttttttttttttttttaaatacagggtcttcctctgttgcccaggctggagtgtgtggtactacaatcgtagctcactgtagcctcaaactcctgggctcaagccatcttcccatctcagcctcctgagtagttggaacaacaggcatgtatcaccatgcctggctaattttttagagatagtgtctagctaagttgcccaggctattctcaaactcctggcctcaagcatccctcccacttcagcctgccaagtagctaggattacaagcatgagccagtcttttaaattttatttattctagcaggtatatagtggtgtctcattgcagttttgatttgcatttctttaatcattaattcattaataatgttgaacatctttttgtgtgcttgtttaccatctatataactttgctggtgaagtgcttgttcaaatattttgtcagctttttaatgagccatgcatttttttattatttggctttgagagctccctagatattttgggtaaaagtccttcataaaatattttatttccatatgcttctcctaatctgtggctttttttttattctcttgataatgttatacatagaacagaagtttttacctttgatgtagtccagtttgttaatttgttctttatatggatcatgctaaaggtattacatctaacaaatctttgcctaccccaaagttacaaagacattctcctttgttatcttctagaaggcttatagttttaggttttacatttagatttatgattcattttgaggtttttttttgtatatggtactaaggtttttttacatgtggatatctaggtgctccagcagcatttgttgaaaacgcaattatttctccactggattgcctttgtaagtttgtagataatgtgttgtccatacatatgtgtgtatatatatctttatgtgtatgtgcacatatatttatatgtactatatatgtgtgtrtatatatatatctttatgtgtatatatgccgtgtgtgtgtatctttatatgtgtgtgtatctatatgtgtgtgtatatatatcttcatatatatgtatatgtaggtctgtttctggactgttattttgttacattgatttctttgtccatctttgtaccaatgtgatgctgtcttgattactgtagctaataagacgtcctgaagtcagacaatgttagtccaaatttgttcttttccttttttcataggtgttttgggtttccttggtcctttgcatgtcaaatgaattttgcgatcaccttgtcaacttcaccaataaaaaagcttgttgagattttgattggaatctcattgaattgtagatcaatataggaaaattgacatcctaacaagactgagtcttctaatcactgaacatactatactcctcatttatttaggtctttaattctcagaagtgttttgcagttttcagagttaaggtcatatacatcttttgtcatatttatctgtaattatttcatatttcattttgatgctattataaatgagttttaatattttaatttatgttgttcattgtgagatatagaaatacaattgatttttgtatgttgatctcttattctttaactcttattaaattcagttgttcttgtagctttccttatgtagagtccagcagattttgtaatatagacaccatgttttattcttcctttgcaatctgattgccttttatttctttttcttgacttgtagcaatggctagaatgtccagtaaaatgtcaaatagaagtcatgagagagtatatccttgccttattccagatcttagaggaaaaacattaagtctcttaccattaagtatgacattatctgtagtttctcataaatgcccttcattaagttgaggacattgccttctattcctagtttgctgcaagttttcatcagtaatagatgtcagatttttctcaaatgctcttctgcatccattgaaatgatgatataatttttgtttttattaatgcggcaaatttgactttcatatgttaaatcaatatttattttctatgattaaatcccaagtggcaattatatattatcttttttatatattgtttcattttcatgtaatacctttgtctggtttggataataatgtaatgttcaaggaatgaattgggatctagtcccttctcttcaactttctaaaagagatttatagaattagcattatttcttcctgaagtgtgtcgtagaatttactagggaagctatctaggcctagagtttccttagtggaaggttttgttttgttgtttgtttgtttattttgagacggagtctcgctctgttgcccaggctggagaggctggagtgcagcggcgggatcacggctcattgcagcctctgcctcctaggttcaagcaattaccgtgcctcagccacatgagtagctgggattacaggtgaacgtcaccatgcccggctaatttttgtacttttagtagaaatgaagtttcaccatgttgcccaggctggtctcaaactcctgacctcaagtgatctgccctcctcagcctcccaaagtgctaggattacaggcgtgagtcagcacgcctggcctagaagtttaaaaaaaaaaaattataaaacaaacatatggctattcaggttacttgcttcttctcctcgagtgagtttggtagattgtggttttcaaggaatttgtccattttgtctaagttgtcaaatttaatggcatgaatttttattcataatatttcttcattatccttttaatgtctatagaatctgtggttgtattatccatctcattcccgatatcagtaatgtatctctttttgcctggtcagcccgactagataggtatgcattttattgatcttctaatagaaccagattttggctttattggttctattgtttttttcccctatcatcgatttctgctctgatttttattactttctttctattcttttgggcttaatttgctcttcttttgctagttcgttaaggtagggtgtttgctcactgatttgtgtactttcctttcttttgctagtatagttagttagtactgcaaatttctttctaagtgctactttgctgccttcccaaaattttgcaaagctgtttattttcattttcagtcagttcaaaatacagatggtccttgccttatgatggtttgatttaatgatttttcaattttatgatggtgtaaaaatgatacacatgcagtagaaactatacttggagggcccatgcaaccattctgtttttcactttcagtacagtattcaataaattatatcagttttcaatattttattataaaataaactttgtgttgtattattttgcccaactgtgggctaatataattattttgagcatgtttaaggtaggctaggctaagctatgatgttcagtacagtaggtgtattaaatgcatttttgacttatgatattttcaatattcagtgggtttatcagggcataaccccattataagtcaaggagcatctgtactttctaattgctctttcagtttcttcttatagattgcttaggaatacattaattagctttgaaatatttagggattgcccagacatatttagaattattttatggcccatctccactgtggagtttctattctaatctgctgttgcatgatatctgagattaccttctaactgatctcacctccagaatcttatggtttattgtggccataatccacatcactgcaaaattcaaatgcaattccataatttcttgttaaagtctttcagtgtcttccttctaaccaggcagaattgcctcttatttattctttccttatagtaatgatgacaacaatagcaccaacaactaatgttcactatgcatttttatgtacaaggtagagttttaagaatatctttgttaatacccatgatactaatgaaaattctataaaatgaattactattattatcctcaatttatagatgagtgaactgaggcactgtgaggttgaatagtctgcccaaagacacacagctagtaacttagcagagctgttattcggacataggaattccggccaagagtccaatctctttactattacgctctagcacttcttttacaatcatgttatttatgatgaagctcatgctgccttcctaaacttcatgcaccttagggatattgggatggtggctgtctttatgctaattaaagaaactagttttgtgagtttctttcactgtcaccatcaaatttgtggcagtgtttcagttttgtgattttttaaaaaatttattttattatactttaagttttagggtacgtgtgcacaacgtgcaggtttgttacatatgtatacatgtgccatgtttgtgtgctgcacccattaacttctcatttaacattaggtgtatttcctaatgctatccctcccccctccccccaccccacaacaggccccagtgtgtgatgttccccttcctgtgtccatgtgttctcattgttcaattcccacctatgagtgagaacatgcggtgtttggttttttgtccttgcgataatttgctgagaatgattgtttccagcttcatccttgtccctacaaaggacatgaactcatcattttttatggctgcatagtattccttggtgtatatctgctacattttcttaatccagtctatcattgttggacatttgggttggttccaagtctttgctattgtgaatagtgatgcaataaacatacatgtgcatgtgtctttatagcagcatgatttataattctttgggtatatacccagtaatgggattgctgggtcaaatggtatttctagttctagatccctgaggaatcrccacactgacttccacaatggttgaactagtttacagtcccaccaacagtgtaaaagtgttcctatttctccacatcctctccagcacctgtygtttcctgactttttaatgatygccattctaactggtgtgagatggtatctcgttgtggttttgatttgcatttctctgatggcaagtgatgatgagcattttttcatgtgtctttcagctgcataaatgtcttttgagaagtgtctgttcatatccttygcccactttttcatggggttgtttgtttttttcttgtaaatttgtttgagttcattgtagattctggatattagccctttgtcagatgagtagattgcaaaaattttctcccatkytgtaggttgcctgttcactctgatggtagtttcttttgctgtgcagaagctctttagtttaattagatcccatttgtcaattttggctttcattgccattgcttttggtgttttagacatgaagtccttgcccatacctatgtcctgaatggtattgcctaggttttcttctagggtttttatggttttaggtctaacatgtaagtctttaatccatcttgaattaatttttgtgtaaggtgtaaggaagggatccagtttcagctttctacatatggctagccagttttcccagcaccatttattaaatagggaatcatttccctatttcttctttttgtcaggtttgtcaaagatcagatggttgtagatatgtggcattatttttgagggctctgttctgttccattggtctatctcactgttttggtaccagtaccatgctgttttggttactgtagccttgtagtatagtttgaagtcaggtagcatgatgcctccagctttgttcttttggcttaggattgacttggcaatgcaggctcttttttggttccatatgagctttaaagtagttttttccaattctgtgaagaaagtcattggtagcttgatggggatggcattgaatctataaattaccatgggcagtatggccattttcacaatattgattcttcctacccagttttgtgattattatataacagtttattatttctcataatgctakgggtgataaggtggttcttctgcttcagttgatggttggggtggtgggagcagctgtaaggtctcgaatgcccrtgtccacaggattggcagttagtgttagcctctgtctaggaactcagcagaggctttctgcacgttgacctcttcagtggttccttatcttcctcacagcatggtgatcgcagggtacttagacttcctatatggtagctggctcccaagagtgtaaaagtggaaactgctrgaccttcttaagcctaaacaccagagctggtgcagaattacttttgccrcttttttttggttaaagcaagacatggccagcccagatacaagaggaaggggaccataccaatcaaataccaggaggtgtggttcaccaggataccaaaataacagtgtgccacagacagaaaacattttgaagccgcatgagcagccctaagaataaaatggttttgtgagctgttccaagggcactgaaagccaatcagtttttcacaacaaagaaagagacaggaagtagtcaagccaaacacaaaatgttgaagatcttggtgcgtataagtgrcttgcaaagtgtggtgtttgagatcactctgaaggtcatgcaggagtcctagaaccatgcctaatgtatgcttagaggcatttagctttagaaagataattttggaattcatatttttctaaccaagctctgtttcttttcatcttttttttcttaaaccttagatttgtaaaacttaattatgtatagtatcttttttcatttattcactaatttttcctatcacaggtttagatggtgctttcaattattttcatgttttgagattcattatttccttcattcctcacagccacataatgttaaaagtagaactataattgagattctgtgacaactagcccagtgccattttttactaaatrctactgcctcctattctttctagacaaaaagacattattagttgtcatttcctttcagcagcctataaacttgaagattttctggtatagtattagaatggttttggagacacttaggagaatcataggagaaatgagaacccatggatgacaatatatatgggtatgtctggggtatatgtaatgattagaaacaagtaaggctaatgtttagaacagagaaaaacaacacatttatttcagatagcaagtatgcattgagtgccaactctgttcactactcagacactgctaacacttcaattatcagttcctatcattggtttgacattaggtctcctgtctttagaagaatcattttgcttgccagcagccagtaatatgtttgagtttttgcacacatatttaaagttcatctagtgtttcccatacagatgtaacttgggtcagaattgcgttatggatacttctaagccaatcaaagaatttttagccagcaaatgctagttttattgaaatgaaccactggcagtatgagaaaaactaaattcaagtcatgtatctgtagccaaatagctatatggctttggtcaagtcatttaatcattatgtagcttagtttcttcatgtattacctgagtggggctataccagagcagtgcttaccaccctgactgaatcacctggggagctttgcaataatgtcaacacacagcctcacttccagagattaagacacagatggccttggttgagcccaggcataagtagattttataaaaccccagatgaatctaatgtgagccattgatttgattatctaattggtaagagwccatggtaattttgacactatccccagctcaccagttggtaattggtattattaaacgtagctacaaaataaggtgttacacttttacacygttggtgggactgtaaactagttcaaccattgtggaagtcagtgtggtgattcctcagggatctagaactagaaataccatttgacccagcaatcccattactgggtatatacccaaaagattataaatcatgctgctataaaggyacatgcacacgtatgtttattgcggcattattcacaatagcaaagacttggaaccaacccaaatgtccaacaatgatagactggattaagaaaatgtggcagatatacaccatgaaatactatgcagccataaaaaatgatgagttcatgtcctttgtagggacaaggatgaagctggaaacaatcattctcagcaaattatcgcaaggacaaaaaaccaaacaccgcatgttctcactcataggtgggaattgaacaatgagaacacatggacacaggaaggggaacatcacactctggggcctgttgtggggtggggggaggggggagggatagcattaggagatatacctaatgctaaatgacgagttaatgggtgcagcacaccaacatggcacatgtatacatatgtaactaacctgtacattgtgcacatgtaccctaaaacttaaaagtataataataataaaataaaattaaaaaagagaaagtatactagagtggaagaagaaaataagagaaaatttagatgtctccaaatttcttattcttttaccagttttaatgttatataatcttacaaatgtactgtgtagggaccatggaacagttagctgactctgctaaacatgtattatgcctgcattttagtaagtttacaattttagttataaaggtttagtgataaaattgtaatactcatatttaaatgtattatgataacaatgcatttagtataaatataaattttatatatctgtaaataaaacagtatattttatgtctcaaaaaaaaataggtgttacaatactttggctttgatagttaccaaataaggggtacctttttgacaaattagtgtatgatttaaaaaatcacttgctaaacagtctttgtaccgaacttgatatagtcttctctaattgaaaaaagcacttaagatcttacaatgtttcaaggctgtcatgattaaattagcttttgtttcatagactggacatatggaaggtacatgtaggaaactgggttgaatctgtacttactcaatggcgtaatctggaatgccatgtttttaaaaaaattctgaacaaagacctttcctccttattgggtctaaatgtggaatcatgtactggttgatcctttgaagccatgtgtttttttaggcatgtttacagtggccccttttatgttaayttgctgattttcatactcaaagaagacatgtactttatggcttgaatcctaaaatatgtgactcccccactgggaatgtgttttaattgtttttgagaacatagtttttaagcacctmtttttggttccttcctaatcttcagagtctacacacttagctctggagaagcaagttatgtgtttaggaaataatagcttattttgctgagtgttactgactctgccatctataccagtgtgactttaaatagattacttactctgaagtgggcctcagttttatctgtcaagtggaagtaacaatcactgcatacaaaataaagcaaatacacaaaggagttctagcacagtgcccattaaatagtggctcctatccatccatccatccatccatccatccatcctccatccatcctccatcttcttccatctttttatcctaccattcatccattcatatacttataaagtgcctactatgtaactgactgtgtttcatgttgggagaaccagaaactagagaacccgtttctaacctggaggcctccatgatgtaaggaatgatcagaactcaggataggtaatgcacctggttttcattttgagttttktaattaaggtttttgtaaatcatattgttgcaaatatatctagcgttaarcctatagataaaaatctagaaaacttatcgagatgttacaatggctttgtatttgatttcaaaaatgtcttttgtactagttaggtgctttggcttatttggaaatttttgagaagttatgctttctgacctgttttctctgtttttgcaagttgatgacttcactcattagtgtgggaagtcagattttgtagtagactgtcatgttttccacatactctatgtcaggagaatacaaattatcctctactatatatcaggaactttctttctttgaatagctattaatttagtctgtattattattataacaacagtaatttctaatgctattgaatgartgggctatctgcattttcattattacttctttcaaacaatgaattatcaattgagctgtaaaaatgtactctgttcaatctttgcatttcaggattccttttggcagcattttcttttcttctttgtcttcttctttttttcttcctcttcccttgaaagctctataaaattgccttcaagtgaaatgaatataaaataggaaattggccatttggggcacgttttctagtgcaggtgtaaggcatagtttttactaagcctaacaacatgcaggacaattctgatcgtgtcatccaattgatgatgataaacatgttgcttttaagtctttgttgcaatatgtgataaaaaagtcttagtaactcctgagaatatccttcatgctggaagaaattgttcatattacaaactttattttcccagaaaagataactatacttatcacaaaggaagagagggcaagacagagaaacaggcaaatgtaaaattaagccatgtcatctatggtttctattacaatagaatgcatagaaaacatagaaatatgtgttttcttcttagaataaagactgtgaaacagtgaggattctgtgtcttatatcatggggttttatttgctccattgtcatttacgaatatccaaatgttccacagggagagttttgtaagctaattggaaccaaaaggcaattataagcagtagaactgtaatcagtgccaaaaataatatatatttttatccacaatgcaagttaaataacttagaaaatagttgtgatacttcatgcttactaatcatacatctacacgatctttattctaagaagtgaaaatgtttttacacacattccgattaattcacaaggtcttcataaagagggtaaatggaaaatcatgttaccttcatttagaactgtgtctttaaagggccaaatttatgacctgtttataaaattgcagttgtagagttaaaactagagtccttttcagacttgtggtcccctactttagttctatatattagaccattgtactttgttttaggagagtcatttaattttctaacacctctaagaaaaacacacttttaaaggcagttttgttattttttggtagaaaaaatagtaaacaaaacatcactttatgtataactttttgtgtaacaggaagagtcacacagaaaataaaaagtcagaaagtaagttgagcttagagagaacttggaggttctcaggaggaaggaagcatttctagtcatgctgatttcagaggcaacgaacctgggggctggtgggctcttgacttggccaggggcaaccaggtgctggattccctgctaccatcctctcagccatccagacacaatggtgatgaatgttctgtaagctggcctttgtcttagtttaccttgtcaataatttttacttcccacaggactgctgtatttggtcttcaaacagtccaggtgacttgcttttttttacagatactttttcttcattttaagctgaatagaaaaatgaagggctgattagggggatctttttcacaggagacctgttttctcaaacctccaaccattgatgtatatgttaccctcttcctggttttccctttcacccccgttstgtcagctaaatccttccttatcatcaaggcacaatactgggttgccttttctgacgtcttctcagaaccaaaaaggcttctatcataacacccatcatactgtgtcctaagggtctttttatccttcttcctgcctggttagagcactccagaaatataaaagctatgggtttcattactttatctcagttcctagaataaaataggcattcagtccataggtctggaatgaataagcctatttagagttgtgatctccataaggtgttatttacaagttttaaaaggaattgtttattaaattatactttatgatgtcatttgaaagaccattaaagtattttttcatctgtcagatttaaatgtgccttttttctctcagaataattttaaaactacttaacattgtttcctcaaatttctcctctataaaatgagattttaattcttaaatgactcatggagtgttgtgagtctcataggaagtaaacttgaaaagagattgaaaaggagaaaaaagtgtatttgggtataatgattaatgattttgaaagacatgctttattttccrgaaatggaaaaatgataatcaggtattttttgtttctggttttgtttttaggtttcctcttcccaatatttaatgtgaagagtcccactggcacatatggtctcatagaagactattctgccttcccaattctcatacccagtttttgaaatttctttaatcagagattaaacttttacttcataattagacataaaaatgcaaatgatcaattctgaagagattggttgatttaaataatcatcagggtaaaaatcatgagcccttttctcagagcaggtttgattgaggaagacccaggatacctcacagagagtgatggagatggggaaggaaaaagagagakaggggtttacagaaaacaaacgctgcctagggaatgtgactgagaacataagtgatctgtgcaataacgcacaacccagaaaccctctgagcctggagaagggaggtgcagctgagtggagttagtagatctttccctccagcacctctccctgaaacttcagaaatcagtcacttcaaaggattcttttcctttgccctagattaaaaggagacttctaatcctttctagaccacacaacaatattagctccagtagaattttctaaagctgtgtatttttcttcctgatctaaaattcaagtgttagtctgcatcatcatcagagkcaaagaagaacattacagaaatgtaagaaagaatcagatctcctttgttaagaaaactgattccggacaccaaaagactcattgctttgggttataaaccagagagtaaacatttcttggaactggtaagtgtttttccccttcagattcctatccaagggcatttcttcatgatgtctcaaactcagattttatcatggcaatgatccttttaaggcagtgttggagcttgttttcccagtgtcccgctgttcatcttggcttttcttctaaactgcctcttaccactgatttattaaccccatcccttgagtaaaatcagtagaagccaaggcagaattgaaactgtggccatggggataaaaagctatgtgaaagtgtagaggctcagtcggcattagtatgtcctgtaatcatgagaccttgattttgacaggtatttgcctgtaaatactgagttaaatcagagtccctaattacaggaaaggagaaaaaggcagtatgtgactgcactagaacaagggaggccttgggagagatgattatagaagataataggcattagtaaaggcctgtaagaaacattttccctgggtgattgtcaactggctttgattaaatagatcataaactgaatttgcaggaatgtttccaagtgtacagactgtagtatgggaattggcaggcctcctgacaaagtgggtgaggtcctaattgttaattctcaaaatgggcatttttggttaacaattcttgtatttttccaatacttggtacagtgcaatgtaggttataatatacttagatgaggacastgccatctaagtagaagttcagacaatgaagtattatcyctttttttttcctgcagggtaagggagtaacattatgggagaaagttctgagaaattctgttgtggtcctttttcttccattattttattactatgtaagctacattctgccataatgactaaaagtttgtgtcaatcacagaatactttcagtgggcyatgaatttggaattccatctgacgtgattattgatttgatggtgcaagtggtttcagtaaagtatgcatgtgcacatgcccttaagagttgtggccaaataatttatcaaattatagcatatattgaattttaattattcatgataatttgaattcctgaagaatgaatcaatgaatgcaatttctaacaaatcaacctttatgtgcttcggaaaatagaccgcttcacactgagttaaaaacgtcactaagaagctgaaatgtccttgtcttctgtaaataaatgctatcagattaaattactggcctggcacagtggctcatgcctgtaatcccaacactttgggaggctggggcragtggatgatttgaggtcaggagtttgaaaccagcctggccaacatggtgaaaccccatctctactaaaaatacaaagattagccaggcatggtggtatgtgcctgtaatcccagctactcgggagactgaggcagaagaattacttgagcccgggaggcrgaggttgcagtgagcagagatccagagatcgcgccattgcactccagcctgggcagcagagtgagatgccgtcccaaaaagaaaaaaaaaaaaaaagattaaattactgacacacatcatccctaattaagaatttgtgsatcaaatgttttttggccaaccatgactgagtggagtactgtgggggcattgcaaaagtgcttatataatataagcaaagaacattggtggtagccgagacattggaaatccttaggtcgtgctctgtgtttcacaggtgaggataatgaagccaagaagggttgaatgacctattcaagatcagaaggccaaaaataaaacccaggctcccaactccctaatcctatcaaattatcacctcacaggttttttcctgatcaaaaatatcacaaaaatctatgaaaataaccaaagcaaaagtgaattaaggaaatggcattgtctgaatgagatccttgaagattgtgtccacgtctattcatttttaattccttagtatgtaacacagtgccttgtgcatattaggaagtcaataaacttttctttaaagcactacttttgcttttagtagaaaagtaacattctttaaaaatatctcatgctgccatgagcatttagtgtttatggtgctatgactcagaatattttctttgtaattagttatgattaaaattgccaaggatagaaaaacattcatttgttgtctgccagtattagaaaagcaaatttctttggacctttgttaagcctggattggttttgggttatatggcttctcaccaagatatggtagaacctgattctttccagattttgtattgagtaacaacgtgggttttggcttacctacatgtagactggtttttgttgccraattttttttttctatcattaaaggtattctcttgtttctttcacacacacacacacacacacacacacacacacagtcataagactataatttaggattgtatcatgtacatcccacccagtgagactttggagaaaaagcattaagacacccatgatcagaggattccctttcttgctgcagaaacacagggacctcaccaaatacatttttgagtaacaggagaaacactcggtgaagtctcattccagtgttgtattcatctcaaatctacagcttatggcttttagtgggttttttttctcagtatacatttcacaacttttaatttttaagggtttttgacacttccatctgccaaaatttcagagatgtaataaacacaattttgtgtgaattggaaaaaccatcaactataattgaagcctttgtcatgtattttgatgactcgatgcaattataaacccatacaaattgaaggtaaatttaatttcagagatcctagaccaaggtatgagtttcttagacttattcagaattctaagccaatgacagccactttacaagagaactatgccagagatagggacattttgtactgtcttttgaacaacctcatgaactttcactgtttatacattggacaaaagttaaggatcatatccccttttgactaagaaataacaaaaatgcatagcttatggttttgttcttttgtatgtgtgcatgagtattttggaattaatggtagtggccatcatataaccatatgcaggtaggcttggcaagttttcaaagtgttcactgatagaaaatgcatatcttactcatcatataggaagcaattaacaatgaaagaatatgtgtactgccaagaaagcatttgagtaaaggaatggactgtcaggaatataatagttcccgttcaggtgaaagtgatatgagagtctatgttccttgcggcttagcaagtttactgaaatataaagagtggtaggattgtacataggattagacatttctrttttaataacacatgaatgggccaaataaaaaaggaaaacttagaaatgaagtaagtgattgacaataatcaagaarcaatattatagataaaataaaacaagtatttagcatttgcaaagtactttcatgcatattaattctttgatccttgtaacaacctagtgagggatgtgtggcagatcttgtcatcatccctgttttaccactgaaacttgcaaaaggttgcacatctttttatagcagagctagaaatagaacaagctcttctgatgacacatcctatgatactgcctttgtgtgttttccaagaactatcccttatgtatatgtaactgatgatggttacaatatggctgcagctgtgattaaaaatctctccttaccaaaggctagtttctgactcggtcttttcctgatcacttcctctttgctggtttttttcttttattgcatgtcctcacaaacttcatcagaataatgccaaaaacagtgtgttcatctttccrtccatccttccttccttccatctgcccatccaatcaataaactaatttgtgtatacagtgtattcacctatattcccattattcatggccatgctgtacatcttctttccccaaacactcaacctgtgtatttctgacagcgggaagtgactgggcagggtgacagtcgctctgaccattacccatgtgtgataaattgcttagtaatctccacagcaccatcgtgcatacattgagagtgtttagggcattgtaacttgggagaatttccaatcgttcataaataaccattaatctgtcccttttacattcagctttccacatctgtttcaaattgttcagtgctattccaggagtgcattaaggctccaatccaggtagtattaaggggataaatgagccacagggaagagacactgtatttttctcaaagcagttctttctcctttttacagagttaggagccaagcaatttatgattaagattttcagaagatatgttttgtcattttaagccatccttgtctgtgggtttaaaaatgaggttttagctctagcatcctggcataccttaatgtatttctctgtacaggtagattgtgaatatcatttctaccagcaaacctgaagtagttttaattcattatgattcagtgtggattcttattgaagaaaaatgaagaatagttaaaacctaaggtcagttagaaataaataagtgccagagtatgcatttatgtttgtgatgttcgggaatgtcagaagaagttgtcaataattttagtttgatacattttctacaggaaaaaaattgcttttcaggaaaaaggcattgttattttatgaattataatttaatattatgttgctttatgtctgctccagataattgaatgaaaattatacaggtgcatttttttcttaccatatagtacccataagatattttctcatgtgctttccaaagaatgtattttcataagaatgacccaacctgtactgttagatttacaaaagtctcatcacatagtacagagatgccctgcagaataaatgcatataaagatagcaccgtatggtatatcagatgacacctaagtatgagagaggaatgttttcaagttgaccttgaagatgttcagggacttacagaacaaatacgaggcaggaggataactaaaagatgattccctatctttggcatttgtaatactcataaaagggatgacaagctgattatctgacccagaataaaatgcccacagagtaatgtaaagaagaaggaaattcagttgcatgtctctcaccaaggttagtaaaaacctcatatcatcacataaagtgcactaaatcattggatttgaggttggtctatgtcatagttacagtctgcaatttcatccaygcataggggattgacagctgctccacccattagtattaatgaattaccaacgtacatcccacacacatccaccaagaaaccaaagaaagccctcctacacactactttgttttgaattctccaaatgttgtaggatagctatctttttaataagtagaagttattatatagctaaagctgataagactaggaattagtaagtaattgtaactttattcatacgttaaaataggttaaattatctctcacctctctgtcatctacggaatgcctatgaccatttaagaaatgggacctgaactgctagggcattttattaaggaaaaaacaattcagaatgacattggcagcctgtttagtgaaattttttccctcctgaaggacctccaagagtgtcctttaaaagaggtaaaaaaaaaaaaaatgagttttgatatgatgaccatgtgtacttgtttacccagaacagttcaatttataccatttgttctggcatagttattagtcactacccatttactctcaaaaggtcctgatttgaatggaaaattatatgttcatctagttttagagcatttcttatacaaccacggtctcttcctctacccctctagtatgatttcrgttcccatttatgtcttttgtgtggaacacctgtttctacaaaggaagaaagaaacaactatgccagtccatacactttcatcagctaaaaaattcatctctttttcctactcttttattctttgggttctcatcctcttttctctgctttgtgacattgcactccccaacgctgtccttatagaatatgtcagggacaggtcaaagaatgtcactatatgaatattttcctatagaaacagtcagcttaatccttgtcagtgcttgtctgtgtgaacaaaaaaaaagtgacatatagtcatgagttacttaatgacagtgatacatactaataaatgcatcattgtgtaaatgttatggagtgtagttatacaaacctagatagtgtagcctactacacacctaggctacgtgtatagcctcttgctgccaggctacaaacctgtatcgcatgttactgcactgaatattgtaggtagttataacatttgtgtatctaaacatagaaaaagtacagtaaaagtatggtattataatcttatgggagcaccatcattataaagttagtcattgactgacatgtcatcatgtggcacatagctttattttattctttttaatgaagaggaatttagggccatgctcctcattgacagggaactatcagattgagttatatctccccttagaaacatttattaagggcccactctgtgtctgacatcttgttatacaaaaatgactgagagattatcccttatgccaaggaactcacagtctattaatagagaagaccatgttgaacaataattacatatactactaggagtgaatactactaaagcactactacttcatgtatcaccaagggtatggaaaggtgtgcatgggattcaatctgggatctgctccttggggaagagatgacagagtaggtaatgtgtgaactgagttttggaggaggaacagaatgaaggtatcaatttacatgaggggctctgcatcaggtttgctctgagaaagtagatagcattacattggccaacatacactgtcacaaaatatcacttattctcctgtacactgcattctatagattaaagccttttgttgttgttctgaagaagagtggaagttgacagtttactatttataatagccataattttccaatttgttgatacaccttcaaatacactttggaaagaccattacagagctctctctttggcctttcctcgcaaaatagacttatttcctttatgtactctcaaaggtcttgtttgttttttaaagcattcttattcttttctcttctgagcttaatcagtgtatggttcctaccacactcctttatattttgcactcaggtagcattgtagtgygtttatatataaaggtctggctagtggtatagtcccaaataccatacttatttacttgtatctcactgcctgctgaaaacaaaccattatagagcacttgataaacacagctgaatgaaacaaacagttcacccaaccttgtagttactgctaccatccctcccaggtctctgattcctctctctcctgatcgtttctttctgccttgttgtttcactagtttctgtaaattctgtcttctatcttctctctacattttttccaagtgatgcagccttgctccaattttcagattcctctctaagtcatctaagtctgtgttgtatggatggattctctagtcacctcctacctccattcttcatacttttcccagtctttaactcagaaacagatcatcttctcttcccatatctaatccactggccagttcagcagacttagttaaatagtgtcttcagcatgtgtttctctccctccaattcctttccttaccatgggatcagtttccttgtgatattctcaactcygaaagtgagacccatctaggagccatattccacattggtgcaagtttaagtcttctaaaacatacaacacctttaaagaaatgccatcaccaatgayagaattcagctatcactgtcaaattgtttcctaactactttttatatttaagtcccactgtctttcttcatgagtctctattatgcttgtacagagaggcagtgcagagccctgaagttagaacatctgagtttgatttatggctctgtacttgttagctctgtgaccatgggcagattatttactttctctgtgtctcattttcctcatctgtaatgtggggatagtaattggacctaccataaaggatcatagcaaggattaaataaaacactcagagcagtgtctagcwcatattaaggattcaataagtattagtatttttgcagtttaatgataaaaaccacaattacttttgcaccaacctaatagagtcctattctccaaaatcttacggtcttcttctgttaataagtatcctatttctttttcttaaatctgaaaatcatccaaaacttacatttcactgttttctattttcacatcttgaaatctcatcttgctagaaagacattctcatgtcttctcttagaccggtagtatccatttatatggaattcataattatatgccttcacaaaattcatatgatctgcttatgccaatgaatataaaggtgaaagatagaaactgctgttatctctctatcgtaggtgtccccaacccccagactgtggcctgttaggaactgggccacacagcaggaggtgagctgccaatgagcaagcgttactacctgagttccccctcctgtcaaatcagtggcggcattagattctcataggagcgcagacttgactgtgaactgcgcatgtgagggatctaggttgcacttcctttatgagagtctaatgcctgaggtggaacagtttcctcccgaaaccacctgccacgcccccagcacccacctcacctcaccccacatccctggggccaaaaacgttggtgtccactgtgctataggattgagagatataaagctaacaaaattgaagggtagattgaaaaataaacttgaattattttatgatcatgacctgaaaccacatgtaaagttgaacaaccaagaaaactatctctgcttttgcttccttttctgatccacagtaagttaatgctcaggactggatataacacataaggaattctaaggatcctaagtaacagtgctatgtatggggcatcatggggttatcatttgtggtaaatttgttctcaacactggcattttttttttttccttagggcagaaatttagcatctggagaggttggattttttccaagtgatgcagtcaagccttgcccatgtgtaagtattagtatcttaattttctcttgcttcattttgtttttgatcctgtgattaattgtgcaaaaatctacaaaggatactggccaggtcagttattaattttattaatattttctggaagaatcattattttcaacatcattatagttctattgtcagaatatgttttttaatattaagaaaatatatagaagaggcaaattttacttagtrgaatttatataactaagtagtctaaaaggttttagaagaaataaaccacagctacaaattagacgcattgtrcaggtttcccctttcccactgaactgagaatggtacggtctgcctccagtcacttgggttacagggcgatattacacttcagctgatgtctttgaaagcttgctagaaaatgaaaagtccacaaatttttcaatcaaatgtctaaatatattttctatactttagtgtgacattactttttatataatgtcataatggaattttctgaaaatataaaacacagataaaaggagaataaatgaacatttcctcaattaatattacaggtgaatgtaacctaaaatgtactycctggtgtgttatgatactgataaacttctgtttagggtaacatgattttagtatcataatatggtattatgggtgacgttttccacacaactttttaatttattgactccaaagtaaatgaaatttctttactaatacgatggagatgattgcctgaaggggaaaaactctccttaatctatcgtgcttgctatatttcagtagttactgaatttccaaactggacattctttttactgttagaaacatgagaatctgccatccttggctctagaatgtgccctataggataatttactccactcattcaagcttaattactttcaaaatcaaagagaatagaaaagcgtctgttactctgttggttttgtgatctaatatcacatttgtttaacttttattttaggtttaggggtacatgtgcaggtttattatttgggtaaattgcatgtcatgggggtttggtgtacagattattgtgtcactcagtttctaagcatagtacctgataggtagtgtttagatcctcaccctcctcccaccttccaccctcaaggaggcccctggaatctgttgttcccttctcatgtccatgtatactcaattttaactttcacttataaatgagaacattgttacttgcttttccgttcctgtgttagttcactcatgataatggcctccagctccacccatgctgctgcaaagggcatgatcttgtttctttttatggctgtatagtattccatggtgtatatgtaccatattttctttatcctgaaacatatgggcatttagattgattccatgtttgtgaatattgctgggatgaacataagcatgcatacctttatttgtagaacaatttatatttctttgggtatatacccagtaatgggattgctggctcaaaaggtaattctgctttaagttccttgagaaattgtcacactgctttccacaaaggctgaattactttacattcccaccagcagtgtataagcattcccttttctctgcaaccttgtcagcatctgttatttttttactttttaataaaagccattcttactgatgtgacatggtatctcattgtggtttcaatttgtatttctttaatgattagtaaaattgagcattttttcaaattttttttggccaattatatgtatgtcttctttccaaaagtgtctgttcatgttatttgcccactttttaatggagttgttttttggcttgttaatttatttacattttttatagatgctggatattagacctttgtcagatgcatagtttacaaatattgtctcccattctctatgttgcctgtttactctcttgatagtttcttttgctgtgcagaagccctttagtttaattaggtcccatttgtcaatttttgttttgttgcagttgcttttggcatcttagtcattaaatctttgctgggtcctatgtcaagaatggtatttcctaggttatccttcaggggttttatagctttaggatttacatttgtcttcaatccatctcgagctgatttttgtatatcatataaggaaggggttcaccttcagtcctgcatatggctagccagttatcccagcaycatttatcaaatgtttagctgccacttacaagtgagaacgtgttatttgcttttcctttcctgtgttaattcacgtatgataatggcctgcagctccatccatgttgctgcaaaggacataatcttgtttctcccctttactgaacagggaatcttatccccattgcctgtttttgtcagctttgtcaaagatcagatggttaggtgtgtggcattatttctgggctctttattctgtttcattggtctataatgttacatattttttgtcttatattacattacagtcttgaaagattattgaagtttgataccactcttatttaattagataagctaaaatgattctctatctagtttttggactttgtatgaacaagattcaggcttcctatctgtaaagtagtgatgtatatctgtaggcaggtggcaggatattatacattctaacattaagaagtttgggaacctaaagacatcaaatcaagaatattaagcattgaatgtaccatgtactgttttctgtttacatcctcttgaataaggcataaaratgagcacttgaagttttgttttagggatagtctmgcacaaagtaggcatttaataaattactgttgaatgaatgaacaaaggagtgaaaaagcaaatgcaagtccctasctgtatatagaacattagcaatggtagatactaattaaatcagcctgtagaatcatattgaatgatatttgctgacccaagaagtggctagaaggagaaatatgttcagaaattttaagatgacagagaagtagagtaacttataattgtaagcaagactactaaatatggttgttttatattagtagctactttaaattttactgcttaatgaaattatagattttttttttaattatagggcaagttaagtgaagataaatagaggggaatttgaagaggaggggatagwttgagggagtttagaaaatggtattgcttttgattctgggatatattgtttatcggggtccatgagtagtgctgaatgttctaytctgggcttaaaatttattttcctgcatttgctacatccatctcctcaaaaattctgatataggcaggtagaaaccaagaactgaggaaaacacaggcrgttcataaatgggtcaacttcatttctagcaatatggcaactagagacaaagcctggaactgcagcacaatgcaaacttgggtatatccccgattccaggagctcttggtggatgaactaggagaaaacccatcccactgatgatgatatgcctactttggtattggttcaggattggaaagaaaaaaggaaagcagtatcccctgagaatttctaatcttaaatccaaaaccatccagatgaagggctggaattcataccagctctactacctaaataattctaagctagaagtgtagtttaaaattattccagattattccactgcactccagtctgggtgacagagcgagactccgtctcaaataaaaaataaaaattaaaaaaattattccacattgattattctcccaatgaaaattcaaatgctgtctggattggagcctctttgcacacattcctcaaaggatttttaacataaagtcctaggcaacatacaytcacaatttgaaatcattaaatcaatccagaaacaaaccaccttatgccaagatcagcagaaacaataaaatatataattaaatccacaaatatagcagatatttgaattttagatactaaattcaaaattttatacttaacatggtttaagaaattaaagggaacaaaaatctaagaggaaaggaagacactaattgggtatatatgaaaatgattcaggtatagtaattgaaataaaagccttaatggacatattacatggcatatcagacacagttgtgtaggaaattgaggagaaatctgaagaaattgctcaargagcagttaagagagattaagaagttaaaaataaaacagaaaatggagtgatgagatacaaatacatttaatagaaggagagaatagagataattgtagaaaagcaatattcaaataaacaatgcctgagaactttccagattctataataaaactaatcttcagagtcaagaagcatatattaaaattaatcaacacctggatgcattgtaatgaaaccagaagacattaaagacaaatattaaaactgagagaaaagacagattatctataaaaggttgattattagacccagctaacaacagaaataatagaagcaacaagagtttccacttctggtaactgttgaatagctcctattggaccaatactcccacacataactataacttgtggacaaaatatcaaaacaaaactatctgaaggcactgcccaggagaagattgacacttggaaaaaggaatggcactaggatgagtttctttgttttatggctagctcaaaggcaggcactggattgtaccatgcagggtagctaaaattcagatagaaaccttatggtatttctggcttaaagaaccagattatggagtgagtttaaagcagtctcagcagctggaaaaggaggtaggaagtcttaaaaagagtcagagagaggaaacctcaaattctgtgtataaactttaaggaaagccaggttcttttttggaacataagaaaatacagagcctctacagtttatcattcattcaaattgtccaagatacaatataaaattactcagtatgcaaaggagcaggaaaatgtgaaccatacttaacagaaaagagaatgaagggagatcaaccctgtgatttcctgtttgatgacttaggaaaagattttaaaagcagctgttatcatggtgctcaaggacacaaaggaaaacatgttcataatgaatgaacagaaaacctcaaaagagaaataggaactacaaaagaaccaagtagagattgtacagtgtgaaactacaatgtctgaattaatatctgaaacaataagaatatgttaaaagttgtgagagaaaattactatcctcttagaaatttctcaaaaaaaggatgaaatcgtgatagtttattcaaacaaacacaaacttcacttctaagtgtgccatctagcttcataaggtatacttcaggaagaagcacacataaatagacacatatatatttatttatatatatatatwgaccmatataaatatttctgtatgtatgtgtgtgtgtgtatatatatatatataattttgtacggatactatattctcaataaaatgttttttaaaaactacatgttcatagcagaagttttgcagtgttaatggactatggtgctgggagaaaatggcattagagaaaaatagtaaccatatactcaaagatgaaaaagttcccaaaaggaaattaactgtaatcttaaatatgaagtacttgccagacaaggacccatagtacacagaagaaagtgcagagggcctatgactgatggaaaaggataggaccccacctgagtaatatggatcatggctgggaaggtagtcctggatcttcacatgtcagaatgcacccactgaagagagaaaagctctagtgggacaccagggtggaacagcctcagttacctgttctgttttagaatcttctgtcactgtttccttttttggatctccagcctttttaacagccaaaggagtccacagccagaatattttgaaattctttactctcctccttcctgtctccttttttttgtttgtttgtttgtttttttttttggttctctatggaaagcttggtttaagaataaatatatacattatacttttaaagaacacagggagagggaaagaggaaatatttttcgcatcacatttcagaagccatgtatatcttgtcatcaaagggtgaactattgaagatcagtttatttgtgaaagcaaagttatgtaagaaactatttgaatgattagaatgggtataatttaccttcaacattaattgctgtttattaggattttacaaagttgtgattttaaaaatgtaatccataggataaaaatatttgaatattaataatcaaagaaatgttctgactagaaagatgatttttgatacagtttgagtattcctcatttgaaaatctgacatctgaaatgctctaaagtccaaactttttaagcactgacatgaygctcaaaggaaatgctcattggagcacatacgattttagatttttggattagggatgtggaatgtaattcaaatattctaatttttttaaatccaaaatgtgaaacatctctagtcccaaggattgcagataagggatgctcaacctgtagataactcttaacctggaagggcaaaatagtaacagcacattatgaagaccagcatggctagagacatgttcacattggctagttctctgaaatactatagtttttactgttccaaatgagggaacagtattttcaatcaccaaatataaaaatcccattaatagcatggaatgcatatatcagatatttggacatgagacaaactatctgtactcctattcgtaggaatttttaaagtaaccctctctatagamtgtactttatttcttatttttaacattaatatacctgctttgtctttgttcattttctatttgaccattagcagctacaagttttctttctttgtttgaatagcaaatgcaatatttttccttgtgcgaagctctatgtgaaacaaatggaaaaataagtattttccatgccttttttctgaataaaaggttcttagttggtagatttttaaatcagaatttggaatttattacaaaataagagtctatatccagtgtatattgtttattttgcatgttttcccaatgtcttggaaaagtaaagagctatttggttttcttaataatgttttcactttaattttctttgataagattaaattgccttgataataaataataaaatattaaaaatattaaatacccacatccagtgtatattttttattttgcatgtttttccaaggtcttggaaaagtaaagtgctattcggttttcttaataacgttttcactttagttttctttggtaggattaaattgccttgataataaatattaaaagtttccagttcatattcgcctgctatctctcctcttagagttacagtggcagtaaaatgaatgaaagaatgaattaaagtgaaatgaattattttctacttatctgacagatactatgattcactctgtataaaattaccaatggatagttccaggactgtgccacttagggttttatagagctgagtcagctgaactgaattaatgattgatttctaaaagcttmccttatgtaaacttaatctgtttttgcttttttatatcctaggtgcccaaaccagtagattattcttgccaaccctggtaagtattaaaaatgtttatgtagctaggttgaaataccatacccttagctccaggatgccttaaatgtgggggtagtaaaccatattccatttccatttgtctcggctaaaggtgttttcagatgtaacaaaacaccataatgaattcatgtattgctgacctttccatatctttatctgcgaggggggtgtgtgtgcatgcgagtgcccagtgccctwgactgataatttaaagtttataccagccacagaaaggaatggaacatacgcatatgtatcttatattttacagatttaataaagcagagagaaaaatatgmtttcattgtctaaaaactaaaaattagctcaaaaaggacagtagtagtttttttttttattttttatagttttagagatkggrtcttgctctgtcacccaggatggagtgcagcgatgccatcataacccattgcagccttgaactcctgggctgaagtgatcctccaaagtgctgggattacaggtgtgagccactgcttctggttgacactagtagcttctaaaaataaaatttacaacatatgagagcaacaaaatataaggatggggcacccttaccacttggaggctgamagtatcattaacaaaacctaggaagtgtaatggatagtaattattattttctagatatctccaactattaaaaaatatrtttaggatttagtatagtcatgatgtcataataactaatatatactgagtatttactatatrtgctttgtactgtacatgttttgttttatttcttcaacatttatataagaaaagtggtggtgactgttgttattttttatgggtgaagaaacaaagaaacagagcatgcaactagtgagtggtaaagccagaattccaagttatgccatctgtacattgctatactgcccccaaaatgcagaatgtgaacacattactcatttctatttgttttcctgaattttgtrtttgacttctcttaaaaagactgaatctatttttaatttattggtattaaaatacatgcatagaaatgagatatcagaatacatatataaatataatatcctgggaatatatagtactagttgggtttgcatgttaccaygtgagttatctgatattttttacatgttctgattattttctgttctataacaaaagcatggaaaatgctgagttacttttcaaagtgtaggaatccactgtgcaatgtatgggactctcctcgggccctcctccaccttccctcctctggcagtcactctgccttctgtagttactgtctacccttcctgatatccctccctgggcctcagcactgagcttgctgaagaaattgtggcaggtttgtgatagaactgggaatgtgcttcatttttacctgattgaagacaatttgaagtcattagtgtctgtggaattttaaactatagtcctgaaagaaatttaatttgaggtctagagctgatagcattgataatcaaactgaaaaacatcaggaactgttaaaaatcttgaaagtgtgatgattaggtttcttctcttataccatttttcatgtaactgggcattatagttacaaaggtaatgatttgagagataaaatgctaatacctcaaactgcatggattttatgaaataaacttattaggtacctaagaaccattcagggcacccgaaggtaggttttgtacccttagttttaaaatgcacccttgccaatatgtaaaatcctactgaaaatatgaccagttagaataatattattcttataaaagcaagatgttcaggcaaagggagagccttgaaaataggaagaaataaagatgtagtagaattttaaattacttttctttttttcttgagcaacctggacaatctatttaaactaagcaggcagtttgatgtgaaatgtcttctgctagggaacaaaatgatcaactcccccagaaaatagaaccttcaattttagaaatactaaactatttagagaaaattactttgcttgatggcatggtagttctcaagtcactgagaagttaagtatcaccaactatattatctactcattatttctacatttaaaagtaagttgtttgcacaaggtaaattttgtctcttgcatacagaatgaaataaaatagaaaattaagatgattgtcttcaataatctatgtttcggggtatcaaaagataggaatgagatttgggactgcaaactggggaactatcctaaaatctgtatgcagaacaagagatagatgtcagggtccctgccttttcccatggtagtcyggacaaattgccctttcctgcagtggcaggagacactggagttagaaggtatattatgtggaaaaggtgaaccatgtagggcctagatttggaaagatcaagcctagcagagactggggagatgccatagtgaaaacagagggctctgtatactgagtgatgatgctctccagttctcttgtgtagctcagtttcagcactgtgacagctgggtcccatatacacatactaccctgtcttggtattcagacaggaatttggaagatttttggccaaagaaacgaaatagagttaaaaatctaaaatccagacctttgggtgtttcccagctcagtcttcaggttcttgtcaaatgatcagactcagctgggcgtgttgactcgtgcctgtaatccctgcactttgggaggccgaagtgggcggatcatgaggtcaggagttcaagaccagcctggaacatagtgaaaccccatctctactaaaaatacaaaaaattagctgggcgtggttgtgggtgcctgtaatcctagctactcgggaggctgaggcaggagaatcacttgaaccctggaggtggaggttgcaggcagccgagatcacaccactgcacaccagcccgggtgacagtgtgagatttcatcttaaaaaaaaaaaaaagatcagactcctacccagtggacctattttggtgctcacacacacagagtttccagtcaattgtggatgcatccttcttaagtaacaaacaacaaagagtaaccatacatttgaggaaacccttgaactaaaaaaaaaaaaaaaaaaaaaaaaagaagaaaccattggagtgagcagacaccttaaaaaaacttttatttacatcttcaaaattaagagaaaacttaagttcattggaagtaagctcaatgttttagaaaacagtcaaaataaaaaggagctcttataagttaaatattatagaagacttgggaaataaagtttagcaaatcttccaaaaagtcagagatrgataatatgagagaagctatatggaagctagactgttgacccaggggatacagcattcaagtagcaggaattccagaaagagaaaaccaagggcagcaattatcaaagaaatgatacagaaatttctcagaaccgaaggacatgtggctccaaattgaagatacttctgaaaggcaaggacaatataaaaaacacattatcaygaaattttgcagtatatagagaatacagaaagaatttgaaggtttctagggagaaaaaaatcaggcaacatacaaagaattagaaatggtattgaatggaaattagaagacaatgaatcaatgtattaatatttgagaggcaaaataatttctcacctagaattctttacccaataaccaaactatgaatattgcaataatattcatagccaaactatgaattactaggtaaaataaaatattttcatagatgtgggactttagagtgttacatcctgtgtatgtttagaaaaagctgaaggatgagctagtaaatcaaggaagagggagatatagaagccaggaaaggggagcaaagagaagtcccaggactacagtaattcaacaggcttagtagagcaagcagtatcaattagaagagcgtggagggctcagaagaaaaggctccagagaaaattaacaggtagattatgtggttgtcttaattcaattaatgcagctataggttgagtatcccttattcaaaatgcttgggaccggaagtgttttgaatttcagattttttcagattttggaatatttgcataaacatcatgagatatattcaggatggaacccaagtgtaaacacaaaatttatttatgttttatatatatcttatacacaaagcctgaaggtaattttatgtaatattttaaattttgtgcatgaagcaaagtttcgactgcattttkactataatctgcattttagtggaaacatgctgactctcagaaagtttcagattttggaggtttctgaatttcagattttaagattagagatgctcaacgtgtatagtagaataccacagagattggttaacttataaagaagatatatttatttgtctcatggttctaaaagttgggcagtccaaaatcgaggggctgcatctggtgagrgccttctcattgcataataacatggcaggagatatcacaaagcgaggaagcagtgggagagacagagagagagtagtggatgaactcattctttttatcaggaacctactccaaagatagctaaccactcctatgataaggtcattaatccactcatgagggcagagcccccgtgacctaatcactttttaaggattctacctttcaatactcttataacaatacttaaatttcaacatgggttttaaggggacattcaaaccatagcaatgttgttgaaaaatgtatttttgggaggtatatttggaaagaatctgtgatagagacagagaacttgaacaaacaaaaacatgagcaattttattttggagggcagatattctttgaatgaacaccctgccaaaactaggccagatgacagcttggctttgtagaggttacagaaagacaagagtgaggaacagcactataaaggagtgagcacaggtggcaggaagaagatggttttccttccttatgtttaaaattgataagaaattgtcatataattgtttagaaatacacaagtagaaataaaaaataggtacagtgtttgaaagggaacttggagtagaatgctggtctgatggaatactgctgctttttcattattataatgtgaatggacttttaaaactatattaatgcatagctttgataaaaatgcatacactcaatactaattgtgataagtgccacaaaaataggaatactgtaatgagaataatggagtaggtagtacaagatgcaggacaacattctttagatggtatggtcagagaagacccctctaaaccttaacaatgagaaggaatattgtgttgatagggtatgagtgtttccagacaagagtgcagtctgtgagaagaccctaagcgcaaaaggagcttgagaaactcctggatctgaaagaaggctggagactagtgatgaaggtagatgtaagagataaggttgaagagaggtaggcatgagtcagattatactaggtcctagtagttcatgagttgttataacttttcttttaacgcaaggtaccatctgcataaaatgcctttagttcctcttttatactagatggaaacctaacatgtcctccatcaacaaacttttgctgaatgcctgtcatgtgcgttttaaatgaatattaagtttgcattacaggtggatgtttatacaaagttacgtgggtctatatgtgaatcagaggattttcggatacattaattattgactagctttgaaagagaaccaatctaaacagaatttttcttttaagttctattgactaaaatctctgatgtaacttgccaggagattttacacctatgtatgatttgaggggtcattaaagattattttaagattgaattttggccttttattattacagttattatggagtttctgtatgtttaaggccagcaaagtctagggagattgaattctggttttgaaaaatatcaaccacaccggtggtatcaactacttgggaggctgagrcacaggcctcccttgaacccaggaggcggaggttgcaggcagctgggatggtgccatgcactccagcctgggcaagagagagaagctctgtctcaaaaaaaaaaaaaaagttactagcatgttaaatagactgcattgctttgggcttgcctgtatttagcaaataaagagaatgagaaatgttctttctatgcaaaaaaaaaaatctaccttttaaaagtaaattttactcattattactaattgcttaagaaaatttatcaaaattgtggacgaatgaattaatctcataacaaaaaactatttaaaataacttattgctagaattttctttaaaaagatacttaaaggagatttcatttcatagtatatatagaaaagctaaaataaatgtgtctgtgtatcttatacagggcagtttctccctacaagtctttttccttcctgtccctaagctccccacaactgtctttttacccaatacccactgactcctctgtgtcccatttatttactaggtgcttagtgggtattaggcattgttcattttgctgttgttagttttgtagagcatttgtgtttggacgtattaaaggacctttttctgatttatttttcttaaacaatgtaattagtatagaattaccaacagctcagatctgccactaaattaaatattgagagatacttacttttagcctctgttctcttccaggtatattatccaaattttctgtgtcattgttttttacaggtatgctggagcaatggaaagattgcaagcagagaccgaacttattaatagggtaaatagtacttaccttgtgaggcacaggaccaaagagtcaggagaatatgcaattagcattaagtaagtaggacaagtacttttacagaaatagatttcctgttttcataattgcatagaccatctgacatgtataacactgaaggtgaaaaccaaagttctaattgaaggagaaataatgcatctatccagacagttcattaatacttgaaaatatatctttgaaaaacagtaaaaagtgttataggttgctaattggcatattagatttctttcataatattgtgttttggtggtttgatgtgtgtatatttctagtaaatactaacagtataaatttctagatttttgtcttatttttctrtattctcaaactgaacttaataaattgtgcataatgaatagtcaaatccaacctcccttctcacttcaaatattggttgtatcctcaaccaatccagtaaatatattttgttaattagctgtcaccagtgtattggcataggtatatatttttgtctgcagaattaattcctaaaatgttattggggcatgccctctggtaattattgatttctactgattaaaaacacatttatattcataagttattcattgcccacaggtacaataatgaagcaaagcacatcaagattttaacaagagatggcttttttcacattgcagaaaatagaaaatttaaaagtttaatggtaagcattgattatttcttttcaatctgggatccttatttttcttttgttagaaaggtcattttaattctatagtttcttggaaattttgctcactgaaaagttatttaaagataatcatattctaattttgcaacaaaatcctgaaaattctaatttataaatctctaagttttatattgctcgaatcrtaatcttcattgtaaattgtttgcaggtttagayagagttttggtttgtgtttaaatgatacagcagattttaaatatacctttctttcctctttttttcttcctttgcctctatgtcctgattcaggcagaggacagtattttaaattataacacaaaaagttgtaattagtaaaatatgtctaacatttaggttcattttttataaaatgcaatataaagtcaaattgaaaagatttttgtattttttgctattttaagtgatctctaccatggttctcattcattaccttagataattatgcattaacaaggtaacatttttgccacttaacagttgatatttcataggaattgtatatttaaatggaaatagtatattgtcaaatcacatcaaatgaataaggattattcccagtttaaaaaaaatagaacttattcatacttttgttagcatataagaayattttgtgtatgtcatttaaacaatgtgtatatatcatcatgtatgcgttgctaacagtaaactctaaattcacatttccttaagtggtctcaagtatgtttctcaagtttggtagtttctgagataatgaagagtttggatataggacataagatgcatttgtactgctaagtaccttgagtaacattgggaaggaccactcattgaatgaaccatcaatcaaatgatacatactgcatccttccagaaaacatctcaaagcactttgcagatgttaacattaaagttaaactgagtgtaagggagccttacaaaataggccagcttgaatgccttatccaaaaatgtagaactgcttcaaggcaggtgtcagtgttttaaagaaattgaagcatcttgagttgaaagaaaaataagaaaatctctatggatgtaaagatcattcccagttcaaaagctaaggatgggcagcaaggtcrtgtcctggaaaatgtaaactctgtcaaatttgtaaccaagatccaggcatcctccctgctggaagtaacttacattctgttgaaacaagcaggctgagcacagagagaattggaccagaggaggttcttcataaaatgaaaacttggagggaggtggcaagtggatgcacaaataatgaatgacagacacagctgagacatgataaaagcaygcacaggggctctccacatctctgcaagacgtaccagcttgagctttcacctgcagaacttccttggatggtaatgaggctgctccacagtgttatagttactatgggacttaaaaaactgctgcagagccaaagataactgccagccttgcagactttgaaagtagcaaaagtaactcccatcagaggagacaagcaaagaagatgaaaggaatcgtcactgaaaagggccaatgaatttagctttgtgtcacctgggttcagctcaaggcagttcttcagaagccaaggttagatgtgaaaagccagtaataccacagtgacctggattggtagacatagatacatgagttcctatctgcatgtaaaagctgtgattatagtgaaagcaatagagacccagcattaaaaaaaaattgtgccagagagccttaaaagtttctacaatgatattctctggaaaaataactaaaagtacttgtcacaggactaaagtaagcttttcttatatgttatgtataaaatctcagcaatgccactattagagacacgtgcatatgtgttttcktctccatatctgggcatcttttgtaaggaagcacgtatcacagcgtgttaaagggaagggactaagaattttagcaaagcaaaatgaaactaacaaacattagcaaaggatgtaattatgaaaagaaaaacaaggagctggaaaaaaaatctcaatatcagaaaagtgcttttatcaagtttagtaaatarctataaaaattgctgaagaggcagctgaactaatctgaagctacccctccattttgtttctgttcatttgttgagcaaatttatattgagtccttacaatgtgaaatcactttctggagaactcaaaaggacttaaccattctaaaaagaagcttaagaatcagtaaatacgtctacaccaagaacctcaccatagagcagtccttggaacctaggctgggaaatgccacatggatacttggtcagaaggaatggctcatgttttagcaacctgaacttctggaaggaggtagaagatgattaattggtgtgaaggtttctcaaaatcaagatcatacaracttcatggagttaccttttatcatgttggagtcaaataacacacttgtctattataagtaaggagtgatctgtggatttgagttgtttcttaagaatagttcagtatcctcttrttattgrtattagtttactcttctatctgtgaaacacaatagggcctggaattaaatttaaatctggaaagtgtgtaaaacataagcaaactccagagcttcttttaaattaactggtttctcagtgagaagattggccttaggtggttttgacctaacctttttcccttgagtttcaatagcttggttaatcagaatctttgtctttcttagtcattaaattcaaatcctaaatgaatttctgtatccagattacaaggcattaattttgttctaattttcatgtatgcgagacagtccatgtccaaatgctgtttataaaccatctccattgcctgtttccttggtaattggaatgactggctctcactcattatttttgagagacttgaattgttgacactgctgtgtcagtgtgagataaggaaagcttagcgatttcttttgtttagagtcttcttatttacttgttgtacctgaaggtcaatgactgttaaggcaggggtggattagactaaaatacagaaagcataaaggcaaattggaaaagatccatggtgacactatttagttctacccagttagaaacatgtaggaagatttaccctcgtaagactgtaaaaatggaactaaaatatcttccatgcttagtgaagtgataaagagtgttttgcagcttactaagtaagccgcatgaccctaggccttggaaaactcattttttcttccataaaatttgggggtgggcgagtattaaataatcaccaaatcatttttcagtatgataattctatggtttctagccaaattcacataaattgtaattcatagcaaaaatcataaaattcatattacctataacaaaattacgttgaagttcaaagctatggcttataattcctttcaagtttgttttcacatttgctaaagaaaataacacattttactcaatttaagtaataagactaggagaaacttcggtatcgtttgtatcagtgacattatgtatacgtgtgtgtgtgtgtgtgtgtgkattccagagacctcacaaaattttgctttatattttaaaaaaatgaatagcaatattggtcactaagtagaatttaattctataccttgtctgcgcaaaacatgttaaaattcaccaaaatacaaatgcatattctgatcattgaaaccattttggagatacaaacttctacatggtcttttgtttctttttctctttgcttttaaaggtcggtctgattacaaatttcttgcttcaacaaggacccacattatctgggcccaaggaagaaaggaagaaatacatatttttcaagttatagatataatatttggaagaccctaacattttaagtctaagaaaacaaagttcctagtacatcatgaacacatagcaaaaactatttcacttttgcctccctgttttttgtgtgtgtgttttttggtgttttgttttgttttgttttgagacagagtttcgttcttgttgcccaggctggagtacagtggcaaagtctcggctcactgcaacctccacctcccaggttcaagtgattgtcctgcctcagcctcccaagtagctgggatcacaggcacctgccaccacacctggctaacttttttgtatttttggtagagacagggtttcaccatgttggccacgttggtctcaaactcctggcctcaggtgatccgcctgcctcagcctctcaaagtgctgggattacaggcatgaaccaccatgcctggctcttgtttttgtatttacatttgctaggcactatttgctaatagtatgatacagttaagagcacaaactttggataaaggcgctagctatgtgactttgcctaagttcactcacctcactgatatttgagcttcaatgggaataaggcccatttcataatgttcttgagtgaaagttataaggagccatgtaaagggcctggcacatgggataatggggtagctgttacagtttttcacatgtattaggtactttatatattctttgttatcatctgtgaaatggtttattagccccattttataggtgagattgaaaaattgccatttcccttatccaatgctttagccaaactatgctgcttttagcttatgaaaggtggtctttgtttatcacctttatgtctgtttccagcctgcctgctctacctaaaatgatctttccctggttcctggctattgtaattttactagttcttcagtttaagccaagctacttgtattacaaaactttctgtcacccttcccattggatacacaaaacaaagttctctctcctgcctttgaactttcccttccaagatgagaattcctcaatggcaggaggcttatctttataatctctgtgacctctgaagctcctggtacagtgcattccacaacatactcaagttttgtcataaataataaatcattgatgattctctttttcttctttcarctgatttttggactcattgatttgtctggggaactttgaacataaccactgaacagagatattaagttgatggcagtgggatttttagaagaaacaagtggtttttttttctgtttttttttttttattttttatttttaaaaaggcgctccaatagaaacattgaataattaagttaaaagtgatttttcgtttattttcatttcagatatttataagaaattttatatctacaggactcatttgatgataagatacatttttattgtgaattattattcagtttcagtttacagtagagagattcagatttctgcagaatctatgaaaccaacctgtgaaattttctgaaacgatagtctgaaggatggcatgtggttattacattaggtttagatgtatttaagacaaattatttataagagaaaattggaaagaattacattgacctctgtgagtagcagatatgcggagctatgacaggtactatacttcatcagaaactaaaaasagtstcaagtaccatttgtgctttatcaacttttgtttaccacgaaaaagcataagtttgtttttctgccattttgaaagaaaataagtgcaggaaagtagaaattgctgtatattcagcaagcagctgttccttttattttggtttagaaaggcaagtatttcataaataagaacaataattactactctgaaactgaggtttagtattgtttcttttcatttgctacatctgactgaagacaggatgttctccatctgtgaataacaatagggggtaactcatattattaatggcctgagtaacaaggacagctattaggtaggtgtcatgtacatccagacagcagggagagattatcatttgcttaatcttccatatacctatggaaaatttagcattaaattggtcatccttattgtatttatgtgctcaggagttcatgtgtttgagaacaaaartatccttatcaaaaatatgttggattcttttttccaaaggarcttgtggagtactacaagcatcattctctcaaggaagggttcagaaccttagatacaactctgcagtttccatacaaggagccagaacattcagctggacagaggggtaatagagcaggcaacagctgtaagtattgtaattgagaatacaatttgctgtcacttaaaaattaggggcacaataacattaaacatcttccttccaaattttaaaatataaccaatggatgcgctaatgcatgagcaaggacttcttttctggagttaagcagagtcagatggaccaacaggcttgtgaacatgtctaattatagatctttatggcaaattaaaaattatgtttatgtccaaaaatccagcagaaacgtaaaagatatgctaatatttacatttcatacttttcattgacttttatattaactaaactctttttaacttacatgtaatgtgtgaggtcataattctgtttgagtaatagtatttaagcagggctggtacacagctctccagttagcctagtatctcaaatctgcttatggtctatttcaatgactactttaagaattttgacattactaatgtgtttttttggatgctagtatttctaaaaccatacattggccactttctttcagaatgagctgtgtgctacaactaatcacaaaagattagcatgcaaacaaaagcatgttatggttggactgtgagtctaagtcgaaaaccttttctctcatcgtttaatgttacataatcttcctggagatagagcatgtaacaaaaaaattgaaaaatgtcatcaagaaggtgtgattttattttcttaatctgatatcactttattttttttaaataagtgttttggggaagaagtgaatacaatttcattactcttagaatctttagcctaagcaacactggratatctagaggtatttgaaaacagaatttgcgtcggtttaatataactttatatttttccttgaaagcagaaactgaaaggggaacaggtaatgctctgggtttcaacaacatcagtgaagttttatacatttcaattcaagtaaacaaacaatctgtcacatcaactgacatattttttatttaagtaacttaatatatgttttcctcacagtgatcaatgatgtatgcctaagctcgtgcaatgaaagtagagcgaactttatgttaaaactttaaacacctattagattttatggtgttattttttagcccaagattacctgattattttagattctcaaataggcataatttttgctcattcaaaaatggaagttttctccaaaaaaacaattttcctaccaatatcttaaaactctgttgaagctatgacatttcccccagcatgaaacatgtaattttcgaagctctgtttctttgccttcccagcagcaagagataataaaagttgccagggaggtcagttagatgaaaaatcctgtttgagttgttcacttagctctagagagcctaggagggagaagtggggcagacagggagaacagatgtcccatattaggtaggaaggtcactaaccctcatatttcactctgtggttcactcccagccaattccttagtgtttagtacatggaggtactcagagaatgtagcccggcaatgaatgaagttgtctaacttaaaattatgtctcatgtttaatgaagtatttaatgctcaacttgtttgacaactaagaagggaattacaggactttttcttaaaaaaaagcatagccagtagaatgtctttgaatatccatgctagccccagataaatttttcagcaaataaactcatgagttcaaacttccctatccagtctttttaagagattctgacaacttgaatcaagccactaaaactttttttttgtaattgtgaagggaaagcaaacaattcattgaaaattttatatttgttatmgtttggttttgttcatcaattattcattcattcgttaaacagatatatattaaacacctaacacatacaaggcactgttctggttctgggatatagcaattaagaagacaaagttcctgcctttatggagtttacatttyaatggggaaactcaggcaagtctggtttggaggagtttcatatttttatatagagtggtcaggtaagatctccctcgtaaagcaactcaaaaggagagaaggggtgtaggttggtaatgattgcacagtggttaacactccaagattagtcattcgttactgcaaagaaggattacaatcttagatcaaatttgtgataccattccagtgttttatttactttatactaactttgtataaagttagaggaagactaagatggttctgaggactaaatgaggtgttctatataaagcacttagcatagtgctcttacatggtaaacagtaaaagttactgctgactctacaacttctacttcctctactactgctgctacttctaactcttattctaacacagyactttcctatatttctaaggcttgaatacatttactaattatgactcatagcaatgtacatctttgcctttatgattttttaaatataacttgcttatttttataccaagtcttgataaaagctcacccttaaagaaagactgcttctatttttatgcattttatacatcccaggaagtggtaaggaggaaatgctgcatgtttgtatagaaagattgtgcaagatgtcttcatattgcttacctttggttcatagctttaggtatgctgctatcatctaaaaataacatttgccaagcattattaccttgggatactgggttggacagaaatggcatctccattacttctaaaagtccttggaggatacagagcaggcaaggtaaagcttggaaccattctgtgttctgagtagaggttgagaatagaacttcaactcctgaaacctgctgtttattattgttattatttttaaataatctagtcaccttggaaaagaaagccccagggcactgtagtggccacttacttttgggctactctaggttagaatgttcgtagaatgtttaccaattattttttcaagtatgtacaatgtgataagattatgacaggactatcttatgcaaattcaaagtaacatctaaaaagatattgattagaattaagcaagtgtccaaagtattgggcaaggagcataacattttaaagttaggggcccattgtaggctgtctctcagcctctctcccagagtgatgggattttatctttgtctttggaatgacttaagagcatttctaagggagaagaaaagagagaaagaaaaagaacaaagagagaactcaggcatagcagggagctcttgggcttcctctagaaacttcagtgactccatgaaagatgttctatggatctttgtaaaaatcccattattttccaaaatggtcatctcaaacctgccttagattgctttaggtttacctgtagggcttgtatatttgaagggcattaaattgacttttgcatttcttgctctacaatgaacacataattattttgaggtctgccagagtagctgtctgaccttaggcgagtcacttagcctgtctggaccttagctttctcatctgatgaatgaggaatgaaattagagattttataatgttcttttaaaaatagcatcttaggttttttcctttgtttgcatgagagaagcaggtaaggtaatgttaacagattggtgcattaggaaaagttgtatgtttagctattttgtgacccataagcagaccttaaatattttgccaagtttttatttgtagagaattagttgggccacagagtagagttgggtaatttttttaaatggctatcactatatttatataatatccaagtatcttctgtaagaacttattaattacaaaagggtaatagtaataaccaagtgattgaagttaacatccctaataatgggacaaataaatatcatgtacctcctaatataatgctccaagcaggacaaaccaacactttggtggtattattgtccccaaaaagcataagtggaatctaatcatgaggaaacatcagacaatcccaaactaaaagacattctgcaaaataattggtctatactctaaaaccttcagtgtcattaaagaaaaagtctgaggaactgtttcagattaaaggagaccaagagatgtgacaactacatataacatgtggtcttggattgaatcctagaacaggggttgggaagatacatacacacacacacacacacacamgtatgtatatatatgtgtgtgtgtatagtaacatattttgtatatgttataaaatatgtgtgtatatatgttgctataaaagatgtgatacaattggcaaattttgaataaattctcttgattaaaaaatagtaccgcatcaatgcaattttctgcttttgataattgtactgtggttatataagagaagagaatacctttgtttttcaggaacgtgtgctgagtatttagcaataaggggcattatgtctgcaatttattctcaagtggctcaggaaaaatacatagattgataaagcaaacatcataaaatgttaacatttggggagtctgaatgaaaaatatgtgggaattccttttgctctccttgctactttaagtctgaaatatttcagaatagaagttttcagttgtggagatgatcccatttgctggctatatctgaagaattgggaggtagtgacagtgtccttcttttgcctgcttcagacatagaagcgtctggtccattgatttcaggacgtgtggaacactagcatgtactgaacagatcatatttgaagccatcygttccttacctgtgacctcattggatttgcttcattcattcattcattcatttattcattcattcattcattcatccctttatcctgaaaatattttcagtacttagtatgtgctaggccttgtgctagatacttgaattataatagtgaataagatacacaatctggtgaacaagaacagacaaaaacaaacaccttcaataatcacaaattttgataatccttatgaagctgaagcataagtgcaaggaaatgggagcagggccatttagccttcagggtcagagaagggctttttgaagaagtgacagtcaggctaaacttaaaggatctacaagagctgacagggtgtggggtggtggccaatagggaacctgcatagcaaagaggtcgtttgtgtgaaggttcataagcattagagaacttcatatttttaaggaactgaaaaaggaccaatgtgttgtgagtatagtaagtggattctgatatttgcactaggaaagtattgaagttttacagacagaaaatggcatgaactaatttacattgtcttaaaagaccactgactgttcctgaggagtggcctagagggaggcatgcacagagggaagatgagttaggaggctattgcagatgtccgtgagagggataagcatgctttgaacatgagttgcatagtgacagcagagaaggatagtggcaggtttgcgtatatcttagaggttgagttgattggataaaggatttgaaatcaaattagtacaagtatggtacataagtatttgctttggacaactggcaagtgataaaaccattaacaatccaggaaacagaagagatagaacagatttaagagaaaagagaatatattcagttttgcacagtgtttaggtacctgcggatattcaatggttcaggatgcagctggcactgaggagagtggtctggattgaaggtagaattttatgaatcattaatactccatttcatagttcacatagaatatagtgatgtgagaattataggcatttgtatataggcttaatttcttctggtgcattgtttgctggagccctagaagccaggaccctttgcttgtcattctcaattgtacttttgcacatgccttgcatgaaatagcctcagaaggggctaaataagagaagtcagagtctaaggttcacaggagacacagcagatattagagtgctaagttgaaactggaaaagcrtgggaatatgggtgagtttgaaaacaaagtgtagatcagcatgttcctttcagtgtggtgacaaatagtgtagcaattcttcaaagattgacaaaggctacttttgtcattggagccataagtttgaccttgcaggaagaagtagaagccagaacagagcctaggctgtctctccctgggtgtggtctctttcctgtcacccactgtccccattattctattcaccatccaacaacatgcttatccttcatttttagtcagtattttgggtagaaacagaaacttggataatttgtgtcgtatttatttaactcagtagaacataaagtagcattcttattcctgataattccttaaacatcctaataattccttaactactatttattagttatattacaatagaatagagacaatatttattatctccttcgtacaggttcctaaccatccacttaacttagtttctcccttgcccttttaattcagcattcccatattcacctgcctttattttctgattttattgtatcctcagtttttttgtcatcttttcctcggtcattttgcaattgggtttgatatgatctaattttattctggtaatttaaatatttgttttaatctcattatattggtttcctagtactgctataaaattatcacgaaccaagtggcttaaaacaacagaagtttactctctcacccttctggaggccagaagttgaaaaccaaagtgttagcagggctaattcttcctggaggctctgagggagaatccctcccatgctcctctcccagtttctactggcaatccttggcatggcttggtttatagatgcaccgctccagtctctgctggtcttcasgtcaccttctgtgtgtatcattgtcccttcttttctcttatggacacctgtcattggatttagggcccacccaaatacagcttgatctcattatgagatccttaactgaattacatctgcaaagacccctgtttcaaataaagtcacattcacaggttcacaggtcctgggtgggcatatctttttgaagggccaccattcgacccactgcagttccactgtattaattttaaacttttctctaaaattttccatccttattctaatttttctttttgtcattttgtaacttggagttataagaggactttacattattacagcagtcaggcagtcagtgaatgagatttatacaagaaaaacactactttaatacaaaaaaaaagtgttttcaatgaattgtattgcctttccatggtgaaatgccttatctttctgagagactgcacttctagccaatgcaggctcctaaacaatacttgaatgaccatttgtctgaaacattgtattaaatattttatatggaataagagaacctaagaattctgaaattcaataatttgatgattaacaggacactcttacttttcaaaccccttttacaaatatcagatcaatatctccaatggagtattccaggaatctctagccctgtgagaagtaccatgaaaagatttcttttgtcaaacagatatataagaaatgctgctagtatgatgtattcccttctaggaaagtgacagtttatctagagttttccccagtttatttcatcatgcaacactgtctcatagtgtttaatgctcatgttaggaggcttaaaagagttagtaggtgtgaaatactgagaatagcatctcacatgtgggaagtgctatgtgttttgctcctgctattactactgctgctcctgctaccacttccaatactggtacccagtgtgaagtgttacattagcctcatttgacaattttaagtatatttataaagtccttctccttttccctgatactttggtttcctacttctatttcctggatacacactattccggtatacacactattctatggactaagttagttataacatattgctgacatttttatattcttctctcttcatttatgatgtccacataatttacagttcttgaacaactgatcaactgcaattgyacatcttcattagtaagtgatgctgggcttcccttttttatttagttacttcaggatctttaccagctactctaaagcatttttattctgagcctgatggctttaaaagttagcaaccagtatccaggatcccttcagaatatggcttgcaggtgtaaattctacagattcagataacctcattcagtgctatcttttaaatgtttcaaggctcagagcagtacttatgatcttagaatttctcatcttttatactgttcattaatwcttttatagtgtctcatataacctcatgttctaaattgaaaactggtctcggccaggcagagtggctcatgcctgtaatccccagcactttgagaggctgaagcaggtggatcatttgaggttaggagtttgaaacctgcctggccaacgtggtgaaaccccgtctctactaagaatacaaaaaattagcccggtgtggtggcacgcatctgtaatcccagctactcgggaggccgaggcagaagaattgcttgaacccaggaagtggaggttgtagtgagccaagatggtgccactgcactccagcatgggcaacagagggagactcaatataaaaaataactacatacatagatacatgcatacatacatacatacaaacatacatacataactggtctcaatgcagttaatttaccatagtgctttcatataacagccctgatccaagaatttggttttactagtctcttgcttgaaaaacaaacaaattcatctaaatggggagaaattcccagtttttcttcctaaaaatttaaccaggctcctagttatgaggatcaatgctgatatctcttttttcctgatatatgactgatatttgattttccctgctgaatcccaaatctgcataaggtagcaggttttaactctgcagctctcttgctcttaataacattaataagctgactacatattcggctagggtttcctttcattaagttatactttcattcattgcttcgtgcattcaacatttgttgagcctctgcttgcattaaatactatatcatactcacgtctcaagtgttacatacaatacagcttaacatctaaacaataggtaggaatgccagagaaactcttcttgtatctaggcacttcaaacttaccatccccattagccctaatacaagtttttttaaacgttctgtaacactcctgagaagtcatcatcaggctttgcttgaacactcaagggactttatgttcaataccacacaaaacaccctattttctgaacaaattaagtttttttcttttattgatctagaaatttgatgtactatagctatttactgtgattagttcaaaataaatatatattcttcctaccaagataaccccaaatatactataaaaataatgcattgtacattcaaaataaatatactatatactctccctctcatggtaacttttcatctggtatgttctttccccttccccatgcttccttcctacctcttcattccttccttttctttttcaaaataattaatcaattcctcatcatgtaaatggttgtcaatttcccaccatcttcaccaccctctgatagatgcactccaatttgtcagaccgggcacaaaaatttcaatattgcctgactgattggctcagatttttctttattcaaaactcattcttcaacagttaatttccacccttccctttctccttcctcctcaaagggtacagttctacatatttcagtcgaatccaagcacttctttcctcatttactgtttagttgttgcatcttcaccattaacctcctccatagttccccacattcattcattcattattcattaatgcattcattcaacagatcttaattgagagcctacttcagggcaggcactgttaaaatacagcagtgaatagcatggataaaattccctactctaatggagatgccacttgctagtagggaaggtagctaatggatttagaaaaataattaagtgtattatgttagacgttactgagcgctctgggaaaaaaaaaaaaaaaactatgccaagggagtggtactcatgagcgctgagggatggcttacaatttttaactgggctggttgggtgatgaaaaacaaaactatagtctcattttccctctttctggtagcgtagcagaaagctggttcatcacttctgagttagttcaatggtagagcaggctgacaccagccactggctctagaagcacttctttctarcaggccacttgtgtgaccagggagcttctgctattataagtttgcataaatatcctgtcaatacatagagcaggatgctgaaactgtaactacagtgtgtgtagagcatttgtgcctcacctcagcagtaggacaatgggagtttgggagattgcatgcacgctacctacttctctgattgtgtgttgttcccacaataagctctgtttctgtcaccatcacatggcactagtggtgtggatccatgacttttataggacatcacagcaggtttcattgtgaaggttgcatttgaatcaagactctcaaggaggtgaaagagagaactgtcagtgctaagggaggggtatgtctgactgggcaatgtggccagagcagaaggaccaagaggaagagtagctggagatgaggttcaaggggtaagtgaggccagatcacttaaggccctaaaggactttagcttttacccttgaagaaacaggaaaccattggagggatgtgggcaaaggagaaacatggtctgtctttaaagttttaataggattattctagtttctgtattataataaaaaaaaccatgaaaatagatgacagagtaggcacaggaagaccagttaggcccatacagcaatcaaggtaagagatgatagtggcctggaacarcacgtagccatataggtgactatatttatattttgagggtgatccaaaaggatattatgacacatcagatgtgatgtataatagtaatagaagacttaagaataattctaaggtttttgctctgagcaactgggagtttggaaggttttgttttgtgttgagggctccaatagagcctaaagtctaatcatagcattctcaatccaaaatcaatcatttccatatctctacataatttctgtctgtgtctatctcttcactaatttctaagctcctgtgatgtcagaggctgtacctattcattatatctcctatgatatcttagcagtctttggcacattagcaatataatacatgtctgccaaatattttttaaatatagatttagaattaacatcttgataagccatatgcatataaataatctgaaatccctaggcagttttccatagcaataagaaagaccttatacttagtttgttttcttgttaatggctttatatgtttatactctgtagcattgaatactaagtagtagtttattttttacaataatcctagacataagttttccttgttacagctttggactttgggttaacagaaatttgtctacttaccagatgtcagcattcaattaaatgaaattaatctaaattattcctagttttttttcagtgacaatatataaaatatacaataagcttttttcttgtaaatttgtttgagttcattgtagattctggatattagccctttgtcagatgagtaggttgtgaaaattttctcccattttgtgggttgcctgttcactctgatggtagtttcttttgccgtgcagaagctctttagtttaattaggtcccatttgtcaattttggctwttgttgccattgctttggtgttttagacatgaagtccttgcccatgcctatgtcctgaatggtaatgcctaggttttcttctagggcttttatggttttaggtctaatgtttaagtctttaatccatcttgaattgattcttgtataaggtgtaaggaagrgatccagtttcagctttctacatatggctagccagttttcccagcaccatttattaaatagggaatcctttccccattgcttgttttttgtcaggtttgtcaaagatcagatagttgtagatatgcggtgttatttctgagggctctgttctgttcctttgatctatatctctgttttggtaccagtaccatgctgttttggttactgtagccttgtagtatagtttgaagtcaggtagcatgatgcctccagctttgttcttttggcttaggattgacttggcgatgcgggctcttttttggttccatatgaactttaaagtagttttttccaattctgtgaagaaagtcattggtagcttgatggggatggcatttgaatctataaattaccttgggcagtatggccattttcgcgatattgattcttcctacccatgaacatggaatgttcttccatttgtttgtatcctcttttatttcattgagcagtggtttgtagttctccttgaagaggtccttcacatcccttgtaagttggattcctaggtattttattctctttgaagcaattgtgaatgggagttcactcatgatttggctctctgtctgttattggtatataagaatgcttgtgatttttgtacattgattttgtatcctgagactttgctgaagttgcttatcagcttaaggagattttgggctgagacagtggggttttctagatatacaatcatgtcatctgcaaacagggacaatttgacttcctcttttcctaactgaataccctttatttccttctcctgcctaattgccctggccagaacttccaacactatgttgaataggagtggtgagagagggcatccttgtcttgtgccagtttgcaaagggaatgcttccagttttttcgcattcagtatgatcttggctstgggtttgtcacagatagctcttactcaaacaaccccatcaaaaagtgggcaaaggacatgaacagacacttctcaaaagaagacatttatgcagccaaaaaacacatgaaaaaatgctcaccatcactggccatcagagaaatgcaaatcaaaaccacagtgagataccatctcacaccagttagaatgggaatcattaaaaagtcaggaaacaccaggtgctggagaggatgtggagaaataggaacacttttacgctgttggtgggactgtaaactagttcaaccattgtggaagtcagtgtggcaattcctcagggatctagaactagaaataccatttgacccagccatcccattactgggtatatacccaaaggactataaatcatgctgctataaagacacatgcacacgtatgtttattgcatcactattcacaatagcaaagacttggaaccaacccaaatgtccaacaatgatagactggattaagaaaatgtggcagatattcaccatggaatactatgcagccataaaaaatgatgagttcatgtcctttgtagggacatggatgaaattggaaatcatcattctcagtaaactatcgcgagaacaaaaaaccaaacaccacatattctcactcataggtgggaatcgaacaatgagaacacatggacacaggaaggggaacatcacaccctggggactgttgtggggtgggaggagggggggagggatagcattgggagatatacctaatgctagatgacgagttagtgggtgcagcgcaccagcgtggcacatgtatacatatgtaactaacctgcacattgtgcacacgtaccctaaaacttaaagtataataataaaaaatatatatatacaataagcagtaaacaatagggttttaggtcattttgtttgggagagattggggagcagatagttgatactctgtctatgaattttgcagggcatctaaaacgatatgcctgagttctaaaataaaaccagggtaaggatcacaaatttaaattaagcattcattaaattctcagcatgttctctggtgttaggccatctgtagacaatcttggcaaaacgaacctcctagactgctcatcaaagcatcccacttaggagtacagttcttcagcaaaacatctagggccactgctgggcagcaaacgcaagtgatcagtgttgacagtaccattgacccaatcttctcatattcttactaacaactttttgttacctgagtgagaacacatgtgcttgttacaactaaaaactgagtgttaaggaatgtctgtcccagagaatacttagcaagcaacttagggtaatgttctctgatacatgtaaaggataattattagttcaaaaatacttaggatttgataactagtacctgaacgaagagtgtcgattaggttggtttccaatgtgtaaaaatttcaaatattactgaaaactgagtaaattttcatctgctcatgaacattaatagcacgatcaaggcagaacataatactttaaaacaatccttagccttggcaacaaaagtataggcatcaaatatccagtcactagtacttttttatcctaccataaacactgtgttctttttctttttaattggcattcttctgtgttttgtggtgttatcttctcagtcaggtctcagaactgaataataaccactaatgatttgccagtcagttattatggctatgctgataacttctattccaagtttatttatttaacagataacttctatttatattaggtaatgttagtacttcaggttttgcttaacttggaaaacttgataaataatatttgactgtgctcttaatagttcctaattggaaactttaagtcactaaattatgagccactgagtcatttgctaataatgccccatgtatgttagctcagttgagagccaggtgtcatacacatgcaaaataaccagatacctacctaagtgtgatggtctctctaagcaaggtggcctcccttgcctatgctaatatggagttgaaagtgtttgtaaaagggggaaagttatgccgttaaacgaagcatccagtttgcaaatgattacctattgaaaaaggtcgcagtattggtgtaatattatctaagtggatgctaatatgcataaaagagttctctttcaagaagcttccagaacaacatgatgcaggtaggttrtctataatgttargcagtgaatgaagagtccgggagatgataaccacctcaacgttcccatttaaatgtcactgttactgggccctttttaattctattccaggacgtgtacctaccaataatttttactttagaagtttcttggtgtggtaggaggagtttgatgatgaaaccatgcatccatatatatagaaacaagtggatatattatcagtatggatggaaatatattttacaggttaaatcattctaaaaatatttttatcaaataccttattctgatattgcttacatctgggtttaaatccatactttcctggagaaacatgttatcttttactcttgtctcagtaggtgccaggcattcaaatgctgtttttccagctcaaaggaattaaggacccaaaggcatttaccattgatatataggaagagtggcaacaataagtcacgctacagtgtgtagaaaagtagaaagcatccctaccaatccttaaaatgtttggctgagagctatacactgggtggcaggagaaactgattaaccttttactcctaagaagattcctcaggcatagagtatggttaatgccgtgagacatacagtatttaataggtgttcagcatctcagaaaaaaaaaataatagttattttaggaatatcactgatagatggtggtgctcaggaagcctgcggaatagaacccgaatatatttcgctttctttgcttggtgttttgctggcctttgttggaagtcttatggagcagtttaagtgagcagaagatgagctaaaggaatggaaggaggagacrtaaggaacttgcagaattaaataccctgccgagatacttgtccattcagcagcttcagttgcttagcactggacctgatcctgtggaggatgcagaagcaatattagaactggcccctgccctccagaatcgctgtctaattggggatacaacacagaacgtacagtaattaaatatcagagccatgaagtgccatgatgcaatgcctaccagagggctaggaaaggtcaaagaaggggccagagtgttgtctggattgtcagggaaggctcctgggaggggtctgggctggacttttgagacagggaagttaaggtcagcagaggtcggggaaggagcagcattccagaatgagcagatatttggagttggaaatgtagctgagggcctcaggaggtagtaggaagctggtctgggtaaagagaacacatgtggaaatggatgcagatttcattagagagacaagagtggccagattatgaattgtcatggaattcaggccaagggtttggatttcataatttagcaaatagcatgatagactttacatcaaaggtgagctgctgtgaggcagtatttagaacagaagagaaagaaagccagaagcaagaagaccatttggctggcagttttctgagagtaggaatgatatagatacctgaattgggatggtgcagctgagaattactgaacgattaacttcatattgcagagaaagaaagcactttacttagaaaggcgacaaggagggctgaacggtgtactaactttgcaaggctagttcacagagagaacaggagagttcttgcaggggggaaacatgggactttgagctagattacagggaataagttgaggaatttggtttcagacacattaaatcagacataaaagctagtcttcatagcagtgtcatgaaaacatttgaagccatagtctgaaattcaggtgagaagccaaaccatatcgaagaatctcctgcattcataagggaaaaacattagtttaagtgaagacagcagcggggccaaagcctaactgtgagggctaactactgtttgggtggaattataatattttagataagatttaagaggattctaattctagctacttgataggaatgcgaatgatgataaggcttttagagttagataagagagagggctagcaccctgatattctgtaattgaaacagagtttcaagtcctttggtcaagtattacccttattccttcaggaatagtagatattttaagattacagataggttatcttatctaatttacctacctattgttgaaattatttaatttgcatttaactgtgttttcactggcttatcatttctctcttctagagctaacttatctcttgttatattccagactcttggtgtaaattaccttcattgaaaattttggagaaatatagtgttttatttctttatggataaaatagtcccagagagagagacacaaggatggacacttagaaaacagtcccagctactcgggaggctgaggcaggagaatggcgtgaaccckggaggcggagcttgcagtgagccgagatcgtgtaactgcactccaaactgggcaacagagcgaaactccgtctcaaaaaaaagaaagaaagaaaacagtccaaggagagaattctaatgcctgacagaagtaatgtttagaatgagggcttctaactgaagttttcacagacataggatagaaatcttagcaccagattttctgccaataatagagttagatgtgtgtcatttgctcattaaaatggaggtggcatcctgtcctctaaaattatatcatgatctcaagaaaatgaaaatgtaccatttctactgcatggctgaaaatgatttgggctgattataaaaattagttgtaatggcatgtatcagtatacttaaaaataaaaaatgtactgcagaatgtgcaatggaatagaaaaggactttgattatcaacaagagtatacttcatggtaggtgaaaagtaaacatgaggccattcatgagaaaagtctgtcattaatgcatcagtgtgtatatgagggctccaaggccattgattctaagaataactaaactccctccaattctcttggccagtctgtttgggtggtgtctgggaatctccttaataagtcactgctatccacaaatatcactaggaccctttcatgacaagagtattaactttggaagaattctgtggctgtcaagtcaagcagttacctgaacagaggcagaatatattggaagatgatgtgaactcattcccagttgtcttagctcacttttacctcatgcttggctgtagaaaactttttgtcacagttcagattaggccatggtacaagtaacagcaacccaaaaaccttaaataggcttcaagaagataattatttctctttcccaaaaaatcctagaaatactccagggctggagggcagggctggtcatctctgttccaggaaatctttagcgatccagtttctttcaggctcatgctccaccatcctgaaggggaggctttcctcctcatgaaccaagatagtagctttcatattccagacagcaggatagaatgaagagccaaaaagaaaggcaaaggcgtgtgtccactgtattgttaggaaaggtcccagaagctgtctcatgacacttttgtttatattccattggccagaacttggttgtatggctataccgaactgcaagggaggctgagaaatgtagccttctctctaggcaaacatagcccaatgcataatctaagacatgaaagaaggggagaataaatactgggagaaagtatacaaccacaccttccttttccattgcagtggcaccatagtatcagcaggtcaatttatatagctgcctgcggaggtgcctgaagcagagtggcagttgcacagtagtgcagcagtcgctaagagcaggtaccctggagtcacatcacttaggtttgagtccagatttttctcatatgtaaaggggaaataatattagtaccttcctcttagagctgtgacaattaagtgaaatactgagtatggcactttcagcatggtayctaagacttcaaaaccatttgataaatgtgattagctcttatattaaaagtaaaatgaaagttttagagcatccatagacatgtaacttttctgtacatctctacaatgtggaggatgtatttacttttttccagctataagagtcagagtggttttcatttctaactgcacttttctccttttgaaaataagctgggatgtgcatgcttggctgggaggatggaggtggtttgtaacaaattgtatgaataattttcttgaattttccatgggttctgcatgtttcattgataccatcttacaggcttttctttataatagttttgatgtgaaggattactttacagtaagcatctacaggttacccctttccactgatgtaacaaagtgggaattgggcaccacatcaaaaggatgaggccattgttggccatccttggatggatggggttcaaagatggcaatgtggagtgggtattctctgtgtttgcctgtaaaaggatagacagctctgaattgcaaaatactattgtctatcaaaatgtaaaagtttggcttgttcttcatttagaaatggtgataggaaagaagtgggtgaaaatggttgtgttgagatatttttgccaatacctaaatgctcttttgcttctctctttttctttctttctcaaagccccctctttgttctgtggcttttcttttgtaactcctccagactacagctttgttcccccttcttccactcctttctggtcaggtactgctttactacttttatttgtctcttcaacttgcttctgcttgcaaataaaatatttgagttccatgtatggcttctcatacggatacatctcctcacagacaatccctcgagttccattaccaccatgcactttactcttctctgtcatagtcaccgttcatcatgacatttcactcctctggtgtttgtgtgtgtgctcatgccatgagacattctataatttatctgttggggagagtttgcagagggatggggctgaaagtataaagggggatgaaaaatctataaaatcattatttttcttgaagaccagaaagtttagttgaaaaaagccaatgtttatgtattttcatgaagaaaataaatagaaataaaatcccaactttgttttcaaatataaaagtaaaattcagtacacattacttgaaaagatgactggcgcccatgaattctgcagttcttcggtttgtgcatgggcattttggtcttgatttctgtcattacccagagagtttaatggctatttacatgacatttagggtatacattagataaagtctgttttctgaccgatttttaaaaattaacctgcacatcccaataaaaatcatagaatttaaaactagaaaaaacttagaagtcatctagtacaaacatttcatttcatagatgagaaaaaatgtggccttgaggggttaggagacctatgcaaggtcaccacacagttgatgattgggtttttccatcataggggtgtttttatgtgcaccgactctaacagtagtgccccagtaatgggacagttttcagtgagaaagctattaaagtggtttgtgtcctgaacagtaaaacaaaatgacctatttttactccctttacagttctgaaatctagagtattgccattcatttatttcgtgatggacacctggagtctaaaaaaatttctgtcattacaaagccatgaataataggtcagagatccctgtggccaagtgggcaggctcttccagggtaacacaggtcataacttctgctgcctgagccctgggaactgttaaaaatacagatggttggtgtttcccatttgtctctttttcttacacttaagttcctttaccatttaagatttataaagtttcaccaacctccgatgagtgattctcagaatcactgaacatataattgaaaacactttataaccccaaagagcaacaggtagagaagttaatataaagcgtgccatgaaacactagagactaacaaacatgaaccactggaatggagttttcttttcagaacagggccagcagggccagggagaaagttagctcctctcctgccatcgaatattaaacacgcgcgcgtgtgcgcgcgcgcgcgcgcacgcacgcacacacacacacacacacacacacacacagagaaactcaactctgaacacaggatatttaataccctgacatcttatttttgattagatacatcagtaaagtttttctgtaaggcagtatttgtttcaaagaaagaaaatatagatggtatttgtgtgttccttctctgagacctgattcacacctcttcacttaggtgaattatatagaaaacaataactaaatttatccccaaatagttttaacatagaaagccttgttagggaagaaagtgccacttaaccagaagtgataacatagatttgacaagagactgacatcagagcaaaatatttcgttgttttgagtgttagttaaagcagttactggataaaaacataaagctttaccttggaggtgctggttagattactgggccatcaataggaagtgtatgatgaaattattttagaatctatctccttagatacttagatattaacgagtttttttaatttgtttttttgttttgttttgtttcatttttataaaaactagtccttactttgattgaggttcttatgaagaatggaaaaacaggacaatggttctttaaacttatgaagcgaatttgcttgcacctgattgaattgaaacagcaattctgctgctttcaagctcctctgccattatcgctggtctgtaatgaaatcacgactgtgcatttgatagcatcaataacattcatctgattaggttgttatggttgttaacgaactgcaaacctactgtcattgcttgtcatttcttgacagtgttaagtccaaaagtgctgggcattgccatcgctcggtatgacttctgtgcaagagatatgagagagttgtccttgttgaaaggagatgtggtgaagatttacacaaagatgagtgcaaatggctggtggagaggagaagtaaatggcagggtaagttrgccctctcgatgtgctggtgcatgtgaaagaaggggactgagcagttgtttgcacccattgtggcaccagggagaagcytctatactgtattacagctttcagcccacaggcctctgccctctggaaactggtgctgtgttttgctgataccagggactcgctgaaaatatttgaaatgaatatgatagtgacataaataaaattcacctgggcaagtgggacagcttgctgcttggaaaagagtcgaggagcatttcagttctttttagaccctgagccatagagctaaactttatgtgtattgcaaaatatctataagaactgctgatgtaaattggaaagaatgggacatagtacctctgtcttttcatcctgttctacagcagaaataggaatcattatgcagcagagcccccctgtattatacttaatttacatatttatttgtgtgctagtggattagaacactgtttattttattcctccatttygatcatttactctattagrcttctaagagcagttaaaccaatcttctcacctacaatggacataaaaccccagtttaattggggtgttatgaaaacaaaatactctgtttgtagaatyctttgaagtgtcagatacaaagtcatgttgctgtgttggttgcttttcttttttaggtgggctggtttccatccacatatgtggaagaggatgaataaattcaaatcccgtgttgcaccctgcaccaaaaatttcagagaagggataaatagaagcctgcacagcatcgtgaattaactraagtgtttaaaaagctgcatttctggctgttcaacatcctccctccttagcccctcctaagtcttaatgctgagatttctaaagatgctggtactgacagattaatggcttgcctagagctgtgcaagaaacagcctgccagtctgtcattgtcagggaccagggcaaaaccaagagctgttcttcccagaagagccctgcaaacacattggttcgtgcttccctttacttcttctggtcagataccatgaatgccagtcatcagtaaatcttaatacacttttgctttattctcacatgccattcaccagattatttgatggtacaaagaagcagaagtgtaattttccttttcccagcatgacgaaaaattggagttctgccatttgagcagcttactggaaagatccagccttacttgtcttaaattgtccaacaaggtgactcattgccyggcaaacacttttaccctcagatgttactcatgatattataaaatatgaggccagtgctcaggtttgcatcataagtgagctatccctgaagggttttaattacttatttggtgtcctgattatatttgcaaacttctttataaaaggtgaaaaaagcacacaaaagagagggtgtcttcatattaaaccttcacaaccttcatgatttcataggattattttggaaatatagcacttgactttatgaaaggatctgggctaggtatattargggtagttgccaataacctgaagaagctggcatwgtttacagaaacagatcaagggctataatttatgtcattttatagcagcagtatctattaatacatgccttttcctcccatccacctcccccgcacacacacaaagatgacctgggacatgatttttttattcccacattttcttggagcacaaacaactttgttgaggattttggaaggaaagcacaactgggtcctttattcatttctgggacagaaagagggtcagtggacttttgtgggcctccagcttctctcagagtctccccctctgcagcccatcctgggagtgtattaactggagggaagatgggtcttgcagtacatttgttttgcccagccatcactcttttttgtgaggagcctaaatacattcttcctggggtccagagtccccattcaaggcagtcaagttaagacactaacttggccctttcctgatggaaatatttcctccatagcagaagttgtgttctgacaagactgmgwgagttacatgttgggaaaaaaaagaagcattaacttagtagaactgaaccaggagcattaagttctgaaattttgaatcatctctgaaatgaagcaggtgtagcctgccctctcatcaatccgtctgggtgccagaactcaaggttcagtggacacatccccctgttagagaccctcatgggctaggacttttcatctaggatagattcaagacctttacctcagaattatgtaaactgtgattgtgttttagaaaaattattatttgctaaaaccatttaagtctttgtatatgtgtaaatgatcacaaaaatgtattttataaaatgttctgtacaataaagttacacctcaaagtgtactcttggaatggattctttcctgtaaagtcttatctgcgactctgtctcgggaatgttttgtctgttgccgtcagccgaactttgttatggagggagcagcctcacacaagcagaaacactcctgtggatggtattgtagcatgtattgtttattttagtcaatagaccctctccttataaatggtgtttagtcttcctgttgcatttcatgggcctgggggtttcctagcagaggatattggagcccctttttgtgacattaccaattacatctttgtccacgtttaatactttgttttggaaaatttaaatgctgcagatttgtgtagagttctaataccaaagacagaagtaaatgttttccatatactttgtcttgcctgtatgcagccctygtgtaatayggtgaattagagtggtatttcactttgtattattttgtaaatatgtcaatrtaataaatagtgactaaattgatttctaagagttggagtctttttattgaatgatccctgtattagtcagggttcccctgaaaatggatggcactggattgtcgggcctgtaccaggccatcgccagcagtccagagtgaacagaagcagtgtatgtgtggaggtcaccacccccccgcccgccagccccgtggacgctatgcgtctagtaggagggccgctgcggtgagtcttgaagcccagggctgggcccgggcagagccgccgcaggtgcagatcttggtggtagtagcacatattctaaagagaacttcaaaggccgaagtggagaagggttccatgtgaacagcagttggacatgggtcattcggtcctgagaaataggtgagcgccattctgaatggacaggcgatggcctctgttgccctcagccaatcgaaagggagtccggttcagatcccgaatccggagtggcggagatggacactgccaagcgtccagcacagtaatgcgaaggatcccagagaagccaatggaagccccggggagagttcttttctccttgtgaagggcagggcgccctggaattgggttcgcctggagagaggggtccgcgccttggaaagcgtcgcgcttccagcggcatctggtgagctctggagggcccttgaaagtgcgggggagagggtgtaaatctcgcgcccggctgtacccatatccacagcattcctccctctggaactaagacctctaggccagcacaacagaatgtcgcgggaacaggaagcaaaaattttgctagtggatcacttagggtgatggtgagtggtgccacttccacttccaccccctgattcctggacccttgaatcctggccatgggagaaacagtaccatacattggacactgattcagagcatacacggccttctaaagaattttgtcccatccctgcaaagtattgtcacctagttggcattgtaattgtgacttcaaaaggccattccacctttctatcaattcagctgcttcaggatgatggtgaattccatgagcatgagcccactgctacacttctttagccataaagtgagtgccttggacagaggcaatgctgtgtggaatagcatgattgtggataaggcattctgtgagtccacggatggtagtcttggcagaagcattgcatacaaaataggcaaacccatatctggagtaattgtctattccagtgaggacaaacttctgccttttccatgatggaagaggtccaatataatcaacctgccaccaggtagctagctgcctgatcaccccaaggaatggtgccatatcgagggctcagtgttggtctctgctgctggcaaattgggcactcaacactggctgtagccaggtcagccttggtgagtggaagtccatgttgctgagcccatgtgtaacctccaaccctgccaccatggccactttgttgatgggcccattgagcgatgacaggagtgactggagaaggaggctgagtggtgtccacagaatgggtcatactagccagttgattattaaaatcctcctctgctgaggtcacccattggtgagcactcacatgggatacaaatatcttcacagtttttggccactcaggcccatccacatacctcttccccagatttctttgtcaccaattttccaatcatgcttcttccaggtccctgaccacccagccaaaccattggctacagcccacgtatcagtatataatcacacaaccaggtgcactgattgaagttctgcccactggaaatatttcccttcagcactgtccttcagggatgtcttggaaaggggctgtagtgctgcagctgtccactttgggtgatgcctgcatatcatgaagaaccatctgtgaaccaggccctagtcttctctcctctgtcaattcatcatagagaactccttatgcggccattggtgcaggctagggaagagaaagcagggtggcaggagtagagaccatgggcgtttgagccacttcctcatgtaacttacttggccttcaagacctgctcgagcccgatcacgtatataccactttcatttgatgatggaatgctgctgtgcatgacccactttatggctagatgggtcagaaagcacccagttcatgataggcaattcaggtggcatggtgacttgatgacccatagtcaaatgttcagtttccaccaaagcccagtagcaatccaagagctgtctctcaaaaggagagtagttatctgcagaagatggcagggtcttgctccaaaatcctggaggcctccactgtgattcacctatgggggtctgccgaaggctccaaacagcatccctatctgccactgacacctcaagcacgattggatctgctgggtcatatggcccaagtggcagagcagctcgtacagcagcctggacctgttgcagagccttctgttctggaccccactcaaaactggcagcctttcaggtcacttgataattgggcaggactaatatacccaaatgaggaatgtgttgcctccaaaagccaaataggcccactaggcattgtgcctctttcttggttgtaggaggggccaaatgcagcaacttaccctttaccttagaaggactatcttgacaggccccacagtcccataacacacatacaccagccccataattaacatggggattaagccctaattttgtttaagtttagctcaggattgctgcctaagttatgaacagtgaactacaaggtaaactcaatagttgccaataacatgtattggcatgcttaccatgtgccatgctctgttctaagtgctttatttgcaccaacttacaacaacccccaaaggtagaaccccataatattttcatttgcacatgaggaaactgaggtacatcaagaggttgcaactttcccaaagtcacacagctgctaagtgtcagagctgaattctgacttgggtggtctggctccagagtccgtataaccactaccctatcctgccacactttgtagggcaagagagagatttcgtacatttttaaacttacataaccgagaagaaactatacgatactaaacagtggtttgaacaatgaaaggttaacacagaattcagaaatatgccactattcctgccacctaaaagaaaacccaaaaaagatattgcctagagagattagtatcagattgaattttcgtttctactttgattcactcttgcactagaaaatggctgctaatccagagaggcttggagtcaagtttcccttggtggagcaggccagctgataatccacagtgatggagtctgtcttagggagagggtggaatcacttcattccttctaaggaccaggaaaggccatggtggtagcttctgcttgacttcaccatcacaaccttgctacaaacacaaaattcctcttattttcattacgatacagtgggttatacagccctgaatccattatttgaggagccaactccgttggtatctttatcacttctctttgacatattaacattacgtgactgttagaccttgtatcagttcatcaccgtcctcaccactgccaattgtactcaccgttgctccctttatttgctagttaacatgggaacacagctttgtaacaagtattttgtcttccaccaaatgagtgaagtaaaatatgctggtagttagtttttcgttgtttgtttgttttgagacagagtttttctcttgtcgcccaagctggagtgcaatggtgcgatctgtgctcactgcagcctccacctcccaggtccaggcaattctcctgcctctgcctcctgagtagctgggattacaggcacccaccatcacgcccagctaatttttgtatttttttagtagagacggggtttcaccatgtttgccaggctggtctcgaactcctgacctcaggtgatccacccacctcggcctcccaaagtgctgggattacaggcgtgagccgccatgcccagccactggtagttagttttgaggcatcttgctttgttctacttaatctgacagctgtacagaagagtgaaaaggtatggccctataagtcagactgactgtctcagtttatatctcatccctaccatgcagaacctccaccaatcagtaccacaacacctacttcatagaacggttgtgtgacacaactgagatcatccacataaagtggaacagtggctggcatatacaaagccatatttgtcattatcatccttgttgtgattgtcagatgggtttgctgacaagtttggatagttggcatcttaatatttgaaattctttagcataaattaggctcatttattggattaaggagaaaaactctgcagattcgaaattaacctttctaggatgggaattaaactatttgttcataggaagaaggagggttttagcatcagtcagaccggggttcaaaccccaaccctgccactaacttttaggagcatccactacctcttctgtaataaagggatcattaaaagtgcctgagagagctgttgtgaagaataaatgataacatatgaaaaaggtccctagtacagagcctcacacatagtaggtatgcaagaaatattggtttccctccctttatgaaagataagatactcaggtatcaaattatgtacttgctgccgttattttgaatattattgggagtccatgctttgttttttacatatagtttaattttctgcacttaaattatggacagagtaaaaagtatacatgttcaggaagattaatatgcaaacccacaaacaatctcagaagttgaatttaacagctctacattattttgactaggaaaatggaatttttactcagctcataatcatttagactgagtccattagtcacttcatttttcactgaaaactagtttgctgtgattggttggactctgattagaaatgttacgcacccacatctggtctggcaccttattctaagtaataaggtggtttggaagccaccttattctaagtaatgaacaagtcccagaaaggatatcataaaggaattctgtctctcgttcggtgccattgattaaaccagatcgagggaaacagtgacagaaaacaaactccttttgaagcactctagacactggctgtcaaagtccctgaatttctaggcacaatgcaactacaaatgatgacccaggcacatggccagatgggaagagtcctcagtgcagaaacacagtgtacacaaaagtcacttcacaccctgtcctctaatggatgttgcgatccacgttgagagtcctgaataggagggaaggtggactccagaagagccaatgtgtccaattcatgatctggcttgcccaaggtcatgcagatagaaaatactgtcaaggtaaagactaaaacatgggtgtctcagctgtaagtcaaataaatgctgtctctattcctctgtcatacatcagtactcaggaccctctgactccagtattatttcctccattcttaaggcctttcttctgggaatcattctgggtgactgctgggatcctagatcaggtaagaatatgactgagtcacaatccttgcacctcttgctatcaacctgtcttgatgactttgaaacgtgtcaataagaacagtaatgactcgggagtctgatcagtaaatgcttgtggattttcctatttatttatttattttttgctttaagttccgggatacgtgtgcagaacgtgcaggtttgttacatgtgccacgtatggtttgctgcacctatcaacctgctacctagacaaggatgaagcttgtggattttcttgtgatccaaatgacctctctatagaaagtgatttttttttccgacgataatttatagtccatctccttttctcttttggctgttctttttttgtactggtatctgccagacagtatgctaggtatttgtcgtatattatctcatttatctcatataatccttc

SEQ ID NO: 8717 - DNA, 400438 bp, Homo sapiens
  misc_feature (1)...(400438): n = A,T,C or G, or insertion/deletion polymorphism (see Tables 1-2)
tagcccatccttgaacagtcaccataacaacataggcacatggagaggaatgtggggtaggcaaaaactgatgccagtccaggggagaatagagctttgcagggagtgggggtgggtcagggaacacttcctgggtgtgttttgctatgttcttttcatgatatagactggaaatgattgagaaggacactgttctagtggcttttagcaacctgactcatccaggacaatacctcttaccaacttagcacaacctctcaggctgacacactgcttttaggacagtgtttgaagacatggttcctagggggaaagggtgtctattaacaatgtaggttcctgaacccacccaagatctactgcatgagaatctctgaagagacatccaggaatctgcatttttaaccagcaatgtagatggttctgatgtacattagagattgagaagtgcggtcttaggaagtcatggtaaatgaaaatcatgcccagcttttactcctccttttgcagtcaggtagcaggctggctcagctaagaaaaatccctagatgaatatttatttctgcacagggaatgtttcctctcagagtaggcgggtgagtatgctgagtaggtcattccctgccattcctattgctgggcaggaaacccattttactgtatcagttctctctcaagagaatcatttttagaattaactcaacacgatatataagttgtagagtatcatatctcaaaatttgtttccatcttataacttttaatttctaacaggtgggaattaggacatctttaccctcatccagcctatggcagacagagggtacagagccaagatagctcagggccagcttggggacacttgtatgcctaccactcacctcgtagtgttcatcagttccatttctgtccactatctcttagccaatgtgcttggtggtctatgcagtggagatttctttgctgaactcagaactttcagggaataaagatagtagacttagaaaagcatgagtttcattgacttgctggtgtatccacttctcacaaggtaagttggaggatgcacatgttctggaggaatcagaaagagagtggtggaggggtgggaataggatgggcatgcacccaaggaaaggaagatgaatgtcctcaatgtgacagactcatctttaagggtctgagaggcacagataagccaaaggggtgcatggaccattatttctaaagcagtaaaaaatagatgaattaagaagtaaaactcttgatagggtataaagggaaagatggtgcaaaggacataatatttcttcatggacaaagatcttgactttgactctggaagggtgacagggaagacaatttcagaagtaggctatgagctcgagtgtttttggcagtgcagggtgcttgtgtgggggtggaggaagagagcccttattctgccattccactgtgccctgacagggaagggaagggtttttctggggctgctggattacactaaacgctcttccaccccaggatccccataatttaaaatcacaccctctgctcattaaccaaacttagcaatgaagaataagaagagaagtaggtaggaagcaagggttagagtcagactggtgctctcaaagctttcattagctcgttcttgggcaagttttgcagagctcatcttataacttttaatttcgaagcaggccctcttctccctctcttcaggagtgttgagtgtgagctataggacagcaactttgctctcaggaagctgctcacctgggtccacccctcattctcttttgtagatctccatttcctatttttgccaggttctctgtagaacctgcttccatgggcgtaggctgaatgacaataatggagtccaagagacgcagatgaaagaccaaagtttacaggactttataaataaagttttatcagaacacagtcattcccattcatttacatattctctggctgctttcatgctacaacagcagcgtttaaatagttgcaacagagattgtgtggcacgcaaagctcaaaatatttattttctggtcctttgcaacagagattatatggcatgcaaagcttgaaatatttattttctggccctttgcagtgtttgccaatccttgctctagagagttttgtatgggcatttaaatgctacccttaagtaacatatatcacttccactcacaactcactggccaaaatggtcacatggccccactcaaccatagagggccaggaagtacatcctactgtgtgcccaagaaggggataatcagaatatttggcaaacagcactaatggtcaccataagcacctaatatgaattgaactcagtactaggtgctgggtatagaaagaagaacaagacaaaattgttgatctcaaggaatttaaggaatgccagaatttggggattggagggggaaggctaagtatagattcgagtgtcctttcctagaagatatagactggcttgtctgaattgcttgagatctcggcttggtgctagccagaactggggactgatcggcttggcaagcagtgggggcaacagaccctcctggtgaacatttgtatcaataatagaagggttgtttaacagaaattcttaaaggaaagatgagataatttcatattttgatattcataacataaagctggagctccgcagtgcatattattgctgttgtaattttggcaaagatgtgattcaaattggcaaagtgtctgggaagaggaaatcatgtaaggagagagggtgggatgggtcaggaaacagaggtggggagccaggtactggtggcctggtgagagctgggagggtggcccaggagcctttgtcacagacagacacgagggaaaggaggctgcagccagcagggcctgagaattcttggagttgctggagatgctaaggcctggggagggagtgggagcagcaggggaggggtgtgcgcgtgcatgtggtgagggagagacatttaaacatcgtaggaatgaaggataaatttaaaatccctcaaggggagttgagacagaatgacaacgtgaggaacgtgaatcactctttctagggacccacccagctgttggcatgatttggaatacattttcttctccttaccaagctcattctggactccttatcttccttctccctgatcccttgacctggccttggtggccaagtaccgagtgttggctaccatgtcctgggagcttcaagctcaaaagcattgaggccttagggtgtggtgctggtagggcaaggaagaccagtccagatgctggagatggagaaggggacgaatagagaaggtatcttagggctccaggggcgtccgagtctactgaatgctcccatcaggctttatcatgtatgcgctaagatcatcctctcatccagactttttgtttctatttattatcttagcataacgaggaggggggctgggagaggcatttatggattctgcttcatgtggtagagacactgtgatcaatatagtggagaaaaccataagctaggacttgaaatctgagttctctcccagctctgctttttattggcagtgtgatcctgggtggggctctctacctttgtggacctcagcatccataaaatgatatggttagatcattataattcctaaccattgaaatagtctttgtttttgtgacttgcaatttgacttgccgtccaacccagggaaggcggggtgggagatggtgtctggagggcaactttctgggaggatgccaccctgggggcccagtacagctcccaacacatagtgggtgctcaaccatccaacactggttgaatgatctggaggccagagttcctctgagcatgtagagcacgggacacttcttagatgccacctgtggtcactgagacgtgtggttgggaggaattctggttttgggctcctggctaggagggaggcaataagcaggtatcttgaaaaggtggtaagttcaggccctctcaagccacaaggactccccccagtacttagacctgctgtggggactagcaatgtgtgagtaacttttacgtctctcattaagttaaacctttgctaattggagcatgtcaagatctagtaccagccacccacctggagtgctgctttcacttgggcaggtccatgaggcgtaaaacagggaaaacacctcaatggctttggactcaacctttaggggtgtagtagtggaggaacagtgcacaaaggaggagagaggagtgaccagggaggcaggaagaatcctttggtttccctaaatcctctctcatgcacatgctcttccttttgcctgttttcctctcctgttcttcaactggcaaactctgtttaacccggctccagggtcctttccttcacaaagccctcctgaccaaccccagctgggctaggtgcccctcttttttttctttttttgggatggagtcttgttctgtcacccaggctggagtgcaatggtgcggtttcagctcactgcaacctctgcccaccgggttcaagcgattctcctgtctcagcctcccaagtagctgggattacaggcacacgccaccacacctggctaatttttgtatttttagtagagactaggtttcaccatgtcggccaggctggtctcaaactcctgacctcaagtgatctgctcgccttggtctcccaaagtgctgggattataggcgtgagccactgcgcccagccaggtgtgcctctcatgtgctcctctagcaatcaggcctacgccaatcatagcacattctgtgatgtggtcacaatcgatgttcttcctgcctcttccatgaggatgatgtggactaagtccagctcatgttgttgtgcctagtgcctggcacagtgccttgcacatggtaagttctcagtcaacgctgattgaatacgtacgtctttcagaggccaatctggttatgtcctccttggcatggaaaaggagaatgatgccaaggggagcagcaggggcatctgagtcacacgtggccccaggtcctgaggcaggcacaggcattaaaaaaggaggaaggaacctgcatacaggacccagttctcaagaagagttctccttaggctgggctcagaggctcatgcctgtaatcctagcactttgggaggctgagtgaggaggatcgcttgtgcccaggagttgagactagtctaggcaacacggggaaacgtcatctctacaaaaaataaaaaaattgctggatgtggtggtgtgtgcctgtggttccagttactcaggaggctgagacgggaggatcaccggaccctgggaggttgatgctgcagtgagccgtgattgcaccattgcactccagcctgggtgacagatcctatctcaaaaaaaaaaaaggagagaccaccttgtggcttggtgcccccaggcacgcacttgggaggcagggcagcaggtggtggtggcaatccccccagagtgggccctggggaaggggttagagggattcttctaccaaaaatgggagggaacagccagctagctgtccgaggtggggctgagatgtgcggccctcggagttctctccttattgcagcacctctaaaccttaccaacgcggcatatcattatttctttaatctgtgtcttctgcagtagactgtaagtttatgagggcaagaatccagtccactttgttaaattctggacacctgggggcccagcctggtccgccgcggatgctcctaatttcaacatcatttatcgagctccactgtgtgccagtttgtgggtcaggcccgggatgtagcactgagcaagccagaagccttggcctggaaggcaatgccattaacctctttctttctcttctctatttccctgtgaccttggccccattcttcctccctccctcccttccccactccttgtctctgccctctccctcccacagagcaatgttctgtgatggtgcccgagatgcgtggactgagcccagaccgcaggctgcccgagcccgccccctgcccggctgcggggagccctgagcccaggtccgcgggccgccgccaacgccacgtcctggccctgccggaagaagaggcatggcggccccagcagtgcgctctgctcgaggccgacgcctcggacgaggtgggcatgctgccggcttccccgcgcgccgcctctggcttcgacaacttcttccaggtgcaggagggcgagggccagggctgggagggcgccatggcactggaggcgggctccagccctttcctgccggtgagccccgaggtcatgaagcggcggcgcgggggcctcatcgagcagcgcgacatcatcaaggcccacgaggcgcacaagatgcagagcaccccgcaggcccggcgcaaggaatgggagtgagtatggcggggacgcgggggcgggcatggctggctgggcctgaggtcggggtgggttcctggagcggatgggccccgtgaggccgccctggagggtcgggagatgctttcgctgtgctgcgactaacgagaggctggaccctctggatgaggtcctcgtggtcagtccctgatctcaccacccggctgtaggcctcgtccagcctcactgaggcgttcagctgtcagatgtgggtgaatcagccttgcccccaaggctcacttgttttactaagagcctgtggagaaagaactggggtctgtttcattctctgagctttcctgaaagccagggagaatccttcacaacgtggatcatctatttcatctttacttcaggaactgcagctaaccctgcctttttaatatcctccttggatgaatgattacattttgggcacatctccagtggatggaggaaaatgtccaagatctgtgtggccactcctggctttatttctgctctgtttgtgtagggcaaaaggccaactttaattcacacctgttgagaattttggctttttcttcttaggagtcctaaattaaaggaagatgggatttcacttaattctctcggttgccccaggtttttgctccatagaaggactttgctttgtcctgtggatgccggagtttactcggcatgctggcatgccctgtggtctgtatgtcttcatctcttcttgctttagattgttgacttgctagatgtcatcaagtacaaagagattagtcacagatgtattttgatggtggtggtcgtggtgggatttacctmcttggtttcagtgaatgttctggatgatacaagtaggggtaaatgagctgatctctgtttcataaggatgttaatgtttgttagttcgctcattcattcattcagtgagtccgaatgtatgccgggctcctgggattcagagaggagttgggcacagccagcattcaacaaatctcttggttgttcatctctcagcactattagtatttagagccttgcatacctgtctttaagtgccaggcaacattccaagcaccttacatatatccactcatgttaatcttcaccataactatgaggtaggtacagttattagccacatgtaaccaatgaggcacagagaagttaagtgactttctcaaggtcacgtggataacaaccgcattgttactgtgatttgatattaattagtaatttgaaccctggcagtctggttgtggaatccatgcctttaaccatgatggcacagtgcctttcattctaactctcaaagtacttctctcaacaacctattgagatgccatggtaagagcactggtgtkggggtttggagacttgggtctaattcccagggtgacctaattagtggtgtgaccttgagtaagtcacctcatcatgacttcgaaagacaagtaggagggagtagacttcctttaaatacaatgcagctctgatagctggcctttcttcatatttagaagtactattttttaatgcacctccatcttatctttctaagaggaccctgaacaacttgagggctgagactgtcatgcacattgttcatgtcactcaatgcctatcatctggcctaacccaaaaaatcccacaatactcaatgaaaaactagctttaccatgactagcaatgtggaaataacttttatgtctctaagttaaactttactgattggaggatgtcaagatctagtaccagccacctacctggggtgctggcggggatgattgggagactgttttcacttgggcaggtccatgaagaggtaaaccagggtacacacatcaatggccttggggaatgtcagcctttaggggtgtggcagtggaggaagagcacatgaaggaggtgagaaggagtagaaggaggtgggagggtaaccagagggtatagggacaaagaagtaaggaaaatggtgtgttcagaaggaaggtcatcatctccatagaatgttgctgagaggtcaaataaaatgaagatagagaaggaaacactggctttggcaacacagagatgacctgaatgggagtagtttccacagggcgatggggtcagtagcccagttggagtgggttgaaaagaaaatgggaagtgatagagacagtgatgttgccccatccttctctgctccccaacactcacggcctcatcatggcttttcccctcaccacccaaattccttagcctcatggctctgtacatgccttaatttgatcttctccacacccctccccagttctacgaaccctaatgttactgagcaaagagggcttgctgctcggggcactagaagccaatactacagcactgggtttttgagaagagaagctttttattgcatgtcaattcacaaagagacgggatgtcaagcccaaatctgtctctctgtcctcgcttcaaggcagtattttcattagaaaaggttcaagggattagtaagtgattggtggagggaaaggggaggtctggaaagtccttggacatgctcagttatctcttcatgctacctcacaggtcgcatgtgaaaattcttgaggacttagtatgaaacatgtcatggaagttcaggctgtggtgtcagcaggcttgttctgcagacgccagtaggccaggccatcttggttccaaccgatgtcagccagttttttcttgatctcacgttgtggggaatttcagcatttctgcaagttgtttcttttcttatctgccattctgcaagctcaagaatatctgttagtcattggtttcttactctttggggcacagtttcagcttcagcttttcagcaggttgtttcttttcttatctgctatcctgtaagccaaagaatgtagtcattggcctctttaactctttggggcacggtttcactaatacactgtctggcactcatgtttcatcatcagcaaagtcctgttcatcctcctcatcttctctggaagtccccttcactctcttatttctgctggagcctccccccaggaatgcggcttgctctgcagctgcctcatgtgacagctgctttcccttccacgctgccttggaccctggagtctagagaagcaatttgctcctcactattgcttccagaccattactcccctctyctgtcctaaaaatgccagctgtggcgtgcatgtcatcagataataccacctactacccctcgttgccaccatctacaaactcccaagtcacttgcttcattccaggaagaatgggttagccctgggtttactgcctctcttccccacgtcttcagctgctgkcagttcttagtgatttcagtatccaygtagatgacccttcctgcaccctgacctcttggttccttagccccttctgtttggtgactttgccttcttgcttyctgctgacagctcacctccatggtctgcctggacattgtcrtaactgcattactccataatctcggtttcaagcatcccactgtgtgatcaccccctcttttctctccactccctctagtgctcagttcccaagattctttaatcttactgcatccacaagacactgatcctattaccttttcactatccccttccccagtcatgtcaccatttcccatcttatcaaactgaactccatcataagcaccaaacatattttccagataaaatagtgacctttcacttgaagtctcctcctaccctctcaagctctttcttctaccaacttctaagatagaatgaatcatccacaaagggcaagaatgctggagctcaagttggtttctagtgtacttcatgcttcaccatcattataatctccttattttcaccctcaactttgttgtccctctgctgctttgttataccttgtctggcaagacttcagccctgctaaatcccacttkcccctattcttcatgtacatatgggcaggtgaccatagctatagaaaaagtcacaaccacgccgattgacctcactgtgaattgatgactgccacctccagttggcccttagtcctgcccagaaatcttactacttttcccttttctattcactctcacactcctctagagattatttcacatgcttttcccttaactctcaaatcccatcatttcctgccagctcgctcctagctcatgactacaattgccttcctacttcactgggaaaatagcagcaatcaggagaggcatgtacaggctccatccactgcactgaccgcctgctgcatctggtccctggtaccaggcctttaccttctgttactgtggactgaycacccctcaagttccatgtggagtctgttgcccatgtagagaaaaatgagcccctttgtttattctgtctccatttttttttcttacaattttctctggaacccattccaatcaggtctttgtcccaggcaaacaaacagctgttgacatggtgacattggccttcccaaggcagaatccaatgggtgttccttcgtgtccatcttccttgacctagcagcaacatttgatcacttcctctttcttgaaactcttttgtccttattttttatattttatgtttttttagagacaggattttgccgtgttgcccagactgatctcaaactcttggcctcaagtaatcctcctgcctcagcctcctgagctaggagtacaggtgaaagtgttttgtcacatggcttttacgatacccactcttggttctcctcctatgttgtgggttgcttctcaatctcttgctagtttccacttccttttcccaatccttactaaacactggatgtcccagggcttggtcctcagcctgttctcttctcaccagtgcttacttcctagtgctcttgcccagtcccagacctttggttagcatcgtatactgctgacctctaaattggtgtctgtactcaggacctcttccctgaatttaagataccacccacttattcaccatctttacttgtacatccatcgacatctcaagctgaacatgtctaacatcaaaatattgatttctctccaaacctgcttctcttgtagttttctctttcattaaacctacattttttctgttgctggggccagaaatgttgaagtcattttgattctcacattgacactcaattcttgccaatccccagtgtctcccccctcaaaatgtatcagatcaccattcaccacctctgctgctgtctccctggtccaagcaccttttattatttttattccacacacgtatatgatactagatgcccagcactattctaggtactttataaatattaattaatttatccatgtaataattgattgaagctggtaccattattaccattattgtccccatttttgcacttggggkatagagagtttaagtcacttgcccaagatcataatgtcaaccacctcttaatgagcctccctgcctctgcccctccctgctagactctgtttccccaactgcagctaaagatccttactttttcttttttgattcacaaaggatttagaaaggtagaacaagtagtttctgtccaagagtcttaagaaatatttcatatcagtccttagctcagtgcatgatttccatcttctccctcttccccctgcccagccagcctcctaaagatgcatgaatgtctttggtttgatttcttcatctttccccttaactcattctgcactggctacactggtcccttgttatgccttgaatgtactcagacctcccacatcaggcctctgccttttgctggtccctttgcctagaatgcttttcccatttatcaggatggctcctctctcatttcatttaggtttctgctcagagagaacttcctgatcaccctatttaaatagcattcccccattgtcactctctttccctctttattttgctttatttttcatcatagcccttattgtttccycaacggacacacaaacacacacacatacatacaagcacagatattttgcactggagtrcaagcttcttgaaagcagggcctttgtcttaccttcagggtccaraacagtgcctagtgtgcagttgactcacaataagtgtttgctgaaagaatgatgaagtaaacatattgaggggaattgatatccattctaatcagctaagttccagggaaggaggcagctgagttccctgtgtccactgtgtggttgtacaggttgctgactgcagagtcctccagttgaatagtcagcagtggaagtggggagtctgttctctgccccacttcagggctgcccaggatctgcatgcactttgtagagatggaaatttttcctcccttctgtctcctgcctttcagcttctcctgacttaygttctttagacaggatccctttggctctaggacaggggcagcctggtcctttcccagggcttggatttactgtagtgggaaatcaggcagggttctctgtgggcagccctgacagcatcttgctcctcccaaggccctgtccactgcttatacaggtgaaagcctgggacacataccaccagctttacaaatcctgtctcctagacactgagtcaggaccctggtgatagtgaaacagactagaaaccaacctgggaggtctcctgcattttttttttgtctttggctgggtaagccaaatgctgatgggagaaggagtactttaggtgatttcagatgaagcagattttcttgtacagaatgttgttttcctaagaacctatttaaaggtttcctcaggcccacttttcaggtgatgaggacctcttggttagcaccaagtgtttattgtgtactaagttttataactttagcaagtgggcatgtcacaatgttttactaatactttaatatagttctctccagcttaaaacatttttcatacayatgatctcatctgagcctcacaatgacctcatgaattagctgttattatttataatttacaggagagaaaaatgagctccgaagttagaggtggtactaggtcaaaaacctatgtcttgataatgactgccaccatttattgagcactggctatatggtaggtgatttgcatgtattatttattctaatggaaataataggtaccatgatgaagaacagaaacattttgtatggcactattattgcatatgggtctggaagaaaggaaattatgtgtaactttaaagtctgcgtaggttggtatgacttactctataaagagggagggggtatttccataatcatagtacttagcacactacattgtaattgcctgtttacatgtctgtgtcccccactagattgtaagcagagaagtctgtctgctccccattgtgtctcctttacttagtactgtgttgggcacataataggcactcagtagacatttgcagatgaaaaacaacaacaacaacagcaacaacatgatttttcatattgggaaactgaggcttgataaggttaagttacctgcccagtatcacagagccagtgaggattcactccaggtcctctaattccgaagcccatgtttgttctactgagccatcctactcactggtgtccctacagtaactggcacagcactgggtaaatgacgggaactcagttcatgcttgaattcttgcaatgctacttgtaaattgtgggcttgggcactttgtaacctccgcattttttgagtagaggagagaaataatacctaccttgcaagcctgttgcaaagtttgaccacatttattagatcatatagtctggtggggggtcctcaaaatgttgatgagcaccagggttattctgggcctcttctctgcctacagcctccctgggtgacctcaccaggtccacatatctgcagatgactctcaaatgtaaatttccaaagaacccttgactcttgaagccaaatgcttgtctggcatctctgcactgttgtctatctaatcagcttctaaaacataatgtggctagaacaaaactcctgatcctcttctgatcctgtctggcccctcatttttccttatctcagtaaatggcaccactatttctccagttgtcygagccaaatattctcattatcttttatttctctccatttttcctcacttctgatcagtggtaagccctgtcaytaacatctcccaaacatatcccaagtccaaacacttctccatccccactgctaccaatctcttccaagccactatcctttggaccattgcaatggcctgctaacytgtctttgcatctttgtttccctagaataagagaatgtgatctattgacacaacaggcagggacaatatgaactctttttgctggctcataaagccctatccgacctgagctttgcttaactcctggcctcatctactctctcccttgttccctgtgctcctgcccactcgccttttatttaggctatgcctgtttatgtctctaccctggctcctgccgttgcctggaatatttctccagatctcaacagggttggttcattcttgccatttggaccttagctcaaatgatacttcctcagagaggctgtccttcatcacacagtctaaaatagacacctggtcactgtgccatatcacctatgcagttgaccaccaacccccacaagaatgttggtgccytgagatcagtgatttgactgcctcgttcactccatatccccagtgctgagggcaatgctgacatatgggccctcagtaattatttgtgaatgaatatttatgaatgttccgtaacagtggctatggttatagttacgatctatgtgttcacctggcctctgatagccctagccataccaaacggtctagtccaggaagctcaggacaccactggctctaggtctagaccagggtcagcccctggggtgtggagattcatgagctgtaaaacacaggttggttaacttacaggttgtatgagaactgtcctccttcaagctattgtttgatcaccacagagccatgtcttatttgactttgggtaagatatccaacctttgtgggcctcattttgctcttttgctagattgtggatgagtacagcaacctttttgaattgttatgaaggaaaaacagcatgtaaagtacttagtccgatgcttggttgtttttctccttgatgtctggttcctcacctwcaggagcctgtcacttgctatcacttatagtttaaccaaaacattagattgtgaatctaacaatagaagcctgcaacttcttrtctaccgagaaagtgtacaagaactgctaactcatgcccccatgcctagcaacatggctttctcaactttgaaaggattagagtcatccgttggtcttaggaaccaaaaacattgatgcaactccaaataaaagtagcaaacatgtatttttccactaccataataaccctaatccccttaatcttacccatcattactaccttagccaacccctataaaaaaggttcatatccaaattacgtaaaaacatctatcgcatgtgccttcatcatcagcctcatccctacaacaatgtttatatgtacagatcaagaagtcattatctcaaactgacaggcatcagaggtttgccgaagcccraggtgcagaggttgtagttaggcttgggatcagctgtatacatcaacggaccacagcagcatgtgggagactacaggagggaatgcacagtgcctggcacaaggtcaacagtcagtgcatatgagccattattatgatcattattattattcatctggtctagctgcttcatttacaggtgaggaagctggggtcctgagagcctgggtgactgctggtgctttatgtgaaggtcagtggactgtggtgagtgacaaggtaggaggaaccagtcctgsaagtcccacccacttctgtctcatgtgccctgcagctatgctgacttagtaggggtgatcacattcaaacaacagtctcaccggcattcacaccgcattcagcatcagcaacatattctgtaaggcaacacctgtctcaaccttgaagctttatgggtgaatttaagggccattgggccaattttttttttttttttgctggccttttgaaaggcggccagcctcctgcagatctagtgagactaagtggagacctcagtccacatgctgccacctgctgccagcatcagacatcactcgggttgttagaatacaggaatctgtggaaccactattgccaaaagggtgcatggcagaatttgttcttatatatgagtgctttgttgaattatcggatattttaattttatttaaatgtgtatgtttttagagggggcaggaagtctccaggtcactgtattccccaccattccctactgccttagggctattagaggactgacttggtcctgaaggcacctgagtttgcaggtctgcaaaatccaaccttctcactcagagacgaggcatttcaggatcctagggctgtagtataacagggttgcagaaaccaaaacatatgccagtggaacacagaaatcatgagccttcaacacactgggttatcactaaccaacagcaagtttgaaaaccaccagccaagaagagaccggagcacatgccctgctttcttggaattctgagcagagcaggaaggtgcagagaatccagagaattgggcttcccttaggaactgacacaatttgggtgatttctagagatttgctttaagatgatcctttggggaacttcagcacacacccttgaattttccttacctgtcctcccgggattagaaaaaagaggctgtttctagatctggtctctggtgactcgcctttcccttcaaccttccgcagttctagaaatgcttccctagagaactgggtttgagaataaacaaggtggtgcgcgagcagcgcggttttctgtgcttgcagtggagaccgcctgtgacaaggagggtcctgtactgggaaggagggggactggccccctgctaagtgcctggcgactctcatctcttgcagagaacgaatgcataacctctctgccactccctttctctttctgaagccattggatgccctgagagaaagcagagggtttccatcttttccagagcacagtgctgggagcaagggctgggggagatctgttgtcccagttcttcccttctaaggcaggccttgggggaggactctcccccaagactctgcagcctgktgctcaagccggatcggcccgttctgtgcttccttttgtggyaccatcagagtctcctccctgtttggaggctcaggtgaatcagtcccctctctcccaccctgcccttgcgctgggctgcctccactctgctcccatggccatatctgtagaaggaggctcttcagtcttctgaacatgtcaagattcggaaattctgcccccagccacctttttgaagaaaatgggaaaagcggcgccctctagcgccagctgctcaatttgttttccctctttttcagaagagatattttttcttcttttatggtgcccccaagtggttgtttctgtgtattgcagccgcrgtctcactgggatgctttccgctgtgtagctggaggggctggggcagcctggtggtcagcactcacatcacaagaaaggaaagcgaagccaggaggagaagggccttggcagggcacgatgagcgccccgagactcccaccgcagtccagggccttccccctccctgaccactggcaaccccttgccatctttaagggcttgcctggacccatggctgcaaatgagccaaaggcgttttcctcttggatgtgaggggatgggtgaagacacgtgcagaaaaggaagtgctcattgtggaggaggtgaacataattggaggaattygctttggcctttttggctgaaaaaaatatttatgaaattgctgtacacccccgctcccccccccsaccccaagcagagttagacacctatagaattccaggcaccgatgaaaagacctttaaaattaatcgcacataacttctcattgaaggngcaggtgagaaggctgaggcgcagagaaggaggtgggcgtggggcacccttctgaggaccccacctcagccgctcataccccagccacactgtcctccttctcttctcttctgcttttagctcctttaaccatctttctcttcctctttttctctcgaagcctgtagcagggagggaatgaaggcatgcasggttggcgtgtgagtgaggaagagggcttgtccncctttcccctctgtccctgcccccgcctctcctggggacctccttgcagaccctctgcagctgtgctcacatcccactactcagcctcactgctgttctaaaaaggcagcattactgcctgctgatcaggtgatgaggaacctgcaacccttcccaaatttataaagaaaacagaggaattcagtaaattctctttctgctcttggagtaggacagaccagtggtcagttctggggacagtgctcctggtgtggagacagtgttggctggacacacccagcttgggtgcactggggtcaggtggtcaggtctaactgcatccccctcctgtcactccatctcaacaattccccaacccagtcctaccccatctcaacccttcctcaacccaacctstctccatctcaagtcctccccatttcagccactatccgtctcaagcccttcctatgtcaacccttatcaattaaactcctcctcatctgaacccttccctaactcaacccagctcatctcaaccccttcccatctcaaccgcttcccatctcagccacttcacaactcaaccccttcacaactcaaccccattcccatcatggccccatcacaactcaaccccttcccatctcattcccttcaaaactcaaccccttcctgtctcaaccccttcacaactcaaccccttaacaacagaaccccttcccatctcaaccacttcacaacttaaccccttcacaactcaatcccttcccatctcaaccccttcccaactcaaccccttcccatctcaaccccttcccatctctacccctttacaattcaaccccttcacaactcaaccccttcccatctcaaccccttcccatctcaaccccttcacaactcagccccttcccgtctcaacccctgtcaatctcaaccccttcacaactcaaccccttcctatttcaaccccttcccatctcaactccttcccatctaaaccccttcacatgtcaaccccttcacaactcaaccccttcacatctcaaccccttcacaactcaaccccttcccatctcaacccttcacagctcaaccgctgcccatctcaaccccttcacaactcaaccccttcccatctcaaccctttcccatctcagccccttcccacctcagcttcttcacatctctaccccttcccatctcaaccccttcacaactcaaccccttccttactcaatcccttcctatctcaaccccttcacaactcaacccctctccatctcagtgtctccccaacttgacccttcaacatctcaaccacactcatctcaacgcctccctatttcaccctctccccatctcaagcctacctcatctgaactctacccatctcaccacacccatctcaaccctcacccatctcaacctctgccccatctcaacctcactcatctcaactccttccctatctctacccctgcccgtcccaacccctcccatctcaattccaccgccatctcaactcctcccccatcttaacccctcctcacctcattccttctccatctcaaccccctccacctcaacttctccctcatctcagcctcttcctcatcctaacccctcccacctcaacccttccccatctcaagacttccccatctcaactgctctctacctcaactcctcctccatctcaacccctccccaacttcaacccctcccccacctcaactcctctccaacttcaacccytcccccacctcaactcctctaccattgcaactcytcccccatctcaactcctcctccatctcaacccctcccccacctcaacctctccccatctcaactcctctctcatctcagcccctcccccagctgccatctgttatggttgcttctttcccctgtgtttatacttaagctgggaaaaattccccctccctccctccctcctccccttccctctttctgtgatgaacatgaaattatattacacatataggtctttgttttgctcttattcttttagtttttaaaaattacaggatatggtgtgcatctttctttggccatttctggaaagatgtccataacatctctttcacgctgcagagtattcctcagcatgactgaaccacagtttattccagcarccctatcaatggatgttcccagttgctttgcagttaccagctgtgctgtagtaagcctcccctacatgcctttaggatgtgcactttcayttctgtagggtcaagtcctagaagtgggactgtggacaagtctttcccacgctatgccctcactctccggaggactggcacttctctcaacacccctcctcagcatctcagcctcaaattgaaatgtgaactttcacagtctgtgttatctctctggccccactggagaggcccgatgaattaataatatgccagcaggaaacagagagatggagttattaattgtcagtccatgagcccaccctctcaaggtcctaattagcatgctgacagcttcggttttatccagagcyagggcaaggctctggggacactgtggctcagctaggggcatccggcacagagtggagagccctggtgcctttctgggtggggtggaggggcgcttgcaagaggcttgtgaattcagaagttccttcagggatccctttgtgcctgctgtggggtaggggagagaaacaggctgggagtgggggcaggaatgggagttttagtgtccaggtggtggtgatggttggtgtgtgctgctcttgggccccagtggtgggtttgtgattctggttctgctgcaggacagtgacactcaccaagctgtgytgggtgtagttgtctcagggaggtgcctgctttcaaaccaaagttcctttgatggggaggactgaccccaggaagactgattgcgtatcaatattactctaacccatggccctctttcataacatgcacactcctggaaaggatatcattaaatctggcattggtgcatggccaggctcacatagggttgctcaagaaatgttgctgtaaaggaggccgggtgcggtggctcatgcctgtaatcccagcactttgggaggttgaagtgggtggatcatttgaggtcaggagttcaagaccagcctggccaatatggtgaaaccccatctctactaaaaatataaaaattagctgggcatggtggcacacgcctgtaatcccagctatttgggaggctgaggcaagagaatcgcttgaacctgggaagcagaggttacagtcaaccgagatcacaacactgcactccaacctgggcaacagagtgagattccatcttaaaaaaaacaaaaaagaattgtttctgtaaaggaaactacctataggaagctgcgtgaccttggccaggcctcttcacctctctgggccctttttaatgtggattagaggtggtccttattttggtttgctccatactgggcagccagaaccatctagaacaccagccaggacttgctccccaagggtgctcctctgttgcgntgcctgcctctctgcccaatctctctccacacagtggaggctctgagtctttcctactttgagccctcatctccaccagcatctatgcgtagctctgctgtctcaggcgcctctcaagaagtttcaggcagcagagttggtggaagctgaaaagtcatttgaattagtttgcctgggtctattgctcaggagcctgggcacatctcttaacctttctggggctgaggacaccagcattcagggttgtgtgtgaggtgcttagtatgattattactcatgtttgttattaggctctgtcctgcttcccccaggctgtggccgggaagacagaacagccatttacacagtaagctgcccaatgaccctgcctttcccattcccagtctgcttttaaaaaatatgggtgtctagaccccaaccctcaaagattcagatcagttcatcttaggtgaagttttaacaggaagatgtatatagatgtatatattttacaagctcttcaggtgattgattagtttaagaaccattgattgagacccatggcaactgggcgggcaggtaccttgtgctcatggggcctgcccagccagacacagcctttttcaggagcaaatccccctatctcccttttgggacacagcagactgtctgagatcatctgatgacctctacatactcttttctgggactaagctgcctttctggatcagttagaaggcaactggaacatctctgaaaggttctggatctctgtgcacatacagtaaggggacagagctcattctgtgacagtcttaccaatgcaccacaatgtagcagtctctcgttgtaaggcatcacccggagttcttcgtttcatgaccaaaaaaattaaggagtgtggacaaagggtgaggttagaacgaaagtttaataagcaaaagaagaaagtcctctgccacagaggggacccgaaagagggttgcctttttacagttgaattcaaaagcttttataagaaactcccctcatctctgtagctgtttgtgtaattccccttatctgtgcagctgcgggcatgtccttaggcaagcacaaagcacagcttctcttgttcgkgttactgtggttatgttttgggtargtcccccacctccctgtgcaagttcccatggagcccactrtgtacatgcccgaaaagaggaggaaacctttctgtgggagcccactgattacaccaagaacaaaggctgctatgttgggccttacttgcttrtctgtgcagctgcagcctgagttttccccaggctgctctatttgtgcctgtagcttgatttttcaggctgtctttcattttgaaagaattttaccaaagacaagytttagctgtctgcccaactagtttttccttttctcctccctcaactggatcataacttatgactctgaggctgagtcctgggatagttggatgtagagggggcattatctggatttgaacccagtaattcttagctgtctgatattacataagttacttagccttcctgaacctcactttcaccatctataggacaatatgtgctttgcaataataacattagatttctagaaacacacacacatgcataacaccaggaacaaattttcctataacttattttattgatttcttttacatatatgaaatagaaaaatgatattccaaagaattatacctctcaattttttttaggaaaaatgtttaaaaaataaaaaaaaaagaattcaaattgtgcaagtaaaacaaaaggtaaattggagctctgctttaaagtaaatttcaatagaagattgttgttgttttctttaagtaagaagctgaaattgcggagtgagttttgatgtggcagtgtgtatgctgtcttggttatccagctgttttgactcggttttgatggcaacatatactgaccatgaaactcagaggtaagtaatttcaccattttgaagacacccacagctcttgacattttcaaagggtggttcccaaaataggagttcttttgagatggcattggtatattccagggtgatggatgccagagattggctgggtggcttgatctgggttgcagacagttaaaagttaaagaaaagtagggtagcttctacttccttcatgacctggtccaggatattaacagacatgccagtggacctgggtgcttgatgttacttaacacaggtatcatttccactttttccctctgctccaagccacagggaaactcagccatttccagggcccttggtttcaggaaggtctctgcagttgcatggagcctgctttgcctggcattctgcaggattctttagtacaaggattttgactgggtcaaatcagagatttgggcaaattcctgcattttaaaatagtcttctcctaaaaccctttcattctatgtgatggacagataagagatacagggctcctgtatcagaaattttatttgacttttggagtagagtgacctgaagaacaaattgcagttttatttttctcattacagcaagtcaggaggaggcagcctgggcctggtggggcacttctctgatgtcaacagggtctgcccaccctgccatctttagtgtggcttcctgcatcgccgatygaccaagtggcagacctgagggcaaaaggaagcctgatattggagtcagccccctttggaagaactttccctacagcccacctagtaacttctgatgatacctccttggcctgatttaattcagtgcaccaaaaatattatcatttcaacacaaaaccaatgcaaacaaagaatatgcccctaaatgaaatggtgggatctagtttaatttttatcaagagaccttcctgaagccaagggccctggaaatggctgagtttccctgtggcttggagcagagggaraaagtggaaatgatacctgtgttaagtaacatcaagcacccaggtccactggcatgyctgttaataaaaaaattttttaatgttttcattcatgtatcgtttcaactgaatcacatgtaccctaaaacttaaagtataataaaaataaataaataaaataaaataacaaaaaaatgttttcacaaagacagttttcaaagtaacaaaggacattgagaaaaaaaatcctttggttgttccaagtgtacagaacatcagataaaaataacatcaattttccacagagaaaccaaatatgtcrtttaaatgcttccagaattaaacatttgatgtgtatgttgggtgaggaggcaacaggattggatagggtggtgggaagtctgagttttggtctcccctctctcactaactagctgtgtggctttcactaaacaactccagccccttaacctcactagctcagttttatcatctgtaaaatgaaaggattggtctcgatcagtgctgtccaataaaaataatatttgagccacctgtataattttaagatttttagtagccatgttaaaaaagcaaaaggaaacaagtaaaatcaatatattttatttaatccaatgcaccaaaaatattatcatttcaacacaaaacaaaattattgagaaagtatyttacatttttttgcactaagtctttgaatgctgtgtataatttacccttccagcacatctcagtttggactggcacagtgtcaggcgctcagcagctgcacacctctcctggctactgttttgaatggtgctgccctccagagctccaaggtttctttcagtcctgacccttgaggattgtcacctttttttcttgactcagctttgagtgtcttggcctctctttccatcccccaacctggggcttctcttcaggcatggggtgaagggatcaaaaccctgagggccaccccsactccatgatttctttctgcactgtctgctctctgtcctgtgctttcctgatttggaatcacttccctcgctttttctcaggctgagatccctcccagcttgccttatctctgcctggtccctgaggtaacccatttgcagcctcccattcctgctctgtctaggccatttcatgttctcttaattttgcattccattgcctttaaaatcttcaaccacttaaaaatgtaacaatatacatttttttctttcattacaaaagacgtgctcattgtgaaacaattgggaaatataggagcttataaagaataatataaaaatcactcataatccactcactccaacccaaccactgctaatgttttgatgtgcttatctttggtctttttctaagcattacgtatacatgtaaatgtgttttaaatttctttttctggagattttacagaatatatagttttctattctatttctttcacttttcattatactgtgagcgttataacaatatcattaagtatcgtttgaaaacatcatttgtaattgctaatggctgaggttcagggagagattttgataatattatgtcaccattaagctagggacttagataaacttagtatctgccctgcttctcattcctccttgttgaagagctcttgaccaatgtaaaaagcaatagccaaatgtgaaataaagaactaccttattaacagctcagcaagcactggagaccggcatgtttgcatttccacgctcattggtctaggtgaggcttcctggtccccatccctggaatctaagatgagctgggcttgtggagcaaccttgggcttgactttcctacttggctcagactggctttggcaaattgcttaaccgctctgggtatgtccttatctgtaaagtggtgattataatagtgctcacctcataggtctgttgtgcaaattaaatgagagagacatataaagtgcttatcatagttcctggcagatagtaaatgatccataaatgttagttttaccatttccctatttttggacacttaagtggcttaattttttttactattataaattaatcagtttatcagtaacaaatatttattgagtacttactactggccaattttttttttttttaaatactagaaattacaggggtaaccaagaccagacaagtgtctgatctcatggaatttaaattttaatgggagacatgatcaataagcagggtaagtttggatatggaaaaggctatcaatcacatacaacaagatgatgccctgagcttcaggtagggtgggcagcgaggagctttctgagttaggtgatgtgtgagcagacatctgaatgacaagggggagatctggggaagagcaagttaaagaccttgaagtggaagtgaacttgaggagttcaatcaaaattcagaagcagggagcgcagggggtttggtgtggtgggaggagctacgggaggtgggcaggagccacctggtcagggaacacttcggagctcagggtgaggactgtggacttcattgcaaggtrtgagacatgcactggaggcttccgtgcagcggagggatgcctactcagtggtgtgctggagcgggctcatgggagcttctgagagcctcttggcacgtctcttcccagctccttattcagtgaaatcatgttgataagtggcttgatctgggttgcagacagttacagattctcctcgatttatcaggacacaatctgatcaacccattgtaagtgaaaaatatcatcagtcaaaactgcatttaacaccatctaaacccttcctaaagtcaaaagatcrtaagtcaaaccatcataagcccaggactgtctatatttataacacaggagtttatagcagatgctactcttcccctagagagcyagttgttaaatgtttaccagcacaccactggaacaaactaatctaggttttaaaaaattctctttgcctatgctctgtgaagaatgaattacagggaggcaatatgcagttttgactgtagttttgagaatttccttaggataaattactggaagtgaaattactacagaaaattatctaattgctccccctactgaaaatgttcatcatttatacctccactagcagcaaggtaccatttccttgtactcttactcacacttagctttagccacccccatagaatgttccttctatctagaactttgcattctgttctctatgtgtagctgattatttatttatttatttattaatccttcaggtctggtctcacatctctcttctcagaggactttcctgaccactctatttcattgtaattacttatttgccagaaccatggccatttatttatgtctaggacagggtctgccacatagtaggctcccaatatatattattgaatgaatgaatgcatccgcctacctttctgaattctcaaattgatactaatacagtcaaaggagttcctttccttggaatgtctaggattggcttttttcagcttaatgatatttctggagttgaggtatattaagtccaaagagttcaataattgataacaaaatactgtgcaataacctaacattataacaagatattttgcaataaaatgcagctttaaaacatctgttatccaagtgaagtgatgactcacagagaaaatatttccaaaccatacatctgataaggagttaatattaaaaagatatgaggaactcaaacgacttaagagcaagaaaacaaataaccctattaaaaaatgggcaggggacctgaacagacatttctcaaaagaagacacacagatggccagcagatccatgaaaagatgctcaacatcactaatcatcagggaaatgcaaatttaaccacagtgagatatcagttcacacctgttagaatggctataataaaagagacaaacaatgaatgttggtgaaaatgtagagagaaggaaattcttatgtattgttggtagaatgtaaattgatacagccattatggaaaatagtatggcggktctttaaaagctaaaaacaggactaccatatgatccagtagtcccacttctgggtatatatccaaaggagatgaatcaatattttgaagagatatccacactcccatgttcattgtctcattattcacaatagctaagatatgcaagcaagctaagtgtctatcaatgggttaatggattaagaaaatatggtgtgtatacacaatgaaatactttcagccttagaaagaagaaaattgtcatttgtgacaacatgggtgwacctggagcatattatgctaagtgaaataaacaggcaccgaaatgccaatatcatatgagctcacttatatgtggaacccaagaaagttgaactcagacatacagagtacaatggtggttacagaggctggggacgaggggggtggatgagaaaggggtgaggttgttcaaagggtacaacattttagttagacaggaggaatgtgttttagagatctgttgcacagcatgttrctatagttaataatagcagattgcgtatttcaaaattgcgaaaacagtagattttaaatgttctcaccacaaataggtatatgaggtgatggatatgttaattagcttgattttatcatgtaaaatctacaatttaaatatatatgaaaacatcacattaaaccccataaatatatacaattattatgtcaattaaaatgaattaaaataatagaaaacccccaaaaaagcatgttatccattaaaacacgaaaaaccaagagccgtcaataactgcatgtttctagtgagactacagcaatttctctgtgcacttgccagaggcttctctgacatgtggtcaccctggagcccatgcaacaccctcttattgccacagacttctgtgctcactgcatggccaatatgtgtagactaacttctgacagttttatattctcttttaaaattttccacatttgctcttgatctcattctttcttttttctgtgctataaatttctccagctctactagatcatcccaccagtgtaaaaacatgcaatagaatgtcacatataagaacaaaacacaagaatccttgctacctcatacgcctctttatcctcggtcccatttctctgctctcctgtatagcaaaacttctcagaaaagtggcgaatgttgtccccactttctcatctcctgcccctcctaaccactctaacaggtggtctgctcacaaaaactgctcttgttcaggtcattagtgatgcccacattcctgagtcccatggttctttctctgtctttatttgatttgacttctcagagtacttagactctcattcttgaagcatttgcttctctggcttttgtggtagcatgctgttctagttttcctatttcactggctgtcccattccagtctctgttgctggttcttgctcctctgctatacccctgatgtaggtgtkccccagggctggcttctgggccctcttctcttctctgtctatgctcactcccaggatctcacccatttttgtaggtttacataaatccacatgtaaatgactcccacatttatagattcagccttcatctctcctctgagctcctgaggctgaaatccagctgttcccttgacatctyaactcaggtgtctaatgagagtcttcaactgaacaggtccaaggaacttttgacttatgccatcctccagtctattcctcctcatgtcttcctttccccacaaatgacactaccatctatggtgtggctccaattccagattatactaaacagttaagggaggtgtgtggtgagaatggtggccatactcccttggggtgctgtcaccaggaccagtcttgagcccagttcagccctccttgtttagtagcatatgtctcaraacatgatatgcacggccasttccacccactgctttcacttccggccccttttcttaggagttttggtctcataatggctctagaagcagaggaactgaaggctagagtgggcaaaagtattctctctacttccaaaattatattcatgcaagagaagttgacttcctggttttctgggtagtacaatccctaggtccatatgatgtggagctggaattgtggatggggaatggtgcatttatggaaattctttcagggcagtaggtttgttccaattccattctcatttttaaaaataccatttgcttttgcctttttatttttttaaatcatcaggtggggagtgggaaagtctaaatcaaagactgtcattcagatggtattttaggctagaaatccccaatatagaaatacaaatataaacaattaggagaaatttatttatacccatgagaatggcaaaattcagaaaggtggatcataccactcttgtcactgatgagggagatggaaatttgcacgcgtacactggtgggagcataactggtacgcttattttggaagaatctagtgaagtgaaatgtgtgcctgacctataatccagcaatcccactcttgggtatatatgtcctagataaattctgaaaagatgtgtacaaagatttcattgtagtattttacttgtgatagcagggacttagaggcaacctaggtacccattccaagggaatagataaagtgtggtggagcatctatgggagggatatgcagtggagaagcgacagcctaaacacatatagcagcatggttagattttcacaacagtgttgagtaaaaaacaataggaactggatgagatttataacatattatgacttatatgttaagttaaaaacatacctaccaaacttttcctatttgatttgratatttgaatatttaagtttgtatgttaaatatgtcagagatggtacccatgctaggcagggggttgaagggggaaaaagccctgtagcatctggagtcaattcagacatagagaataataatatgtctaaaattaaagacagagatttcaaatttgagatattttccctgtaaattttagaagrttagagtttcccaaatttagatttttttttttttttaaagaactgcctttaaaccaagtttcatgccctgcttgagtaggccatgactttgtctatggcagttagagctagactctaccttttttctgctcccaaattgctccgagttgcttgtggtgtgaaaccggtatacacaatcagttgccttactttctagaggatgaaccccttaaggacagggctgcaactcagtcatcctggtgtccccatcacccagcacagtgaccagcagtgatctgtacttatttgtcacctttaattgcatcacggtgtttgtagtctttttggtgtatgtgcgtgccctggcaagaggctcatctaaggcatttccccacaaaagggcaagcctctcccacagatacagtataatactaacttccaagaacataacatgtcatatggtcacaggtataaaaacataaaatggattttcccgartgatggccaaatttatccccacagggaggcagcatcttttctacttaagaagtacctttcggaagtgcttttcaagttaatccaatcgcaaaaacattgaatcctactaagtgccaggggacagaagtctagggggcatttccaccaagatggccagaaggctctagatcaagtggtaaacagagcgtggtatgtggagtacaatcctttcggcaataatagtcataataggaaataataaagacctacatttatagaatgctttagacctttcaaaagtactttcgtgtcaattatctcagtatggtttggtgaccaaatctcaggcagcacctgtgatcaggtagatgttttctttggaaaatgatctccagcattgggctacatattttttaggttgcatgagtgtgcgggggaaagaggcaattgtcgtatgcttccatagaaggagatgaaggagcgaagaatggaaactttcccatccctgggagtaaaaccttacatcrgtgatacccaatcctgcttattgatgccccaggggtgtcttgaaattcttcaaakgaaattaattgtaattcacttcaatttttaaaatccacagatatgctgcatagcacaatgcttctgggcagggtggcccaggggaggtggactgaaagttgtgtgtgtcaaagaagctgtcaatccaccaaagaacaatagcaagctgaaactcccccaaatttgggggagtgattggtctgtgtttgaacctgcagggtaggcagaggcagaaagggttgatgttgattactgaaaaagttgaaatagctttgtgggtgaccagaatgacatcatgctctcaacagaggatgccctgcctggggccactgctattaagatgcccagcttggctggacaccatggctcactcctgtaaactcagcacttcgggaggctgcggtggatccaggctggggtaggccttggattgcctgagcccaggagttcgacaccagcctgggcaaccttgtgagagccctgtctccacaaaaaatttaaaaaaattagctgggtgtggtggctcatgcctatgatcctactcaggaagctgaggtggaaggatcgcttgagcctgggaggtcgaggctgcagtgagccatggtcatgccattgcactccagcctgrgtgagagagcgagacgaccttgtttcaaaaaaaaaaaaaaaaaaaaaaarmwmaaaaaakagygcycagctcttcccaaagtctggaaaagcaggcttcctggcccctaggggctatgtcaaatctgtgttccacagtggatggcaaggcttcattttatccttatcatctttaatcggctaagttaacaattcattgctcttttttgagacaaagtcccactctgtcacccaggctggagtgcagtggcgcaatctcggctcactgcaacctccagttcccgggttcaagcaattcttctgcctcagcagaagtccagagtacctgggactacaagcgcctgccaccacacccagctaatttttgtattgttagtagagacggggtttccccatgttggtcaggatggtcttgatttcctgacctcatgatctgcctccctcagcctcccaaagtgctgggattacaggcgtgagccaccgcacctggcccaattcactgcttttaacatttgttgatgccaagaaagtgctactggaaggctghtataggtttaagaacacaatgattggtcattctttttctttcctacccagattggaaattccaagtttkctctgtcatcacatctggttaatgcagacactcgaatcactgtgtgttctagtactcagaacttaaaagtcatcatatcggatatgggagactcactgacaactgggcctcaaaggaatttatcaagcgccgcctctgcttttctcttcctgctttgctgggtttgcatgggagctgggatttgcgggcagctgtaagtgtgtttgggctggaggcaaactcttgtgtctttttagcctgattctacatagcatagtaggaaaggggccagagaaagtggctggcagtaagaaagcctctgttttgagaatgtgaagcagcctgggagagagtgagggaagaaaggaggggagccgagagttagaaaagccttaattcatttcatctgacagctcagagccagaagttgccaggtctactcatttgcaggttgtgttgtcaacacaatcacagtattttayagcccacacggaccttggactctggcatgccatgtaataggctgcaaaaagtagcagctctgcttcccatctcactkggggcatggggagaggaggattgggtttagggaggaagggtacaggtgtgargggcacaggtatgaggtgcataggtatgagagactcaagtgtggggggcacaggtatgggggcataagtatgagggrcacaggtgtgaagggcacaggtatgagggacacaggtatgagggtcagggcatgagggagacaggtgtgaggggccaggtgtgatgggcacaggtatgagggacaggtgtgagggacacaggtgtgaagggcacaggtgtaaggggcacaggtgtgggggaacatgtgtgaagggtacaggtataaggggcacaggtatgaagggaatggatgtgggggacacaggtgtgaagggcacagatgtgaaggacacagagcttcatctttgctcctcattttgttcttgcgccttctctttccagctgttacaaagtgccttccagtgggccacctccccacttcctctgttgggggcaggccagcacagcctattgcccagatggcagggtctcaaaacagcctcccagtgacctggttctataatatcctagaaggagttggaggacatgaccatgtcctggttctttgtgttcagataaactcaaaggccctcaatttcaagcccttccacatcctgtctctttcttccttccattccccagaagacagtgattggtgggtcaatgggctccataggtgatgttccaccccatgggagagaaaggatcttagtgcagctgtgcccactgtcccatacgtgggctgctccctctgcaggaagtctatctctgcagaccagccttgctgtcaggagcgccctggtcacccggcctctctggcttattgtgcaggaggggcagaattctaaaccaaggagaagaaaagcccaaatggagataagctggcccagtgcagaggggcagcataacttagtaggaagcactaggctagagtttgagtcctggctctggctttgcaaagtgtgtaagtttacacacaccactttacttttttatactcaatttctttctctgcaaactatgggaaaaaatctccactttctctactttacagaactaatataaaaatgtgtgaaagcactatgcagaatatgaaataccagatgaaagtaaggtggtggacagaactgtacagcctcaggcttctcaaccaaagatccaggtccattctgctgtctgcctccagtagatgtttgacacgaactccatartctcaatttcaacctcatacttcatggtttctttgtctcttccctgggttttccccatggcgataagagatcagaaaatgtgctctctctttgtgtctgagatgttggagatgactaagaaaatatcttaaatgtattttgaggcctggtattctaaaacaaagcctgctgctgaggaaaactacaaagggtggtacagatttaaaaggaggcagatagcctgctgcaggcaggaccacagtcttatcaccycactacacagctataaagacacacaggttctgaggtggcatgtcctgcagcaactgtgtaaggcagggcttcttatccctgttttacagataaggtaatactgaggctttgtgagcagacagaggtctctccaatggtgaggccaggatttgatcccaggtccgtcaaactccaggatccattctcttccccctgcagcacaataaatttgattatgcatagaatgtatatgtgacagctctcatcctgtatctgcctcacagcaggacttagtgctttgatgaatcctcaaaataatttagtttcatagtacactgatgggaaatggagcttttactgaagattttctggggccagatcaagaagacattttgcattaaacatcatctaaacaaacttcctttaattccttgaattcattcttaacatctctgttcttcctaatgcttgtttctcagctctacttccaggattggttcatctattttttctcactcttttgctttgatcccttggtatctcctccaktgttccaagtaattcatttccctcccgcagcataggcagggtggccgagaaaaagccctgcagttagttgagctgccttcctttgatagcaatccagtgagcatctgggttattctggcatgtccccaggtggggctgaccaaagcattcactcaacagagtaggtgtcctccaaggctaaggtggactgtgctattaaaaaaaaaaaaagatttttctttatattgtgtgatgtgggagagatggagaaggagaggtaaaagagagggtgtaaggtactggaactgctatggggggaaagggaggagggaattgayaggggacattaaaatttgaattacaggacttggtgattatctggagaagkagagaaaggaaagagaagggaggactcccaggtacttgactacagcagcagggtagagtaagatggagaattctggaagaaaaatggatttgagatgggtgagaagaagaatagtttggggaagataatttagtttctgaatgtagggcttccttgctatctacttgggaccctgcccctcctgtctgaccccagcagatgcactttttgctttagttttaggtcatctgctgattcatctgctgattcaggccagcaccagctggggagatgggagcagccagcaagctcaggagctcagaatgtgattccccagctcaccgccatgatgagtgctccgtagacaacttactctgcttggagtcccctggggttgctcccacctctggggtctcctcttccatttttcccagctgtggttcctctgtcttctctctctgtaaattttttgacttctgatctttcagaaatttctcacatctctggctcactgatggcattcatgttttccagtactagttttagatatgttcctaaacaaaacacaacaaaatggaggaaaagaaagagagatacgtactgagcctactttcktgatcaacacttctatacttatttgttttcatgtctcattccccttcatgactttgaatttcttaagggcaggaatccctttctttctgagcactaaccaattctccttttccatgcactagggaacttagtatttaggaaattctgtggctacttcttttgtaattgaaaacaaagattaaaatacaatacataatcttccaattcaagatttgttttttcatatatttccaagtcaacactattcctgagtgcctcttctgtgtttagcatgaatttaagcaaatatgtggaaaagtggaaaacatgaacacaccagatgaccctgctattccccatgcttctgggtttcagggctggagaggatgaaggataggaagtgaggatgaaggatggaagtgattctctggcctagaggaagtgccttgtgtagctggctcattggtaggtgagcttctgtcagtcctccccaacttcatgtctttgctgcatacttgtcctgtaattggtattacaccaggagtatgaggtacaacaggtgatgtagcacacaagggccttgccctcaatgaactgggtggatcagcctgacacagaggcagcagttggggagcattctaagttaagagttaaaaattgtagctcttgacagatctggtctcargctcacctgacttgctaaattagtgattcatgcagtaagatcattcagattccaaaaagggaggcatcagtatggggagagcatcttttcacctttgcacatggctccagaatttccactggttcaaaagaatccccagcaaccccagtctcaggagataattgctcttaacagcgcaccacactgggcaycccagcacttatggacagcagaggaatgtaagggtgaatgcatgtttttttttctgcaaatgactgtcactcattcatcttggagcccacctgacaacttgctttccaggtaaaatagcatcatttttctaggctggcttcttctatgctcactagcagggctgacctcagatgtctggggcagtcttargtaccttaccagactgtggtgttctttggggggacttccaggactgggagaggatgtggcaggggccattgttctggagtctcccaatatctgtgaggtcatcacaggggtgccatcctgcccttgcagcacagcttagattttgccttggtctgtaataaaggatgaagtgaatctctgccaaaggtcccaggcttgcttggtgccaagggtttcattctgagcacgtcagcatacagtcggcctaatggataaagctattatagattatctaattaatacagcagactgctgtttcattacaggggctatggactctgtcagtgcacaatgcgtagaggtactgccatcagtttcttgttcctggtgttggggtggctaatgtactatatgaagattcagaggcatttaaaaagatgatcaagtgccatgctgaattcatgtttacagcttcttggcttgggctcttgaaatctagaagtctttgggactgaaagcgaagaatttgtcttggttcaaaygctgtctgctcaatcccattattgccttccagcacgtgcccttggacactctcgtatcttgttgtctggttgtagagcagattttcacatgctgggagacatcatgaaatgtgccatttgtttcactgagaaagctcttctggtggctggtggggctgtggcacctactagatcactgtgttatttccagatcctgtgtttggtgtaaatggtacctggtttgtttcctrtctttaaattacagtattcttaggagtgctgttcttttgaactgcacctgttggactcttcttaattcccgaagaatctgggccattgttttttaagcttgtaatattatccttcactgtagggtgatttggtaaggttgcacttccaaggttcttacattcttcccaaatgtacctcattgcacaagctgctaccaggagaaaagggtgcctggattagtctcagggttcaaatatccagaatatcaaggtttctcttaggaatagttaactgagtaaaagaaaacctgcttgttattctattttgggatttyccccccctataaaaatagaactgtatttaaaagttaaatctagactgggcatggtggctcatgccttcattcccagagctttgggaggccaaggtgggaggatcatttgaagctaggaatttgagaccagctgggcaacatagcaagacctcatctctaaaaaaaaaaaagaaaaaaaaaattagccaggcatggtggtgtgcctgtagtcccagttatccaggagcctgaggtgggaggatggcttgagcccaggagttcaaggctgcagtgagatatgattgcacctctgtactccaacttgggcaacagagtgagaccatctcttaaaaagaaaaaaaaaaaaagcagttaaatctacgtatagatagtaaagtgttttagtttttctgttactgcctttacaaatgaccacaaatttagtagtttaaaaaaactccaaatttattatcttacaattctgtaaagcagagacctggtatgggcctccccaggctaaaattaaggtgtgggcagactgtgttcctttctggaggctctcagggagaacgtrtttcctgctccttctggctgttggcagaagtcaagtcttgtggctgtagggtcgcagtttccttcccttgctggctgtaacctaagggctctttcatgcttctggaagctgctgcattccttggcttgtggcctcttctctccatcttcaaagccagtaatagcgggtggggtctttctcatgctctgtcttttgaactcactcttttctcttcatctctgcttttaagagctggtgtgattagataagagattatgtaattagtcagaccatgataatccatgataaatctcttcattttaaggtcagctgattagcgacctcaatgccatctgcagtcttagttcccgtaatttacaggttctggggattatgatgtagacatctttgagggggacattattctgtgtaccacatatgatttcttcattaaacacaatacatgtaatttaaattctagaggttacaatggggaggaggtaaattagctttttttgagcacctactgtatgccaaacctcatgctagatctgcacatgcatcccctcattctaacatctcaacaaccagatgagatagatactatccttgtttgatgatgagttaactgaggtttagagaaattaactaactttcctgaagtccaaaagctagtaaacgtaggagtcaggactcaagctcaggtggctaagattccaaatctgaatgtttctctttccaccacatcatattttttctcctgggatctcaactaaaagcctcagaagtaatcacttatttaaatgtatgtgtttcctccaggttcgttatagtctgtttgaagtctgagtttgacgtagatagattactcatttcccctactccagcctctgataagcagcagaccaattgtatattaccacaacctgggaaaagagagataactgataaagtgaagagactttgtctcaaggcctttggtggggctgagctctaagtcaactaagtggcttaaagtggaaccaggcatcttatccctgcagggcctcccctgggtgtgacaggtggagggcataccagtcggaaagctggtccaagcctcctctgtcctgctcatctcagctgcctgggactctgcagagaggctgcctgggactctgcagagaggctgcctttggtcaattcaagctgccccagccagcacggttgactggcacagaacggcctggagtggctgtgccaactcagtcataatgggaggagctgtgcagagaaagaccttccaggaattgagggtgcaaggagataggatggggcagatatgagcggcaagtttggtggggccattggcagggccacatctggaggcctcccattctgtgaaacaccccagcagtgtgttaattgatttattttgagtgcagtttgtttggatgtgggtagactattgatgctgtggcactttggaagctcacgtttccaagccagagatacttcatttgtgtctgaatgagaaaaatctcaagatacatgccgttccatccctgagatgcctgccacagtaccaactcatggaggctgcagttacttcagtctcatatacacatatatgtgtgctcacatacacacttttaaataatgtgatcggcttatgtcctgcttcagtattcttgctcttttcttccaatttgggtactgctctgacaggctggcagcacaccacaattctgtctttgcacattgattgacctgactctgacatatcaggattgcaaattactaacttgcttttaggccctggctcctgaggaatttataatgtctattgggatctcttctcccccttagcttctgcattgagagtcagaagtgtgcatgaagtggtgttggcttctttctgtttgtatccaggagggtgggaggccccaggagagcagacatctggggcttctttctgttgcactgccaatgcctatccacagaygaccttatgtgaaggtgctaggctgtgaattcctttgttttatttcaggaaacattgattaaacatctattttggatattcaaagacaaaaaatgaccaacttatttctcaattaaaatggcaaatgcaatatagtgttatcatkgctatggggagtggttgggaaatataakgtattataggggcacaggggcacataggagggtgcctatattagtctgttttcacactgctataaagacatactgagaatgggtaatttatgaagaaaagaggtttaattgactcacagttctgcaggctatacaggaagcatggctggggaggtctcaggaaacttacaatcatggtggaaagtgaaggagaagccagcatgtcttatgtggctgcaacaggaggaagagagagagcaaagggggaagggctacacactttcraacaaccagatttcatgagaattcactatcacaagaatagcaagggggaagtctgcccccatggtccaaccttctcccaccaggtgccctcccccaacattggggattacaattcaatatgagatttgggtggggacacagagccaaaccatatcagtgagtgcccaaccccatcttggtagtggatggtcaggaaaagcttcctttaagaactgacatacaagctaaacctaaaaacaaagtggagattttcaggtgaagggggattgtgtgtgtgtgtgtgtgtgtatgtgtgtgtgtgtgtttgtgtgtagaaggggttcaagaagaaggaaagacaagttctaggcagaatagatggcatgggaaaacacccagaggccaragataatttggcaattgagagaattagaaaccgagattatgggtggtttttagagcgcagtaatatcatggatggaggtatggggagagattagattagcaggaactaaaaaacgagataataatgtataggccaggtgcagaaatttgtgctttaaccttagggaaatgcagagctactgaacaattgtagaatagtttcatgatcaaatttggctttaaaggagatgattttagctgtgatacagagaacggcttggaggaggcaggaccagcatcagggagacccactgcagtggtcttaggtgataagagcagtagcctgacctaaggactagaatggagaaagcaggtgaatctgaaagatatttaggaattgcaaagagtaggactttgtgattgaagaataggattgagggagaggaggtggcaataagaatacccctatttctggcttaggcaactggatggtgatagtggagccattgatggctacagagacagagaaggcagcacaagtgtggaggcatggggtggaaagatgagagctgtatgggcatgtggaggtatagaaatacttctgtgctgttgacgaatagtcagcccttagcaggcactcatatattttcttccactgcctcgctcaccctaactaacccagtacctakggcattctcaagatctagaaatggaacagttactgtgtgacatagcaggaggtctcctgttctgactggttagtgcccttgccataccagatcaatatttttaacatcccttctgtggagacagttcctgtggtagggttcctgtggcagttggttgtaaaaagacaagagctgaggagaaagaggttatagccaaccaggcacggtggctcacacctgtaatcacagcattttgagaggctgaggtgggtggatcacctaaggtcaggagttcgagaccagcctggccaacatggtgaaaccccatctctactaaaaatacaaaattagccgggcatggtggcgcatgcctgtagtcccagctacttggctgaggcaggagaattcacttgaatctgggaggcagaggttgcagtgagctgagatcatgccactgcactccagtctgggcaacaagagcgaaactcagtctcaaaaaacaaagaaaaacaaaaaaaataaagtcatagctagcaatgttttatttgagagtcaccacctaaagggtaaagcctttgagtgsatgaaagtcttcaggaagagtgtagcaagaaggaagacagggcccagggctaaggaatttggactttaccctacgagaagtggggagccaatawtgtattttaagcaggggcatgaggcaactggtgargcctgcaggactaaagggagtgccagagatgtctgacaaggttgctgccctcaatgaactaattggggtaggcgagataaatgtctcttggaaagtaatggtcatgccaggtgtgatgattaagtagcaggtgtgtagcacagagagtaagggggctaattgtttcccacaaagtaacttggagcccctatggttagggccggatgagggcttagtcaatcaatttgcctttgtggtaatcctgaatagaagaggctgctccttgggtgagaagacaaatagacttttgagttccctttaaaggctagacacttggataactaggaagggttcttagtaaaagcraatgccttttatgagactgtgcagtttacaaagccctttgatgtctgctacctcatttcattcttttaacaagtaagttagaggacattgcagagataaggaagtgaggcccagagacgttagaagttaattaataagttatggagccagtcttcatgtctgggtctttagatccaaagtttgattctttcacacttctccagtggtttgcaaactgtgttccttggagcccttcagggatgccttgggcttgcaggtgatggggaggggatgggaagcattcagggagcagggcttctgctcccagagccctacctcagccagggctctcaggaattttccagttttctatgtcagcctgttttggaaggtttcccccaaggaagcatttcccaatgtggaaaaacctactctatgctgtcttcaaggctatctctaggtaggcctgtccctaaaccctcctccraagttggtgtgaattcctgtgcttaaccacatrcaagatctagcaaaacacttcttcttttctaaccctaactcttcagctccagctccagcctattccctctggatcttgttctaggttgtctggtggttcttctcagtacaatctgtttcgtttctgccccaacaccctaccacctttttctagattcctggcactccagacactggaagaacgagtataaacatttaccagcttggatcctttcccagacatgcattgttgctgaccctgtgaccatcagctggacagttttagtgtcttcaaatcttgatggacttgtatttggacactttgtggcagtgtttttctgaaaccagtgcatctcaagtagttggatctaataattcctttgttctcagaaattgtacgttcattaaaacaatcctttgtccattaagttactttttttaaaggctacagtttgcctggatgtatccagtaggcatgagttagagattaaagacaaagggcccaggggcaaaggaaataattttgtttcctaatcatacagtgacattacaagttagcatttctgtagtttccctkgctgagaactgcctagaatttagtgataatttcctgactcacaaattgtgaaacctaggcctaagcctttctcctyttcttaaatatttattgagcacctacagtataggtgcaaagcttagctctaggctctgtaaaggatacagattttaacaaacagtttctgccttcaagggagttaatggtcccagcatgtgcctaagtaatacaaggaggaggcagggaggggtggatggagtaagtgctgagggtggcctgaaaatggaagtaatcagtttatttcagggttccaaatgagaacattagtattatgctaagtaacttctcttttatatcctgctccagaagtgtaggggttggtggcagaatcccrcagtggacagaggcccagaagccaactggacagaaggtctagcaaggagagctgaccctgataaatctagtcccagctgctggtgtggttgatgatagagagctgtgggctccagaggaattctggtgctgagacaaactcacgtatttcagttgtatgctttgcaaaatctgtttgattgccagtagctcttgagcccttagcccctgataggctggtcacccaccagatccacagcagggagaacacaggctctgcagacagagactgggtataggttactgctctctttctcactttactgtgttggttgcttaacttctcttgcctcagggttctcacagtgcagaggggaaatgatacctaccttgatgggtggttgaaagggtgggagagcgtgcagggaaagagcttggcatacagtagacactcattagatagtacctcattacttttgttatgaatccaagggcttcatggtgggatcaaggaccacagctgtggtggcctagcacagatgttgcattttactcttgtgagtggtcaggaaagccatgctgtatggtggagtgagggtctagagatcaggcccccatccccaccccgctccccagagcctccaggggaccttggacaagactcttaaccttctctgtacattattcctattcaaacactgataaaatggaagtgaaaaatcacaaccttctgaattgaaagggacctttcaatataatctacaataggtgtatttagtagaagagacagttgaggcttagacaaggtgaaatgaagctccaaaggcaaatcagggggtggccctgtcttgactcccaatataatgctccccttcacatagttgctacccaagtaggtggtggcttgagagtttgggagcattcatgaactattgcatctgaggtgcttttggctggaccacttatatcatagacaaatccatttttattagcatcattcaaggttcatagcataaaggcagcaagaaatggtagtgaaaatatgctgtcttccccctaaaccagttttaatttcttaactccctcctgccccttagttcctctaagtattttcctcctctgacctgatattcattcacttggtatttattccacatgtactaggctttgcgtactacagggacttcatagccaagacatgcaaagttgaaaagttggataaacaatacaggaaaaacaaaagtgaacaaaaatgcaaagcactatatgattaaatgttaaatgagaaatctatgcctgtggttcccaaatgctaatttatggatttgtacttgttgatgataacattttcatcagttttctgtgaaatgagaaaaatagggcaaggtgtgattatttcataaggctacatttatttaataggattttctgagattatatccttccaacattttagtgctaaaatgccctttcttttatgagatgttggagcataaatagtggtggttgaaagcccatacttaaaaaaatagaaagttggccacattatattggtttcttttgaaatttggctcatccttgaaatctaaagctaagacaaccactggtgggcacaaaagtccagagtgaaggggaggagcaatttttgaggagtggagtgctcagggagagctccaaggacaaggacaaacactgataaggaattgaaggatgagaggattcaataatgtggagaggtttggggagrcttcctcttgagaggataacgtgagaagagccttgggagcaagtgtggagggtctgttcagggcaatagggagaaaagtttggatgccttgtctttttacctgctgtgctcgtaaaaaattcacccagttgttaccacaataaaaactgatctttggctcctttcaattaaccaggtcactgtcctgaactacttgccccagtcactgaatcaatgccccagttcaccttgtattccagaactagtctttcatctgctcaaggcaaggtcaaaaacaggcatacaagagcatctgatgctcagtaactcagctccagttctgacttcttttttttcatccttgaccataatttagactcattaatgggttagatggtctttgctcattctggcctcgtttctgggccctacaccctaggccatgcccttgaatgtgtccctagctctgtgaggaggacccatgagcagtagtgtgccagatgcgtcacagaggggacttagggaatggaagaaggctcaacaggatgcatttactgggtggagagggaggaactggtggcctatgcctgtgggactgaggttcggatggttaccattgactaaaatgggaagagagcctgtttggaggagaagaatttggtttcagggatgttgagcccaggaatgggaagggagaactggtaagaaattggagggaggtgaagggaggatgaggagaaggaccaggtccatttggagtcatggtcaaggtcttctggagagagactgcatcattgctgmwggtaccagtgagtgaggaggaaactgaaaagagttcagcctcacaggaaggctggaaattagtgcaggagggatgggcaggtgagtaggaggctggggaggtcacasaggacaagatgagagagtccattaacctagagaacataccatttgtgtctgtagggggtactcctgtgttctggactaggaggagttgtgtttcactatgggtgaagagcctgagggtaaggagaggctgtgcctgttctgcgaccctccatgtgatctgaggtattcccttggcacatactcagacacccacctcctttgcttggtgtcttcaatctttccatacctcctcctcagggggaagaagtccttgcttcaagtaactgactggctgcaagtcatggagagggttggggccaagggagccatctttttttacgcctccctctggggctgctaagagcagtagatctgtttgagcttatttatgtgcctggagttgagagctcatattttgcttattcaaccagcttcccacgctgccaggaaggcactaagcagcagaaattcatgttcaccctctctgtctccctctctctctcactctgtctttggtattcttcagctccaatgggagctaatatttacctgcagtgttagctgtggggccgtgggatgtggcagctggaggtggagaagacttttttctcccttcctcctccacctgtctttccctagagatttgaaaagggaaaaattgtaattttaatctttaagactgcctgtttgagatttcagatgttgttgagaaaagtcaaggggtcttgtgctcacttttctactgaaagataagtgtcttagtctgtgagcctctataataaagtaccacaaagtaagtggcttgtaacaacagaaatttattttttatagttctggaggctgggaagtccaagatcaaggcactggtagatttggtgtctggcaagggccctctgcctgatggatacctttctttccactgtaaccttacaaggtgtaaggggcaaaggatctctttggggcctcttttaaaagggcactaatctcattcatgggggctccacccttatgacctaatcacttcccaaaggccccacctcctaataccatccccgtggggggttaggatttcaacatatgaatttgggtgaacataaacattcagtccatcaaaacaaggaggaagatgagattggtgggcttttaggacatgctgcagagaagggagaaaatgtcagccaaggaatactgtcatactgttccttacaagtggagtgactcccgcgttggtgacaagagggcatggatgacagagtctgagacattactrtgactggtcttacttggtgctggtcagctcggacaacttctgcagggggagcctagcagatttcatgtgctaggcacaacaagcagggctggcagccatagcttctccctacctgcagggaatgtgcataggggcaagttccctctgagcccactgcctggtgctgactcagcccaagtgcttacctgctcaccagtcaggagttgaacatatagatgaagttgaacgaatgtctgaggycaggaataggaaaaatgtctcagctcaatgtggtttgcgcatgacaaaaagagtaactggtgatatttctaagaccttggtacattcccactatgggacaggatcgtccctctccaggatgctgggggaagggacaggtgggagatggggcagggatgaaaaggagaaccttgaggccgggagtgggtggggatgttggcctgcatggattccacacaaggtctaagtccatctgtgtgtgtaagccagcgcccatagcggctggaggctcctccactcacttctccagtgccttttcctgcctttatagcagttttccagaaagtctattcctgttcttcaaactgctcttttatgctgtgtgtcatgatttctcatgccccagtttgtcctgttgttgccatggtagctggctaggggtcgtctccagttgggtgggaatatcttgctggcaggccacggaggcagaagaagatatgggtgacttcaggctggtgcttcggggactcctggtgttacagaccaccacctggctccccattccyacccctctgcatttcccacagtttcctatgcccaccagaaggcaaaaacagaggaggaaataagtgtaatatttgcctttgttacggccatttcagaaaaagcctggcaaggcatagactgcccctttcaagattgagctatggcagaactaagatgggacccttgtctgggcaagaaccgcaagggaacacttgtcccatcaacacttagaaagagaaaagaaggcagcagacagcaaggcaggatttagctgtgaaaagccacttccaagaaacacgaagataaactgaatgcccttgacacctatgagctaagcatctggcagctgggactctccatgcctatgaatatagaaacttttgtatgggcccttgacttcacttttgtgaagtttcctgtgatttgggcacactgcattattgtttgcctttctatctttcactttggtttctatcacatttgatggctacttttcacatgatacattttaaatcatttatttacccatccatccatccatccatccatccatccatccatccatccatccacccatccatttattcaacaaatattcaagaaataaccattgattacatactatatattatgtactgttccaactatggggagatagcagtgaacaatattgacagtctctgctctcaaggagcttacattcatctgagatagatcaataacaaatagacaagaaaatacaggatagtaaagagtggaagattaacctggggtgatgtcacagactgtgactgggtggatggtccaggaaggctctgcaaaggtagcrtgtgagctgagatctgaaagccaggaagcaaccrctatgggaggatggggaagaacattcctagtacagggaacaacattcccagtacagggaacaactagcttaatgccctaaggcagaagcaagattggtatgtttgagaaacctcaaggagggcagttgagataggtgagccggtgagcacttgggctgagtcagcaccaggcagcaggctctgagggaacttgccctttacacatgttcaggtagggagaagctatggctcccagccttgcttgttgttgtgtctagcacatgaactctgtgaggattcctctgtagaagctgcccacgctggccagtgccaagtaaaccagtcatagtaatgcctcagactccatcatccatgccctcttgtgcctaacactggagctactccacctgtgactggagcgatggggaaggacgtggaagatacagtcagagggttagtgtgccagacaccttacctgcaccacgtcacagccttgtggcctcaactgtttctgggacttttggctgcttgttcaggttccagttgtcactgcagtgactgaccaactccatgcatgtaaaacccgacagcacttcacctcatgaagktgtacctcccacctcttaccctggagcttccctattgacaccaactcacgagatgcacaggactctcctgggcaactggaaggtggagaggaaattaactccctgagtgatgaacatttgatcagtgagagattgagcagatgaattcttctctgtcttctgatggactgtcctgaggcacagttgtcttttaccaatggccagctaggtaatgcaccatcatattggctctccctccttgcctgccttacttcccttttccctcactcctgcttccttgcgtttgcataccttaataaaggcacctgaacccttgcctcaggctctgctttctgggggaaaccacacttagacggagaggcaggcaccagctgatatagggcctggtaggacatgataaggaatttacatttcattttgagaattaggggaggttattagagaatactgaactggagaatgatatggtctgttagacttttaaaaaagctgactctggttgcagtttggagaatagattgaaggaaggcaggatgagcagtgggcaggctactatcacagttcaggggagagatggatgatggcatgaaccagagtgggagcagtggtggtcatgagcctgtgtgtttgtgaagggcaaccataagacaaggctgtactgagaagcatactgggtagtgggccaggaacaggacccacacctttgcacagcagctgttatggttgaaattcaaatatgtggttcagcaagacaacaaattacaacctaccaaggaccttcatcacctgttgaacatagagagacttcagctggggagaactgaagacctttacagaaacctcaggacatttttattcaaacccatccrtggagttccctcaggaggaaggagcttgggttcagctcctagttgaatcaagtaactctcygccttcatctgtttaattcatttayacttagagtagtatttcttttgcagaaagggatgcatggctaaaaatgtactactgcttccattaatgaaaattaatttagcttaataagatgagtctgaatcttggattctgccagccctgagtttgaattctagtttgacccgtttctaggtatgtggcctttaagtttctcatctgcaatatgggaattaacactaacttcctggagttgtgagagttaaatgatttgggtgtataaaatatctgatacatgctctttataccctctttactccactcatagtaaataaatcctgtgggaagctgaagtacggtggggattgaattgaggtgggtgcaaccttagccctcacctggtagacttccttctagagtttaacctggagatactggagcttttgccattaagggaggtaacagatcattacaaaacattcctctggagttattcaggagactagaactgagccctttcttttgagagggtcaaaacagtatcggtttatgaatgactatgatagtacccctgtgagatagtttaaaagaagtgttgggccgggcgcagtggctcacgcctgtaatcccagcactttgggaggccgaggygggcrgatcacgaggtcaggagatcgagaccatcctggctaacacggtgaaaccccstctctactaaaaatacaaaaaattagccgggcgtggtggcgggcgcctgtagacccagctactcgggaggctgaggcaggagaatggcatcaacttgggaggcggagcttgcagtgagccgagattgcaycactgcactccagcctgggcgacagagcaagactccatctcaaaaaaaaaaaaaaaaaaaaaagtgttgttcaatccattttatagatgatagtttctaatacttcaggcagttgtgccttccctctgcaatcaaactctggggcatttttccccttgatgctgtcttcttcacttgctcaaccaaaaataccagctcttgcagaataaatcatcaatttctgagggtggctgatgtgaacaactcatatgaatctcaggcccatcttagatttttttttttttgggaaattacaaaagtattttacatttgttatagaaaatatggaaaagcatatggaagaaaatgaaaattatccgtaatgccatcatgtacaactgatcgttaataatggataaatatccttctaggcttttttttccctacacacatacctgtatgtatattcacacacatacatatacccacatacagcttattatactaatggggattatagggtgcacatcttgcttttgtaaccagctttactgattaataatatattatgaacagtgtactgtgtcattaaatatagttttaccatgtgattttgaataattgcaagaattctcttatgtgattcttatgatttgataacaagttccttattgtttttcacttacaatacaaaaagattgtagtttttaatattcaaatgaacaatccaatgaccagttttataaatgcatcttcatgtgcaagtctaatgacctgataaggagaaattcctaggattagaattattggggcataggctgtgcacatatttatgactcttgagaagtattgccctacctccttcaggaaaggttgtgctaattccaacctcacccacagtgaatgagattgcactcatctttgccaactctgggtatttcagttagtaagaatgtctcttkaacttctcctaaacacagtttaattatgatatatttcgaacatttgtatagaaaacaagagacacccacgtacccactaccaagattaaatacataataatatttgccatatttgcttcatccctctcccattttcaaataaatacaatgttacagatgcattttgtatgctcattctttgttccttgctccggaagtcatcactcctctgarattgatatttcattaccatgtgcatttttgtaattttactacatgtrcatttatgaaaaagcatgtatatgaattttttgagttttaaagttttatttacgtgatacatagaatgtgtccttttgcagcaaaatgaacatttgtttttaagatttaccagtattattacatgcatactgagttcattatttcactttctgcatagaactccattgtataaataaatcacaggttcttaattcgcttcccttctgaggggaggctaggttgctataattttttgttattacagataaaatgatcatcttgtccatgtctcttgggtgcatgtgtgagattttctctgggaaagatacctaaaagtggaattgctgagtttaggaatacacatttccaacttttattaggtacagtagttcccccttatctgcaggggataagacccccagtggatgcctcaaactgtggatagtaycaaatcttataaatgctatatttttcctacacatacatacctatgataaagtttaatttataaattagacacaggaagagatgaataataactattaataaaatagaacaattatgtgatatactgtaatgaaagctattcacataacttatatgggctctctctccctctctaaaattatcttaatatttttggactctggttgactgagggtaatggaaagtgaaactgtggataaggtggggactactgtattatctaacacattgcttttcagagtgaatgtrtcatttccactctgcatatcatatgcagmactcccatttctatatatcttcaacatcacttgagatgttcagaattattaaagtgtgccaatctgatgggtgtgaaatggaatccaattattgcattaattgcactttccctgattactaatgaaattgagcactgaacatatgtttgttggccatttggatttcctcttgtgtgaactgtagattcctatcctctgcccatatttctatgaggtagtatgtgtttttcttatgatttctgagaatcttgtatatgttctagatagaattcgtgagttgtcagtatcttctcccccacatgacttgtctttttcactttgtttatggtgctttttgtcatacagagttattaattttagtrtggtaaaatgtatctgcatttttttgatgatttttgttcatcttctctcattaaaaaattccttccacatactgagataaaaaagaagtcatttatattttttaaataacattttttacagttttgcatatcacatttggctcttttaatctatctggaattaatttttgtgtatagtgtgaggtgggctctaattttatctattttttctctgctatgattagtcctttgactcaacaccatttagtgagtaggcaattcttatctgctgtttctgggcactttattttattccactggtctatttgtatatccctctcacccatgtctcactaatttagtttttataactttgtagttttggtatattaattctccccaaattgtcttggctattggctctttattcatcatatgatttttaggatcaccttgtcacatttcactaaaaagattagattttaattgaaatggaataaatggatagattaacctaagggagccttgccatatttaagctacttcgttttttgttttttttttagtccctgggcatgacttatttcttcttatgtttagagctttcttaaagtccctcaagagagttgaaaatttttctttacatctttaattgggtttgtttttaggtaccttatggttttgttgcttttgcatggtgtcttcttatcattactttttctgagtctttgttttaggtgtaccagaacttgtacttttgtacactgatttcatgtccaccatctttgtagaattctcttactactgtgagtggctttttttttttttttgtaggcaactcttatattttggatgcaggcagcatcacctgtgaataatgataactttgttttttcctttataatccatatgscttttctttctttttctttacttattacattaaccagtacttcaagtccaatactgaatagaaagagtttcagtgggtgtcctagactgatacttcactttacagctatgtcttgacttagtccgtgttccctgtgaacaccaccttacctctgaccatcctgcccactttacgtggcattgttgattagtaatttagttccttttttgtgtatgtattcataaattagacattatatatatataaataaaattgtcattatatccactaatatcttttgctcctcacaccattttcttgcagaccattcttttcttccatttaaatttcctccccaagaaatgtcttatagtacttatttcccctgaacttgtatagtaaactctctattttcctggaaaagtctttatttcgagtcataatttagctattttcaacacttgatgatattattctatcactttctggcctggcctctattattataattaataatctaattgctgcttcttgtaggtaatctgtctttcctctcaggatgcttttaagattttttccttcatatttttggatcttttgatatttcactagaatatgtgtgtataggttgaatttatttttatttatcctccttagaattcattgaatttcttgacttggaggatttatatctttcatcaatactagaaaatttatcctacagatcttcaaatattgtctttctgcagtctctatgatctctttatagaagtcccattagatatattttgggtctcttcattctgtcttccatgtctgttaactttaatcatattttctctatttttatctccctgggctgtatactgtggagtttcctcatatgtgttttcctgtttactgacactctccttagttatatataatctaatagttaacctatctattgcctttaatttcaatgattatatattttattacaagaaattttgtatttgccactttttcaaattatctttttttcatttcattgcattctattattttatttctttacatatcttttctattatttcaagtactggagctttaatcttcttgttctttgtattagctaacttatccttatgctgattatttccttgtgtgcttcaaaaattttgattacaagtcatgtttagtagtgcttgttttccccatggaaatgcagtgtactcaggattgtgagagtagcctaatagagtagttttgtttggttttcttacttgacccaggggtgttattttcttggcctaagtgttcctgaatcccgctgaacadgtaaattcagcccataaatccatgtcacacacaatcctgagttttgatttctcagggttttgctttttctcattcactcagagacagaagcttccttgttatctatttttgctgtagagttgattttcatgcagtttatttaactgaaggtacagttctttaagggttatagcttagcgcagaatcttagttccaacttctgtccacataaggtctaaagaccttatcacttctcttgagtggacattaaaacttacccattaggctgggcatggtggctcatgcctataatcccagcactttgggaggccaaggctggtggatcacttgaagccaggwgtttgagaacagcctggccaacatggcaaaaccatatttctacttaaaaaaaaaaaaaaattaagccttgtgtgggtggcgtgtgcctgtggtcccagctactcaggaggctgagacatgagaatcgcttgagtttgggaggtggtggttgcagtgaactgagatggggccactgtactccagcttgggtgaaagagcgagactctgtcttaaacaaaacaaaacaaaaaataaaacaaagcaaagcaaagcaaaacaaaacaaaacacataaaaaacccaacccattaaatctttgttaccaggactagttactgcctatgggacagctgcaatttcaattcacacgcttcctcctttgtatttcaattcctcctagggatttccttttatatctttcaagttcagcaatatatcttttcaaatatatttgaaaatatatttctgtactttatcagtttttctagaaatgtgtagcaagagattttcttattctgccatctttctagtactgaatccttgaatgacttttacaaagagaataaaataggaaagcataaaatagtccctgggaaatacacacagtcytctaagacttgaaactagatgttcctaatggagaggttagtaagagtgccggacacagcacaggggaagatttgaggaaggaagtgggtgagaaacagcagtgcattaatgggcaattactttctgccccctcagatggtacgtgagtgcttagctaatggcagttcacttagaaaagtgatcattggtaagtccttaccagcagctcccaaaaatatcttgcctgaagtgatcgagcctttttaggaaacgaaagatcagattcagaaagcaaggagatggttctcaaattctagtgaagacaaattctagaagaaaagctttcaaagggtgttgttgaccagagaagctgaaggattcaagctttcttgtagctttataaataagaagggaaagaaaacagaatgaaaagcaggggatgagggtacacagggttgagttgaaagcatgagtgtaggagttttcactgcagacatagctgatttgagggggaaacattgttttgcagggcttgtgaccaaatttcttaggatccaaagtgtcaggagaaatcctatttatttgaaatctagttgataagccttaagctgattatgtcaggttgaggtcactttttcttttcagcttgggttgtcccttcagactctgctgtcccttcagtttcttttatcttaaggcatggagccctgtgcaggcctatgagaccatcagaaaaatagaggtgcagctctgagttcactccaactctcaaaggctgtgacttactagatatgagggagaaaatgaaagtgtacatagtgaggcaaatgcattccactggggttcctgcattcctggtcatgatgttgatgagtcctatgagctagagcaatctatttaattattctacaccaggagtctcaactgggaggtgatttgggccccaagggtcatttagcaatgtttggaaacatttttgattgtcacagctgagtgggggaagtatatctggtgtctagtggctacaggccagggatgctgctgaatatcctacagtgcaagsgcatcccctatgacaaagaattatgtgactcagaaatgccaataatgctgmgcttaagacacccttctctacatgtcttttcttatctgcaacatggaggggttagaagaagaggttgatgtgtgtggctagattaggttattacccatctgtctaacagagagcacttcaacccacatcacatctctagatacatggaggaaatgaaattagttgaaaatgttccccaattttctaccaaagaacaaaatattgtactcgagatgtgagctttgcaggttcacggtgaccactgtgtctgcctccacgcattgggtcattggtcttgtcatgttaggtttgcgagttgcacttgcacctgtgaagggaaggttgaggacaggcttccttgagctgaactgattgtctccagaatggttttatcagctgtagcttctcccacagcaccttcccaacatggtgcagatcctaaggagtccatgtcctgcttgtgtccatttggctttgtttatagtttccattcatttatttatgcatttattcattcatttaataaacatgtattcagagtccactagacataaggcagtgcattagttactatggagaatgcaaagatgaatgagccaagccccttgtagtatagtggggagccaagatgtgtacaccacagtatctgaggcagggtgacataaagtgccagcagtactcagaggagagagagatcacttttgtcatatgaccacaaattgcttcataagggaggtagcatatgggctgggcttttaagtctaaataattttttggcaggtggctatggaagaaggggtaaggaagggagaaagaaaatgagaaatgatatggaggaggtcaattacaaggtgttctcagggaagggttaacagtcctgcttcattggagcagtagtaggagatattgctaggagcataatggcaggtaataaggacttagactggatgacatttaagttttctttcaaccctaagatgataagatcttatgattggatagttatatttgataggcactagaaaactcattcattcattcaacaacaacaaaaaatttattaaaattttttttttaaccagatactgttctaggcattggggatacaacattgtacaagcgcttcaattttattgcactgaaaggtgagatagggtcagagttgagctgtgcaatgaatttttgtggtagaacctggaagaggaagatggatgaggagactctgcccatctcctgaatggaaggtaatactgactcgaggggtggtggtgcaaatggcaaggacaggaagactgtgactgtggcatagagagaaaaatgacagggcttggggaatgcttgttgtgggagttggagtcaaggatgcagccaaagttttgtgcccgagttagggggagactgcaatgctgcaaacagcattagagacctaggagggagctggtttgtagagaaagaggatgagtttgcttttaaacaaactgattcatggtgctgtcaggtcatccaggtggaggtgcccatttgagccatggtgaatatagtaccagacaacaacaaaaacaaaaaccaacaaaaaacagagccgaagataaaggtttggaagtcttctggatattagctttatttgaagccatccatatggatgagatcactgagagagtgcatacatagtgaagaaggcagacaccgggatctgaggaatgttcacatttaggaggcaggagaaggaaaggtgaagaagatgaaggagcagttagggaggtagaaggaggagtttggaaatgctcctgagggaggcaggaagaggaaagccaattcatgctgagtcccaatatataagaatgtgtgcacaccctaatagcctccagggaaacagactttggggtgaaaaaattccctggaacatatttagctgtaaaagtgttgagccaccttatcatgttatcacttcttagtgcttcagccagagggtgaggagggagggggagtggaggaggctttccagtgagtcatccctcctgcatgttaggagttttggttaaaagatttasagagagagakagtgagagagagagagtgagagagagagagcgtgagagaaagaaagagagcaagaaagcgagagagagagcacgagagcacacaagtgagcgtgagcgagctgcttgatttattttaattttttttagagatggagtctctaaaatatttttttttttatagataggatctctgtcacccaggttggagtgtagtgctgtgatcacagctcactgcagccttgaactcctgggttcaagcattcctcccatctcagcctcttgagtagctgggattataggcatgtgccaaaacacttggctaatttatttttatttttatttcttgtagaggcagattctctatgttctctatgttctctattctctctatgttgcccaggctgatctcaaactcctggctttgggtgatcctcccatctcggcttcccaaagtgctgggattacaggcgtgaactgccacatctggccttgatttrttttctaataggttcctagggcactgtggcaacaatgccttttcccctgagaggtatataaccaaggagaggacatttggggaccttctatgattgatttttgtctgtgccatcttgttccccatagccttgatggccaagtggctatgtggggatctgtagttcacacaaagcctacagttcccaggtaaagggactttttatcttttcacctttggccatggcttggaggaagctttgggcctactgcttggctcttatcaagtcctgagtgaccccctgctcttctacgctaggcccttgaaactctcctcaactagtcttaagttccaggctacaatttctccttcagcttgtctcttgcaataaggttgtcttggtctgtttttgctcctataacaaaatactctagaacgggtaatttataaacagcataaacttatttctcacagttacggagcctgggaagtcaaagatcaaagtgctggcaggttaaatgtctgtcgaggacacggtctctgctttcttgaatgctgcttcctccagagtagctgatggcagtatcctcacatggcagacagctgatggacaaaaagggcctagctacttctctccagcccttttataaaacactaatcccatccataagattagccctgatggcttaatcatgtcctaaagactttacctcttaatacttctgcattggggattaagttttaacatgaaatttgaaggtgatgcaaacattcaaaccatagcaaagggcagtagtaagatgtagtctctggcatttggcaggcccaggctccaagtgtagttctgtgtgatcttagtgtaggaacttagtttctctgatctttattcgccttatttgggaaatggttgaagctaaccatacctatgttgtaggattcttgtgcagatcaacgaggcaacacatatatagtgcttcagccttccacagatgttggttactgttgctgctttgaagagtttctttgattttttttttaacttaatactcttttggttgagttgctttcagaatttctttcccttttctcccaatgtttttcaattaagaaaaaaatgtaattaatttgaagaaaattataacctaacacctcttagccaacttctgtgcggctcttggggaaataaagggccgtgaatgctttgattatagtgatataattcccttttggaaataagtttgtttttttacatcatctataatgcctggtgtctgtccctgcaaatataacaataataccacccacagtggtgtgacactctgtgtttacaaagaattttcatacatatcaacaatctcagtatcattctgtaaactgggtctttcaccctcagtgaaagtaatcccttttctgatatcaccacctcataaaggtatctgcaccctcatgttcattgcagcattatttacaataactaggatatggaaaaaacaaaatgttcatcgatggatgaatggataaagaaaatgtggtgtatgtagacacacacacacaatggatttttattctgctgtaaaaaagaagtagatcctgccatttgccccaacatggatggacctggaggacattatgctaagtgaaatacacacagcatgatctcacatatgtagaatgaaaaagggaatgaaacagtggttagcaccagtgggtggggggtggggactggaggaggaagtagggagacgtaggtcaaaggatacaaagtaggtatgtaggatgaatgagtctagagatctaatgtggggcatgtggaataaaattaataaaattgtattgtattagagacttgtgttaaataagtagatatcagctgctcttgttacaaaaaaagtaactatgtgagataatggatgttaatcttcttcactgtagtaaccatcttactatctatatgtatccgataacatcctgttgtaaatctcaaatgtacacaataaaatttattttttaaaaaaggaagttgtcttttgacatcacctataatgcctggtatctgtacctgtaaatataatagtaataccacctacagtggcatgacaccgagtttacaaagcattttaatacacatctctaccatctcaacatcattctgtgagctgggtctttcagccccagtgagctggtgactgtcttcaggttttagatgcacgcgtgcgtgtgtgtgcgsgcgcacttgaggtattgcttcttttaacacaaaaagctgaagtttcaaagcaggtggggtgtgggttaaacaccgttctaaatggcaggcctgctgttcatggggagggagagtggcctgaaagtttaaaaataacctgaacattatagactcctgtgaattctacagcccagagcactgtgagtctgtgggtgttttacctgctggagtgcaggcaggaaaactagttgagatgcaggaggatttaaattcgctgagtcctttagtggcatgggctggcagcagaagtatttgtgaaaaaaaattaaagccagaactaatgatcaggatcgatgttcctgaatggtaggaacagtgctaccctttgatttgctgaacaccgcatagtatttgtatcgccggtgcagcagacccttgttttctatgactgaacaactatccttcccccttgctccctgaactcccttactgacctctccagagtttggctgataccttttgcagatagctaactgaggctggcctaccagggagctcagggttgggacattttggatagacttagccattcattgaaaaacaagtaaatggtgtaaaaccatgctmattatgcataaattatgggcaatagcataccctttgaattttgagagttttgaagggttgaaataatttttgaattagcactcagttcttgatctgactcctgttgctctgggatattgcaatgcaaaatgacagcagcagtaggaggagcaggttgggctacgaatgtatcatcacatttggtttatcagtagccccatgcgattcagagggcaggtactacttttgccatttttgcatgtaaggatataaacccaaccaggactgaggtgcaagcctcctggtgtygtttccaccctgataactcatttattctgaggcccttcggcaccatctgtagagtctggatatattcttgcctcttggaactgtagaatcatcatgaaatctctattctctagctcaaatttctattaatgatatcagcgagatgaattaaagtggctaagataatgggttttgaagtcagggtgacctaggattgatcttttgctatgtcacccaccacctatgtgaccatcagggaagttacttagtycctttcagtcttgcttctcttcctgtaaaatggggtttataatagcacttgccacatgggcttattttgagaaataaggaaagtgaatctggttagcatggagccttgcacattgtaagtatttaatacctaggacaaataatattataaacagcatcacctatayttttctttgtaattattctttatttgtttgatccatgtccatttttcttttttttacagctccagaatttgcaatatgaaaatagagattatttaaacaaaggaaagtagcataactggaaactttgaattattctattaatacttgactacatatggaagaatattattgaaaaatatgatccagtgatggggtggttttgtgaaaaaatacaagcctttaaaggaaaaagctaaatcttgagtgcatgtatatgtgtgtgtccaaggagttggcttgtcagtggtgttaggaggatttcagaaattctctcttgattgagaattacatttccacctttccaatttgtaaactgcacattaggaatattcagaaacctgcaaaagagcctgtaattcttcacatttgaatgtactgtattaagcctgtctgaaaacttcccgtagcatgggaagataacctgcatgtttgtacacttggctggcagaacgtgagatcacatcagaatctagtgcatgtctttgcaaacgtgtgtgtcattttcatatgtaattcttcataagagaaataggcatgatgacatttgcctttttgtaaagaagagatagaacgaattaatactgtagttgatatgggttttttttgaagcaggactttattatcttatgtttaattttctgtggaaagggatctcaaaatattctttaggtggggagctgtttccttttaataactgattccccagatcttatttcaactccgtttctaagagcaagaaatattcctcataagacaatgaaccctattgtttaatgattgataagatggtgcttgggcagttagtgtgctggagaagttacccctgagttagaggcacttaatttcctacaagggaagtaaatacccctttttgatatatatttattcctgtttatatcatctgggttgatgtccactcaactcacaagaaacagctgggaacacctggcagcagagagaggcttctagtcagagctagaatgtgttaggggaagggtagctcctcagacagggcccagatacctgattgatgcccaagctctttttcaccaataacagttgcaggagatccatgcattcagtgacaatttattttgcaaaggcttgctatgaggataacataatgcaggcactctaggtaaaagaacaaagagaaagatatgtcctctactcctgagaagcttacaccatagttgaggagacaaggcatacataattgaaaaactaaatatgaatataatggcaaagttacagttatgacaatatcagtgataaaacagtactatgaacgatacagaaattctgtgagtttataggaggtacaggtcagtgttggagagattatgaaaggctttgtgggagagcagatttgaactggaccatgcatagaaggatgcctaggagtgggagaagcagaaaagaggaagaatatttttggggcagtgtgaagcaggcgctgtgagcagggctttgaggcaggaatgggcatgacacgtttgtttatgtacctcatactatggtaygtgaggagatagtgttggaaagataggttgaattctgattgccttgaattgtcaggctaaggtgtctggccattttataggcagtggggagccaccgaagtgatgacaatgtaacatgcatagcaactggcattttgggagggggagcttgctttgaaggatttacaatgacgtcacttttacacatattgagtctggggatgagggacaatccatatgcagctacccctaacttcattggacacctgggtctggaaatgaggcgaaaggtgaggtctaggagctagatgtggtgtggagggggtagttgaaatggcaggtaaggatataatcttgaagggagagaagtcagacagaggaaaggggttggggacagacccatgggtgccctacaggtgagagcagtaagaggaagagaaggaaacggtgagaaactgggagatgtggtggctgggatgccaagaacgatgasctctgaggagagggggaggtcagtggtgtcaaatgctgcagagtggtcaagtaggagggtaaaaaaagggaccatcaggggttcagtggtagtcttagagcaatttctgtggagtggaaggggcagagctagtaaatggcctgcccaggtatatatttcaaaactggccttaagtccatatcatatgggaatgccttcttccctttgattattttatactaggtgggtgtaaccagctgctcagtgtaggagagagtgggagagagagggtgtggtgatggacaggtggtggcttaatctgctgatgattccaacacaaagggttcttggagaggcaggattggtgggtgcagtggaatcttattctctttctctgggccttcagggcccctttaggcttgactgcagctgtgagctgcattttctgttactgcggcattatcttcaagagtgaaatgtagggagtggatcaagaccaggcaagacacgaatccaacctgggcaccttctcctaggcactgcctcctttgggctagcccctgacatgatacctgacacgtggaaggtgctcactgcatgtctgctaaatgaaccaatcggcctgagcccacccgggctgaacgagctttgcaaggtgtgggctgtgttgtgttttctgagtcaagaggccgtgggggtggatggatggatgtgctcctgccggttgttctcaccctctgctcacccccatcagtgggagctggggcgctgctgagtcctcctgctgcactttgccttggctgagcagcaaggttgggccctgagggtgggaagggaggtagacagtgatgggcatgggatcctttgctgtctggggctaaactccsaacctccaaatcaactttcccaataaagcttaatatctattagggtaagcatatttttggcttttctctgggctgaaaggtgacctcatcttatgggaaagaaaggcttgaagtggtaatgctataatcttcgtgatcctagatacattgaaagaaaataaaaatgctgatttactaattaactccatgcatcttgtgtactgcccccctccccaccccccaaaacatcctaaacattcatgctscaggctgctgctccatgcctccaataaactagctcttcaaagagatctcttttgtattcttcccttttccagctgcctccagtgggaggggatggctccctgctctgttgtctcccagtactctcctgtggtgcactccacatcccgccttgtattcgagccctytgtgggtatgttttcccttctcctcttttgaactgtaagtttttagaggctatgactgtgtctaatttatctctgagccccagaatccctgagaacaatgtgtggctcatcaaaggggattaatgagtatttgttaaatgggtttatgaattcatgaataagtaaacaaacacacagctctctcaggtatcatggcctttgggtctccagacactggtctctactatttttttttccttttttcctccattcctctttctgacctgatctcaggcacttacatgtctctgctcctctgtccatcccccgcacaacagagtgtgttcatccctggctgcacttctgaagttggctttcagaaacagagtctgtagacatgcagtgtttccagtgtgttaccgtggtcacagctactgaaggtgaaatgtacataacaagtacttaygtagcacatacttattgtgtgcaaggtactgatctaagagctttatgcatataaactaacttaattttcacaacagcccagtggagcagaatggtattattcttaacaattaaaccctctgggagactctctggttcaaggtcatgccttacctctctaaagctcaagatcctgcctataacttgactcttaagcaaggaaaatattattttgacatgcagtatgttaataatggtcacatattgtgaagaatcctgtccttattattaggagatccagctctgctatttcctagctctgtgcacttggacaagtccctgactctctgggtgttcagataacaggatgtgcctcacagtccttctgcaaagatgcaatgagaaaacattacggttggcacccaggaagtgatgggttgtcataaatgaatggtttttaaaacactttaaaaccaactttgctgacctgtggttagctgatagcatgttggagtgtggggcttctcaggcttaggtttgagagatgctgattctagggacggacattacataaggatgtgaagttatgttttcacccaagtaagggctgtgaggtattgtgaaagccaccagactcccaagatgtctgcattgccataatgctcctctgctccactatgcatttgcacatggtctcctgccaacttttttcttaagaacccactcccaaatcctctctgcattatgttccttagagcactgctttgcataagagtctatttcttggaaaagctcaacggaggaaaaatagaacaaaaggggctctgataacttaagcataagctatctgagtgtaactggcagggtgggggaagatgaaggagcaggcctggtgggaggggcacaggccatttggatgaagcccacattcacagacttctcagtgatgggtgaaaaatctcttatgaagatggcccaaggcctgacagatctgggaagagcttaagaatgagggtaataggccaactgcttctccaactttgccactcatgtccatctgtcttagtacaaactcccacaggctgcctgatctggggcagtgtggacaccttgttttctgccttttccagaagaggctggagggactacctaccagtccccttcacacctgattgcagctcgatgatacactgcagtagaggggctgcaggataaatgctttgaaatgtaatagtcttcatgggctttataaagtaggaaagttttccacttgcttccttagctcctgttgggtttccactttgcaggtcattgctttcagaaaaacatgtggagcatttggtaaccccatcttaacttgggagggtgtgtgtggggctgcactttccaactactgtgagatgggctggctgcattgtggtgaaatttagtacctcaacaaagtcccataggggagtagagggctgttgacaagaggtcagagcctaggaatatctaagctctgaggcatggtgcatggggtgctgggctgccaagcactcgtgctcagtgaccagtagatggtgctctgacaacaggaaaatacagttactgtccctctgagactggaaagggattttcagatggtcttcagactggtttccaatcagagttatgactaattgctrattttccacatttccatttgtggatccttaataggacagtggaactcggggcactggaaggagaatgcccaccaaattcccatatgaagaaattcccatatgaagtmatgcaataccgcatgactacagtattctggtcatgaactttttctgaggatcctcctggatattgagggcatggtgccaggaacacttggcctctgatcaaattcaatttgaggatggtaagcatagcatttccataggcttagtgtcaytgtatagtttcttctcttgataaacaatttagaattaccctattgctgtcctgaagggcagcatgggttttagaaagagccgcagattggaagtcagatgtgttagaagtccacactctgccgcttatcagatgtgggcaaacggcttaacgttgctgaaactctgctgctttgtctgtcaagggtcgtgatacatgtgttaccaggctcacctcagaagtttggagtcaggctcagctgtggggcttatgtaaactgaaaactattaaacacatgtattattcaaccattaaaattgtagccactggcggggcgcaatggctcatgctagcactttgggaggctgaggcaggtggattgcttgagcctaggagttgccagctaggacaacatagtgagaccgtcgtctctataaaaaaaaataaaaacaacaactgtagctgccttgggggctggtagaatgggggattagagagtatgaaaccagtatagaaattcatagatctcaaagctctcaagagctatgacagccaggtgggggtggaagatgagagtctgtcttcctgctagcactgctgcccttaggccaagtctcttcacaaagccatttatgccattatgtttgcccctttcctttttggctgcacyctccaagaattatcccttttaactcacataggtgctgaaactccctaaggtattccacattaattcccaacctatgcatttatgattcctgtctccttggaaggcaagaaggcagatatcaactccagtgtgtcgtcgcatttgcacatgtagtatcccatcttgagtattctaggtctctgaagaattacaacagccaaagagaatacaggacgtggaatactggatctctgctgacatctgataacactgaagagacaagtcggggatctctgatgttccaagaactaagtctgggaagtaaaaggctagtgagccctgcttattctgggcattgagaaggtatgccgccagcctgctgaggcagaaccacaaaggaaaggggtgaggtgacagcatgagagtgaagttcatgaagctttctggcctgcaaggttatacartctagtataatctagtgtaaaaagctacatgatttatgtcatcacccatcttgttcattatagtatcctcagtgcctaaaacagtgcctggcacctggargggactcaaagatacttctctaatgatttgaatgaattttgtgctatggattatggtactgtctgaaaggagcgacatacacttaataatttctgaaagccctttttctaaccctatgtagtttacagggataccgagatagccacttgggactagttctaagtgactggctgatgggacttcatggttcacagcaccaccctccctccgtttcacgactgactaggtattcagacagaagaggaccctctgattaaagcaggaggaaggacagagtaaggcagtaatgtgaaatcaaagtaacaattacagctgactcaccttgaatagtaatttcacctgaaatgggctcccctgaatccaaaggtcaaatgccttccccaagggcagcaggctggacatgttgagaccattcctttggatttccagtagagaattttcctacacacacacacacacacacacacacacacacacactctcacatacattctcacacaacagacacatgtcagtgctcacagggccttgcccacagacagacacatacccgtagaaacacacatgccatgcactcagacatcacctcacttctcaacagttaatctcacttcacaggcgtgaagccatactcacccatggtttccaacctctgggctttggtcagtgtctgtttccttcctcagcccctcctttccttcttcccttccattgttcgggttggaaggatttggagaggcctatgtgttgagccaaggcaggaaaacacagaagacggtgtgccccagctagtgtggacatgggaggggacagctggtccctgccctcagttcaaaccaccagtcacctgtggggaagggcttggcggctaaacaggagctctttccctggggcttggagtccacctttcccacctctgcagctcagataccaattctatttttttttttttctacattaatgggttgggtttgagaaagtccgtggagcttatttgggagtaaaggatggggggcgggaggatccttctgattgttcgcatttcgagaagggtagttttagcccataactcaccatggagggcccttccaggagacgtcgggcagggctttcctacagcggaaccgggaggccgccccgtgagggcagaagctcycgccaggagccagcaccaccagcagagtgtggaacccccagaggtcctagcctcctccacrgggcctcccaggtgctaagtggggagatggggagagggttctgccctctacttggaaatgcctggccgtgttcgtggagcctgggaggtgcggaggagcggcgacgcggccatggcgctaggcgcgcaaaggccccgacacctyactagggcggcggcgggcccgtggcaccgctcccggcaccgaacagggcacagcactggggacacctctctgcagggacccaagacgcgcgtgcgtgtgcgccccacgccaggccctcgctctcttgcggagactccgccgcatcgctggctgcacctgcctctctcttctcggcattacttgggggaaaggggactcttcactggacctttgcagaggtggctgctaccctttggccacataaatcaagaaggcaagccagcctcaccttccaggaacctccagccttccggctgcgtccccgcccctcccgcctggccagctcctcccccgcttctcccagcgctcttgcgcgcctcgctgcgcctctgcgcgccgctcgctgtcctctgcctcgcctccccattctccttccgcatcttctccagtgctccgccgagggcgctgcctgcggggaagagggagactgagccgttagtgaggaagttcggtctgtggacaagtgtggtgccaggccgccgcgaggctcggctgcaacctgttcctcgcccgccggtgctcgccgcccgcccgctcgcactcccgccctctcggcggcgcagccgcggatcgctgttgcatgctgatccggggaggcggcggtggcgagcgctccgggcggatgctggcactcaggcttcgctgctctctggatgctgctcaacttctagcccaagcgcaggagctttgaagtcatttgtcccttttcgcttggatcgacttcttattttgagattttgggcattgcggtttacgcaggaacctcaatatcgctctccccacctccctccctctttctccaacctytggatgcgtctctgctggcagatataaagacccaagtcttcgcggtggaattycttagatggacttgcaggggctggcgttataaagcatgtcatcgtaaccccgtcctcgtctttrtttatttttttttaaagttcttttgttttcattttcccctccttcccaccccttcccccaaccaataaatcaccaaactgttacctagcgggccggtgcctgcctctctccctgaactaggtggtgcgtctgccagaagaggagctatgtttgaagagcagcctactccacccctctcctctctggtccctgaacaccaccacacactggcattttgaaaaaaatattttcctccagaaactgggcacccccaagccctaccacccgctttttttttcttttttcttttttttttttttccttcttgaggaatggagcttcgcagaggttgcatttagattcaacagttcacagcggcgggctgctgctgctgcctctccgaagagctcgcggagctccccagaggcggtggtccccgtgcttgtctggatgcggctctgagtctccgtgtgtctttctgcttgttgctgtgtgcgggtgttcggccgcgatcacctttgtgtgtcttctgtctgtttaaacctcaggatggctcgcttcggggaggcggtggtcgccaggccagggtccggcgatggagactcggaccagagcaggaaccggcaaggaacccccgtgccggcctcggggcaggcggccgcctacaagcagacgaaagcacagagggcgcggactatggctttgtacaaccccattcccgtccggcagaactgtttcaccgtcaacagatccctgttcatcttcggagaagataacattgtcaggaaatatgccaagaagctcatcgattggccatatcctttcttgcccaccataactccctctccccctttgcatttcttcgggtgaaggggggtacctagcatggaatgtatcccccaccccttcctggtgccaatttgcccctttgctgaagcacmctcttcggtgcatctaaggggcaagcttggtgccgtggagacccgtttgggcactagtgtttttcaaggtaagacttttggttttttatttttcctatgtggaaatctttagtgtccctgggtgcatccctttctgggctgggctttgtctgattcccagccccctccccacccctactcccttcacatgccgccctctacatagattgggttgccccaatgcttcctttcataatyaattctcattttcctttctttaagccagccactctgcccgtatccccaccarccaggagacaccgcactgtcttcctgtagggaagtcaaggctccatgaggggatttatcagttcagaagttcccagggccaaaaccctgtgtacagatagacaaatgaataaataaaacaggcttttgggtggggactcagctaactctagggacttaagtttaagttccactgaaagtggcatgagtgagtgtctgtcaggggaggtgatctctgttgccacagcccaaggagctcaaacttggagttctcctctcagccaagaaagagcagctcatcaggcccatcctgtccttggtccttggttgggtactcttgcttcttagtgcttgacccagctgattgctctcccagtatccaggatccaggtggatcggctgggcctgaattcatccgctgaggccagaggtgtgcatgcagtctctctctccctagctccaaaggaactgctctccccaaagcactggtgggggccatctctgatggtggtggtgtcagggtgaacaggcatggaaggagcttctttgcaggtttaatcaagtgcaccaaatgcagactgctgattaggcagctcactgccttgttcttcactaaggattggacgcctggcaaggccattgggaattgggggtggtgaggcagtgaaggggattagtaggaggcaagctagtggtctggcgttaaatatggggatggggttggagacatgggactttgggagggagatttgggagggatgcatctgcaatggaggccccttcttttctcccctattctccctctttcccacccccaccgtccaggtgtgcagcagtgaggcagctggagctgccttgggtctctagtattagccagacacgcggctcatttcccccagggcctgggcatctccctactcccccaaccccagtctctggccttccccttcttctctagttccctgcctcagcagctcggtgattggctggcgcgtggtgcttctaggcagcaccccctcattagaaacgaaggagcatctctaagcagatattcttcctgctgctgttcgcatcctcccacagcaaccccggctgggcttctccctckctcctctctgcatcccgctcccctgctccactctcacagagtgatcccaggccatccattgcctgagttgaacgtatctagctagggtggaggtttcgggcgggggaggggtcgggtccctgcagtcacgcctgccggtgcgctgcacaaagcggacagatctcattgtgttgtgtgctgcggctgcaaatattcctctaggcagtctacggatttcccagctgggccctcctttctcactcggcttctacggttctctaaatcttcccatccaccaggtgctgccttgctgtgcccctctcttaggggcgtgtttattcagacaggcgccctcccgtttctttgcggtagacaaagccgcccaaccgccccgcgggtggcaaagtgtgccagcagccatcgttggcacctcggacagcgccgctgaaactcccggcggcccggggctccccagttacccgggttcagcacctcgggtacttctggccgggcccagccttggagctgagaaaccaggcacgtttcctacaccacgtggtcaccttttttcacgttttctcttccgctgcaaagacaccgcctttccaccaggcgttgcgagcgcgcaaggtgcggctgtgagtcttactcctccctttccttgtctttggccaaaaatggaccaaagagagtcaaacgggagactctcgagggagttgatttcagcatcatgctcagtgccttggccccgagccctgtcccaatggtctcttttgtctgcatagttggaaatttcacagtggttctacagcatgtaggctgtggtaacagtgttcagggaacatctgctaaggtgtttagtggagccctgttggaaaatataaaatacaccatgtacaatgtaattgactaatatattccctctggtggtgaccacgtggaaacattgggcttccgtgggaaacgcacctaaattcctagtctcaccttcctttcctttctaaacaaataacttcccaagtatcttgctttgtcttattgggagtcagtctgggtagtggttgcccataaagctttggagctaggctgcctgggttgaaatcctagttccttcaccagctttctgaccttgaaaattacttcattactctgtgactcagtcttcttacctgttaaatgaggataataataataatactgggagaattaaatgacttaatatatatcacatgcctaaaacattatctaattacccagtaatcactagttgttattattaatggcatctttcagaaatttcagcgtgcctgaagtggggaggggtcttagttcaggtgaagtcctctagattcttgcctctcaaagagagcaaggagctgcatccacatcacctgggagcttgctaaaaattcagaatcctgggccccacttcaatcctgctgaatcagaatctgcattgtaatgagatccctgtgtgattaatatgctcattaaagtttaggaagtacttctttgctctttgtaagtgccagatttttttttttttttttaagaaaggaaggttgttcagttgttcagaaaacatgtcaagacctgctttcatattgacatttgcacatttagcatgcttgaggattttgtttgtgttacaacacgttttgagacttacactttcattggctgcagaaagtcactgtaggacgagggggataatgtacacttctatgtgccgcattagtggtctcatcatgctgtgcattactggtctttaatcatgtttgtctgaaaagattggttaagtaaaaggaatggtttaatttatgcttctaggatcaccccgacttggagggggagggtaatcttatccagttattaataggggaggtctagttcttatgggaagaaatgctcaagataacccagatttggcatgaaagatggtggcaagtcaacagcctactctgaatgtgtttcatttttcttggaagctacatctgcatagggagataattttattttcttatggcactttcctctgcartggataccatactctttttaaaaatgctaatgygatttaaaatgtgatgttacattctatacgattcctcgttttcattttcttttttgctcatctaatagatcttctctggcagttggctgttctgagtgccctcccatgttcaccgtgcctcatgcttaccagctctcactgtttcatgcccagggccagttaccctgtgggccatacagcatctctcatgtggtttgcaggatgccccacacttgtttgaacttttccaggtcacgggtgtgaaggcaagaagtagtgtgtctggcttggagactctatgccagagttgggcaataggatattccccccacacctccatcgccttggttgtctcagcaggggagmacatgcttcgtgtggaaatgaatatggcttacagtaggaaggtcaaatatgtttgcagccctgagataatgaagctcatcacaatgaacctgtggacattaatccatgatttcttattgtagagaatttcactgtatccccaaagcactctggctatggatcagaggttgtatgctttactactgtgaatctcccattgtaaaatgtccgtttattttggaggattttggtgagggttaccaaaagttttagttcttaaatctcccattttggtgtcttcttttcttctgcttttgttgcctataaatgtatagcacattgcaggatagtagactgaggtcccggtaagaatttcaggtttgatgtaactagtgaatcatgagtcaagatgccttgattagggaagatgatggcagctaacaaggatgaagtctgtaattatatcctatgatcagataatgcagaggggttcatatcttctgtgtacctgtgcgtggatgcagatggtgaaacagatagtgactgcagctggtactggagctgtaggagaaagttcttcattttctgagcatcccaggacaatctctgaattgcctgttggctttgcttttgatatgaagtgtgggtaatgtttcatgtggaaaccaggccatgacttgttgtggggaccatttataattgggatgaagcctgraaaatgagttggagtgaaggaatttgacagaaatgaaatgacttgaggatagagacaaaaatatcctcaatgtgatagttttgtctgttggtttgcatgtcattatttctccacttccctccacttgctttttctgcaataggcgcagtgcatgctatgaattaaaggaggaagaggaaagtaatgagaacaggcctgctttttttttcttctgaaacatccagactctgaaattattagctccatccaaaattacttatctctttatagcactgctgtacaaaatgtaggtgtttttccccctcaaattctgctgctttcccccttctttataggaacatctggtttctttcaatcttcatattcttagtgaaaataaaactgagtgaagctttgctaagctctcagaactcttgcaaacccttgactccatgtgtttgatgagcaggtcagccacctcccttacgtcatgcacagggctgcctggaaagctacagctcaccaaacaccaaagcccagatgtgcaatccagtccatcaatggtgactctgctgatcttattttgcttatcactgaccacaaagacataaaagaggaaacctaaatgcaactctaattaatatccatttattcagagagagagagagaccaggtctttactttctctttctgcccgtcttttcatctttctatatttctccctctctcatttttaggttcagcctttgtgaataattcattatatgtgtgggtttttcctaggattttcagaaaaggaaggttatttgtcttcctcttgggtaggattattaaggtctctcacagaggaccaacttcaggaatctactttttctctaagacctttgttttctgcagtgggactgtcacacaacagaaaggaagctggggagaaatcttgtaacctgctttttcttgtcatttttatgatgactgcctcctacccagccctgttacatttgagtgcccccaaaatatgcaactactagccttttctactcagagactgtggttaagtggaaggtacgtgtcactctgaatcctctcatcatcttgggttttcacactgataaatgctgaacgactaggctaaggaacagtcctctgtaaccatttcttttcaaattccagtgtgaatttttacaggaattacagggagcaggggtagttatggggaccaggcatggaaattagtgtctaacactccgccaccactaccaccaccacgatgtggcttctaaagcagtcccttccacagagggatagaaacatgaggggcttggatcaatgttacttttcccaagccttctaaacatgcacagagaggatgcacgtgtgggttcacccatcagtcatgtttccagcatcaatcttaattaaggacagaaggtatagcacaaagtttttagactcccccaacctcgtggtttcttagtgttaaggttattgcagagagatgtttatggtgtatctttgctcactgagcaccccaaatatgtttccttataaagcttgacgagccccagtgtcctcatctctggaaagcagggagcagctagaagatgtgttcttataaggtgaagatgggccagattaaggggaacagcaatgaatgactttaaaatgtgtcrgttatccaagagatcctccctgccacctcccagagcagtgggtacttcttaggagcttcctttattgtatcttgagctccaaatttgtaggactagatagttccacccttaatcctcttacttattaaaaaaaaaaaaaggagcctcaaatagacccatttgtaaagcagtagttaatcccagaagcaggtgggtggggcttgggaatgctatgcccagctaggctccagccacgctccagccacgtgaggcttcagagagaggccctgcctggcacctgtgccaagcatgttttttttttttttttttttgcctgtgggtggttgatttgaatcactgttgcaactctgcataatcttgaggctatatttttgtgtgtgtgctgcattttgtcttttgctgcatttttgctgcatttgggctgcatcggttctcttcatctctggagaatttggaaagcctccttcagatatatgcctgagctttccaaagacttgtgtcattaaaggggggtgtcatctttcttccctttgggggagggattaaaaaggatgtagctggatggtaggtagcaggctagaggggaaaggaagaagtgctctggtgtagatcatgggtggagccttgatgatactcagtctattatggcatcattgctgagatgcaggacatcgtgcgtggccttctggatccagagcggaggctctgaaaaccagcactaggaggaaaattaatactctcgagcctttctcagccttcagctttgctgtaggttggaagtttttcaaactttctgtgcctctttctcaatttccacaccattgtctcatgggactggtcagagccaaaaagcatgaaatggattttcaacagtcactcactaacgtcctggcaatttccagctgtgttctcctgggaactgttttgctgcttttctatcagcgaccattcctttcagcagatgatttccatcaacatcaaggctaattcctcatttagttcctttgtgttgatgtcagacataggcggtctgcccgtttcatctacactactggctgtcaacctgtgtctcagaatcacctggagggcttgttaaaatacagattactaccccccactcccagagtttctggttcagtaggtctgaagtagggctggagaatttttgttggtyacaatttcccaggtgatattcatgctgctggtcttggacatcatgctttgagaaccattgctgtacatggttttgttatctgcctggcaatgcctttctagaaggccagtcttacaaattgctgatgcatttcctcatcccaaatctctctcatttaccagctaaagccctgctgctaacaaaagcttatgctttgggtttggatagtgaggaggctttgagacttctctaacaaaatgctgatgaccttgagaccagggacatattaagcaaaatatatgtcattatcaactttgagttagtttatcttgttctttcaggacttatcactgagagcaggctcttctgagaagggacatgcacccatttaattccagcacctagcacatgctggcacatggtgagcattcagtaaacttttgttggatgatttatacccaaattggctactattgagttaacaagcatcaacaaagtgcctcatattgccctgaccaggacctgtaagaccaggtgtagccccagggaggggacaggaggttgccaggaggtggtgtgagggcagtggatggctgggaggggagtgaaggatcatcacatgggaattgggaggctgtaaaagacaagatttagctacttcataattttcctcaggattctttcagtttctgtattacttgatgcaggctttctcacggaaaacaaaacaaaacaaaacaaaacaaaaaccagggtatttgttatctggcattttgttacatggaactctttattaattggcatatagtataatgacaattgagatttgtaatggtgaccccctaggtaccacagaatgttggagtgctttctgaagagcattcattgtattatattcaacacagttccaatggtgtgtgcacttcattgtattttgagctttgtgtgatttataattcatattgattatataagtagctcattaccactttttttgttcaattaaccaaagtgttcttctccagctgtaccagatgacagaggaattggtatgttgttctagaaatcagaccttttagttctagaaatattataggagctggaggtgaatcctggtgcaattgtcatgtatcaggtgatatttagaacaaagtcattatttcaaaaatggactaatagctcagcaggctttagatttactgggcaagttccccagctggtaagctggtatcacatctaactgggtgtgtttgtttctgtaggctaacactgaaaatgaaccaccaagatttccaagagagctttcaataagcatctcagcaagaggttgtcagatgataccttccccaacctgactctgagttatccaacttttatgccttgggcttattttcctgctcttttttactcccacttccctccttcctgaaggtcaggagatgttgagctctaaaatgattctgttgtagggtgatggtctttaggttcttcagggtcagtttgaaactctatggaacttcagagtatgacctgaataaatgtctgagtagtgacctgagtaagtgtctagatgacctcagtaagtgtctagatggcatctagatgactctttttggagtgttgggaccattaagtccctctagtacagtgtttgttcatttgctttctatactgggatcacaaatcctactgacatctggttgatgctatagacctgtctctcctgaaaaatacacatacaattttgcattcaattttagaggtctatgaatcacaatttaaaaacatctatcatgttaaaaaattcccacaatttgggatgttgggatgctgggctatcaggagtagtgattctcaaccaaatatcaaagcctttatgagcaagtacgacaggaactttatatgaaggaactagagagatacggttgcactgggctgtcagccaggctgctatgaaagaacacaaacattctaaccaaagggcatgaattcaatacagaaactctttctacatcactgtgaaagacgactgtcaagctggaatacctccagtgacagggtgctcttctgttgttaaaaaacttaagatataggaagtggaaatattcctccttatagcttccatttgttctttcccttcctgttttctgttttgtaaaacaatatagactcagtctacttcctttcacttgacaatactatggcattgaacagcacagttggtggatttttggtgatgatagacatggctcttggcacatgtggcccttaaggacttgatatgtggctaatgcgactgagaactaaattttaaattttactgacttaattttagttaagtttaaatagccacatatggctagtggctactgtacaggatggcacargcagagggaatacatgatgagtcagaaagcttaagctcccctttggttctgtcatttgttagccttgtaactgggcagggtctccttggcttggtatgcagggcttctcatgagccactctgcacattgcgccagctttccttgaccactgtaatcactgtctctccagctgcttcagtggctgctgatscctgaaggcaccatcctcttccaggcctccgtgcctttgcacttgctgcttttccacctagaatgagtctggctttaagattgtactcagaggtcacttcctctgtgaagccttccttgatttctcttggccgaataagaccagcttcctcctttgggctctcatagggcactttatttattactttgttgtatcacataccacataattttagtattggtttaaaatccctgcaagggaggggggacgttatctaattaccagataataaggcaatgcttattaacatcagcatttaacacattagtttgaattaaaatactttttaaagtggtgtttttttttttttttaaagaagtggcattccgtttctgacttgagatagtcagctaaaatctctgaatctttttttttatatgaattgatgacagagttagttttctctcactctgttctcattcagtttaatttttgaatctagattcaggactctatgtttatatcaagtatattttatctccttgcttttgctccaatgtttatcctgcagagatccttttcaactgagaacaaagaactaacattcattgagcatctaccaaatttcaggctctacttcaaacaagtgtattatccacattttaaatatggggaagctgaagctaaagaagattaaatcacttgcccaaggtcaccacmggtgagcttgaacaagtggtccgaatccaaagtttaagtgatttctacaccgcactgtctatggactttgctgtttcatgagtgagctccccaccctaagtgctatgtcatctgcagatttataagcaaatacttaatgctttcatttgagtaattgataaaaaatatatttagaatcagggaccctctttctgcttatcatcagtgtattagtcagtgtgcgttgaccgttcagcttttctcaagtattctgaactgtgctttagcctactgacatttctgtattttgtctgtaaaaatattgtacgcgatattcttgtcacatgctttactgaaatcagtacacactttcatgactacttcatgtctattttaagcaggaggtagcatcttggtttctccaaagtccactttaggtatcattttcagagactcagacaatattttatttctttcttagacaataaaagtgttgtgtcctagatctcaggagttgaagggatattagatgtcatctagtccaatgcccagttgatgaaagcttcaccttagagttcaggatttaccagtctctgcatggaagctttagggtattagggggtcgttgttaaaaatgacctctggattcaaatctcagtatcacctctgtcactttatagctgtgtgcctcaggcaacctgcttacccttgcagtgccttggatttttcaaatgtaaaacagagatagtaatttgcttctggggtgtatcataggatttttgtgaaggtcagatgagataatacatgcaaagtgcttggaacaatgtttggcaaatagtaagctgtgaataaatcttggttattagtatatggttaatttcagatacataaacattaaacttctgcagctatgttttctctttccaacaatgctgtcctacttcctcctggctcttaccaagtttctaacctgagtgctgccagataatgtttacgtgaccttgcattggtttcatcacctccctgagcctcagtgtcttcagatgtgaggtggaggtcactttccctgctttgcctgccttataagactgttgtgaggttagcattggctaatgtgtatgaaagccctttgcaaacatattaggtattagtattagtgttaatgttgatagaatttataaatatataacacttattgaacatttactatgtgtcagaatactgtgctaagtgctgcccatgagttattgcattgattcttcatgacaatcctacagagataggcattcttgttttctgtctttcatagttagaaggattaaggtgtggagaggttaactcatttccctgagatcgcacagtaagagctggaggcctgratcagaactcgtgctcttaatcactgaagctaaatagtctttccataagactttttttcttccttctcaaagttattgggtttacacttttaaaaataaaatttaaaatatctacatcaaaacctgtttcctttatatgtttctaatgctgattttataccagtattgtacctaaggacayatttggatttacaatcagaaaaaatatcttcaggagcaataatgatgcagaattttcccagaaagcttttgataaaaacagataggatacttaaaatgatctataaccttaacagactcacttgattttgtctttgaacaaaaatggtagcaaaaaatttcagatggcttgatggatggcatgtagaaggatcccctttagatccttggcatctgggcagattttcttcctgggggttgccagcctcctggctaactacttcctatctgcttaggcttcttgggtatttagggcctctatgtttgttctatcagataagagagaaaagattggaattcattaactgtggaggaagcttctgaaagggttagggtgctgtggggggaaggggaaacctccattgcttgggactcttggaaatttgcctaatgagcttggtgaaggtcctctgctagggatattaggggcattttacctgtgggaaatgtttactggtgtggacgagaatggagaattaggatgcaccacttggcttcyggaaaccagacagagcactcaaaagaaattaaggagtgggcctaaaaagttaaaggaactgcctctcctttctgctaactttggattgtttttgcatggaaatttgtatttgtgaaataactgagccatatggatgcacaaggatgcatgtgttcttctagtctgttgatatgaggagcagttgaagggtgtgggcttgtctggaggtggggtgagtaggtggatgtggtaacatgaggagggagcaggtctgaggaatatgggcctatgtcaatccgaggatctgggcattttggcaagagcaccctcccttctcatagagaggtatttatttatttttgagatcaccatctgccccaccacctccccccacctgaagttctatggataaggatgttacatctctgggtaacctctttccctggcgatgattaaagagtaacaaatgcccactcagaaagactgtacaggctgagaaagactgagctcatttctgtcacaaacatcagtagacaggctcaggagagcaaagcaaaggaatagattctaggaaattagaacttctaacagctttctatacttccactgtgaaaaaggctgggtgcagaacaacctgcataatcatatgccttaccatttctctttttatcttaccttcrtgtctttttatcatataattttaccaccattctataaggacctccctccaggcctggagagctttctgttcctcaatatgcatccctgagaatggatggaggaaactaacctttaatgaatgcctattgtatgacaggcactctacagtgtgctctagaggagtgtatcatttaatccaaccccgggtgaagtggatattgttctcattttatagatgattagcttaaggtcacagatagatgtggtctgactggtgccactggctgctctctttccattgtttcatgctgccttgggttagaccagaagaccagcaggtactcttccctaacagagtatctttttaggatgacactgtgaactacttgcatgcatctgcagcatcactgggtatgaggctaactcatgaaggagtgaaggatcagtagatggaagaagagcaactatctctttcccatcattatggtcatcatgaaatggacctgagacatcctggcctgggtcactggaatgcgagcttgagtcggaatctgagatctttgctattttgtctttcccccgccaaaactccactgctgcagttcctttatctgtctgcagagcgcgtttggtttggaaatgccagttcccctttcaatattagcatggaaagtccattttcttttttccggttctcagagaagtctaccctcagtcctttctgttctggggtacccatagtgtgagtcatagtgtggaggtggcagctttcatgaccttctcttgaaattttacatactgaatgcagctttttaaggaaatgagggttgggttatagagagactgcagaaagactcttatatcctgataaagactatagaagaggcttatagtaggtttgtggaaaagggcagcttttccacaatggttcacttccaggccaccattgtgaagattctagcttttctttaactctgttagagaagctgctagcgaatccaactggtcatggagctcctatgcttgacaatttagaagtatttccatggactctagaccctttcaagatgtccctgggtgtgccaggatttccatttttgaatgctattgtgggatctcctcattagtaatttcaccaaaaatggcttctctcagttgtaatcatgtatgctctttctttctcctccatttcccttcccatcatgttcctcattagcataacagaatactagaatattagatttatagagaataaaaagaaacttgaatcaaactcacacttatccataagaaaactgaaggccatagaggttaaatgatttgcctcaataagtggcagagcagagcctagaacccagggccgcgaccaagtgccagcatccttttgtcacattttctcttctttcctctgtaccctttctgtgctcaaccatcttctctctagtcccttctttctcttctggggcttcctcatccttagcaagtatatgtttttggtgtttggggcataggaggctggatataaggatcatgactaataagaaaggacttacrtaagaaaaaataggaatggataagagaaagatattcatagaggtgaagccaaccagcagagatccagtgagaattggtaacagtgactcagaaaaatggttaatattcttctttcccaaatatgttgctggagaactttgtgaaatgataatataaaactcaataggcaatggacttctacccagtgtaaaaccaagagcagatctcagcagatgggagaatagatggatgcttaggcaagcactcatctcagaatggttgctgggctcttcagtagccctaagaaaggcaaactatccagactctgccctgagaggtagctctttgagaacaattgagtactcctgggaaggaggaagcagctcaaataaaaagatctttagatccctttcttttagaattctytattggagctaagagaccagggaattttatttgattattctgataatagttttcccaagcttttcagggtgtagggctgagagtacagagaggtttctagccctggttctagaaaaatctcattcctttcctggtctcagcatctacatctgtaaaatgagtgtgttggaatagttactaagactctaaggtgcctttcagttcccactgtagagactctgggattctagtttccatcattgttatttcagctgattggaggacacgattaactttcttggtctccagcattcgaagcctggctgcacattagaataagcctgggaacttctagaaatgctgatacctagactgcagccaagacaaattaaatccaaatttctggagataggacccctgtattcttaattttgaaaagctttccaggtgattctatggtccagccatggctgagatccactgatcttctagaccgaggggagccagttacctgacttccttctgtttcttttgagtgtactttgattacgtcttggctgctccctctcagttttcttgcaggctatggtgaaatagcaggagccgcctgggtgtcttgaaatttagcctgagagaatggggtgattaattcttatgtgtcactgcrttgacaaagccattcacctgtggctgcttccgacacacctccagctgcacaggtaacagccttctgtgatgagggggatggaccagacatcctgaatgcaggtctggctgaggaggccatttgaggctgaaggacagagtaaggctcacccaggaggcccttgagcaagtgactaagagttgttgaccttgcttcctacctggttggttcaccccttatgcatatgaaggttgatccagcatgactaccattgaatacagcagtcaccgccttaacatccttgacactcccctggggatgtggaactcacaataagtgctgtgctgaaactggcttgtcccagctcttgagtgtcctctctgtatgtctcttctagactccatgttcrgtgatatcaagatggtagcttgaaattggccatggagagagtatttataccccagaaatttgcaaatgctacacattggggcttttcccccgaagttaaacatctattagcacaacacttagttttctacttaacaaaatagtccattcacttgtggaacagtggaagttcttctctttattgctccagatctgtcttcggatgggtactctgcacattgggtcttagtctttgcctccataataacttagaaaacatctgagccccttattacaagctagcccttcagatatttgaaagcagctgtgatgtatttctcaagtcttccctttccaagctgagtatccctagttctttcaacattatctcacgtggtttgcaggctcagtaggtgtctttgaatgccagggcacagttgcagagttttcagaggaaaacaaacattctcccacaggtgatctatggactctttcacaaaaggcttttcatttttcttatgctgtctcagttccatgatgctggtgttgatatgaagtggggtgtagtcttgggtggggttgctgattgcacctcatagtcatcttccctgaaatgcacgttgctgccagaactcttgatgggctccaattcatcagagtgtcatcaaaacacaaattctcgtttctgaaacaggtaattttcccactgctgttttgttttcttccagaggcttttaatgctccccttttcttttttcccttttctgtagcgttcaatcatttgtctgctgttcaccaaaactgtgtgttgaatgacagcgttttgagtccaggatccagtcacacgcaaaacaaatgaatttgttaagacttatccagctgtctgtaactgcaaggggcatggcagtgggaggarggagggagacagtactgtcttattttctcagaaccagcacttcccatcctttgggaatcagggcccagatgagtctggaactgacctcagtgttggttcaccaaagtagcaatcatgtgcacttcctttcagccactttatccagagggcagggtcctgggagtcagatgggagttctttggtctaaagtaatgagaatttggacttgccttcacagccagcattaaatgggtaatgcttaggatcttttgctttgagtaactgagtccactgacctccatgagagagcagcaggattgtattggcaaacaaaaggccttttggggagttctctgcctctttgttatgttctcaatattgctttatttgtctttcattcattaggtttttaggagtaggtgtgatggcatttccatcttcttgacagcaggagtggggaagagagagagagagagggattaagaaggagagaggtgtgtgtctgttcaggactgcctgtcagatggtgaatttgaacagaggcagctgttgtcatggcgatggcaggttgcatcccaccaccatggaaaccaaagttaaaaaactgatgttaaggctggaagtcacatgatacatttttgttttgttttgttttaaaaaaagaaaaggggtttggttttttagtctttttttttaagatgaggttgggtggtgagaaaaattgcacaaggaaagcaatgagatgatgacatgggacagtatggagtaggcagagccttctttcatgtttttctgcttgttgacagtgcatgtctcctgccgtggttagagaggggatgggaggggtatgcagggtggacttccaggtttgcagccagagttgtacactgctaactgtcacatggagaaacacaggggtttagccctcttgccctttggaggtgatgtgtggttcaccttctgttgatcagcccagaacagacccaggaaacctaaaagtatggactacccaaataggaagatagtccatatattgataaatttggaaggttaacatttattttcagagaattgaaaagttcatctatagctcctcagaatctccaggaatagttctgtctgtttattcccttttctgggctggtctcttttgggctgccatgtcctgccagggcagccataggagtgagtgcaaagaagtccagaaggagccctgggccaagactccttgcaccatagcttatctcttaacctgggccctctcacctgggcagggtggagcggcttgctgagaggcattagaaagccctcttggctctccatctttttacctcatactgacttctactttatgccatgatctggagaaaatgtgaaacatccctccaggaagggagctggactggccagggctgtttttgcttgcttgttctttttttgttttgttttgttttttgagacagagtctcaccctgtcccccaggctggagtgcagtggtatgatctcggctcaccacaacctccatctcctgggttcaagctattctcctgcctcagcctcctaagtagctgggattacaggtgcccaccaccatgtctggctaatttttgtattaattgcagagacagtgtttcaccatgttggccaggctggtcttgaactcttgacctcaagtgattcactcgcctcggcctcccaaagtgctgggattgcaggcgtgagccactgtgcctggccaggccaggcctgtttgaacagggctggtttgaattttccttttgtgtagacaggttaggaagcagagatttctgtaagaatgtctgcttctaggaaggtgaggaagaccatgagggatgcagacacactgttgaagtgatggtcataactattgctatgtctgggttttaggcacaaggtcttatgtcttcggcattactcgtccctccaggacagatgtatctttctcagtcggctcagacgagggtcatatgatctcaccagcatgatctcactgcatttccatcagggtctgtgggaactggagccagacttctgtgatggttcaacccctcctgttcttagccctggcctggggtgtgattaatatcccttctaatcactgggagagattgcatcagagccatcagcttcataaatcctcctctggggactggtgtttggatgcgctttccatattctcaggaggttctgggccaaatgtctttgctcttttcctggaggcccattaccataattttcttttaaatcctttattggagttggtctcctctgtgtcagtccatggctacagccagccagcccactcctgagggctggaggctgtaaccaccaacagatgctttccccaaagtattgagccacagtagatgctgaaagattgagttagtaggatactgaaagtaactgtatttgtgcaacactttacagttttcagagggagttcagattccggtatcattttaggcttcagtccttttgtatttcttgtttggttctgtgggaatggatggtcataacccttcattgactcttgagtactgtgttgggacagcttttgcagtcggaggcctggctctggtttcctttaccaagctacattttytccattgcattccaggtcttgaagaagattctgaagttacacggaaggcttggatagctgtatttcattcctgttcatatgtaaaatgtctatttggtgtcatgctaatagggaatcacagactagttaaggctctttctctgttactgtctttgagtcaaagtccacttattaggatgatatttatgtgcacatgaagaagaggtggaaagacatgcatgaaggtgtccatgccatcctctgaggctgttacatctcttggatttagacatccaaaaacatgagactgaagggagaaaaggagayaggtcttcctgtagggtctggggtgaggggtggaaatgggtaaaggaggctgaggaatgcctcccctcagactgtggactcttctatacccccccaggagtttccaggaagtgcctgagtgcccaccgactgctccccacaaaagcatattctgcattaggctgaagttgggagagtgcacagcattctatctgcctgcctgtcagagcatggccttcttagtgttcggatgtcataggctctgggaggagacagctaagtacagaggtcttcaggatgagccccctggtggtgatagagatgcatgtttgcctggggacacccaatatttactgcctgaggcctaagtccttcccaagcatgtacctacagatctgtacctgagaggtgatgatgaggaggcttttcaggctcaggcagatgaagagctcagctccaggccaggcccccagggctccggtgacagcagaaccagcatcaccacccttgccccagctttctgtgcttcaagaaggaaatgaacaaatggcaggtgtgcaggccacgtcgtgctgctcaaattagccatgttgctaaggaaacaagtcaaccattcaaaggaaggagcattgrgtaaaggagataaatcaataagtgaacctatttttatcatttccctaatgattgtcttgaaactgctagactagaaagagagttggagcaacacaggtcctcattaatgggctcagagggaacgaggagtgaaggggtgtttgaggagattgccagtaaagtttatgaaatgaggcctctagtgagcagtgagctggtacaggagggaaggcaggaaggaagatgtcttttgcaagtttcaaagtggtttcatggtcatttcctcattttggccaggtcccttcattctcttgcatttaatcctctccgaagtctttttctgatttctctggccatygcrttcctcctcactctcaggttgggatgggtttttgtgttgatttgttcttttcaggatacatatagctttaattgattttgtagtgataaatgaacacatgctcatttgaacactcagaaaatggttagaggagtaaagaagaaagtgaaaataaccctgctaccgagagaagactcatcatccttccagyaagacagaattttttcttgttctctcccttctctttttttttgtttttgttttttttgagacggagtcttgctgtgttgcccaggctggaatgcagtcgcacgatctcagctcactgcaagctctgcctcccaggttcacgccattctcctgcctcagcctcctgagtagctgggactacaggtgcgtgccaccatgcctggctaacattttgtattttttttagtagagatggggtttcaccgtgttagccaggatgatcttgatctcctgacctcgtgatctgcccacctcggcttctgaaagtgctgggattacaggcgtgagccaccgcacctggccttctctttttttttttaaacatgaaagggatcttccatgtatgctggtttattttcttttttaaataggtcatgtgtgtctacagtggacagtataaaaagttcaaatgggtatacagtgtggagagtgtgggtaccttttgtaaggatacctctggctctagtttccctgtatgattcatttatcaattgaatattaatttattaataaaataacagttaccggggccccactgtgtgccaagtacagtggtgagtgaggcaggcaaggtcctgccctggggctcccagtccttactgccccatcatctccatttgttcaagatttcaaaacacaagcaatctggataccagggatagatattcttccctaaaatatgcacagtgtcaggcacagagtgtaatgagtgtcactgaattctagaacagagagtcagagtcctggacagacttccatcttgtccctgattgtggttgccatgaagggtgatggtctttgaggccgtggcgactcggagctccctttgacctttctaagtcatgtctttgtccagtctgccaggttgagggkcactagcttgactggtgggtgggtgttatttgccgtctaggctcttcactttggggatgtagcagagccattgctttggggtgtgaagttttgctgtcgggaagaaatgggagtggtgcctcggaggcagcctgcaagggtgggagtgagcaggagccatggctcaggccagagtgggtgagcaaagccctgtctttgtaatggctccttagtgaatgcctcatgttcattcttacctgcattgaacattgactaagctcctactatataccatgggctctgctaagcactgccagtagagacatgagcaaaactcctgctttcaagatatagtttcttgatttaaataggagaagaaataatacagtcacacaattcaaagagctgtggggcacggggagaaactttcactgacaaggtggcatttcagcttggtcttgatgtatgactggaaaggagaagaaacgccattgcatgtggtggcagaagcacctagatgtaaatgcctcttttttgtgctttcttcagaaagggaagtggaaaagagtttaaagaacagggctgtaagggagagtggctggggcctaggcagacttggatggtctcttctgctcacctcccctgagatttccctgccactatccattctttcacctagcccacagttacacagaatctccacattctcactgcaggttcttcattaccgcagccatgaattcatcctgaggtctagatgccctataaggctgaaagggacatccctctcaagggcatatatatctgaacaattttaaaaatgtaaagcaaaaaaaaaaatatttttaagccagaagattgctgctgtgaatgggcctcacatcagatagtgggaagaggatttggctggagaggaagtgagaatagggtcttcttagaacctgtgaattaccaaactcccacctttagattctagactttagggccttgggtagcaccagccatcaagacctcatgaattctcagccacccagatacctggccagtcactgggagtttgactcatcagcayctgggccaagagccattccgctgcctggagcatcttccggtggtgttggctacaccttcctgagctagcctgtgtccccacaaacctcacatatctgcccttggacattctggactagttgagcttaaaggtccttatagggagcaatatacttgggttaactggctaggaaaatgcaggtatgggtgtggaagcagggagctggggcagtggaggaactgccatggtccaaggggatattgtgagtggagagtcaggggcagtggaggagctgccatggtccaagtgggtattgtgagtggggaggcctcggaggcacatggctgccaggacctgtcttgcctgcaggctcagcactgagaacccatctactttgaagcctgtgcttatcactttcaggttttcaggggaagaagattcaaccccccaaaacaatcatagaccccacatagacccattagaatgcgagaggtctgcagcttgaacgagaaagtacttgtgcccagtcctaccttccagggcaggcactgggcttcttggatctgctgagcaggtgtctgaawttgcatgagacgtttccagctgtgaggagtgaccaggtgagccccacactgttgtgaacacttttgttaggaaccaggacaggggatgacatggaagaggccctggtttcactccagtcagatccatcatccctcctgccccagctcttggggactggcagacagacccccactttgtgtcaggctgcccaggtatgttcctgggaacaccgttcaaaagagatgctctgaaaaaaagagttacaaggtgaagcaagtttgggaaatgttgtgtgctgtcccaaacgccttgtgtgtgtgtgtgtgtgtgtgtgtgtgatggggtgtgtgcccactgtatgcaaaagtattaaaggccccaagaagtcctgctggggagaaacctgcttaactttgcccaacccaggctttctctcattggttgattgcaagttcctatagcaccagtatttcatggcctgcatcttaggaataccactctcaacgctctcaacttctgttgtcttttgtcagtgacttgtatgcgtgttgycagttctctttctggatccatcgcccaagcatgttttcaggaaagggtatggattccttggccaccattgctgctgggttcccatctttaatttgcaggatgagtctgggattccgggtgcctatgccaggcccagggcaacctaggctgttcagaaggcttatgggacactgggtccttgtgtggttcctggttgctctgcattttttcagaggtctgggttacagccatgatgggaggggaggagcactcctcctgcgatcagtgggcatgggtggcccttggcaggctgtatgttgggggccagtccttagaaggtggtcatgctagctgggtgggcgtctgtggtgtgtgtctgctggcatgtttggctctcaggggcttcacacccggagtgtttgaaggaagaggaatgcccatgggtgctgagggactttccatgtggggaggctcccctctgagtgggagggtttaagcaggcacagtggggtgtggaggcaatggacaggctctgaagtcccctgaggccaggtctgtttttagttccggtggctgaacctcagggcagcagaggcccgtggaatggtctctggggtctgtgtgctgtgtgagtgctagaggtgcgtgggaaggaacgatggtggtcagctgctggcgagtgagtgtgactctccagtgtgactcagagatgcatggtggtgggggaggagaaggcactgccaaatgaggattaagagaaggactaggggctcacacacagccagcatctcagccctgcagcccctgatgccagcaccaagaccagagcaactggtgagcagctcacatctcattgcacacactgccttgccctccccagagatgccctgggtgctaacttaacattgtgttattgccacaggtagcctggcaggatgggggcattgcagggatagctgtgatttgccctcctgaactccacgacagggttccaggccctgcaccctacacagcctgtctgggtatgtggggagataagaacagtccctttccttccctccactttgccagatctacggctcctctcttctgcctggattccagaatcttctggagcacaggttgctcagcaagaccagctgcagtagctaacttgtgtttgtcgtaacagtaatcacagaatgaaattccaacatgcagaatgacagcactgggagctggtgattccctctttctcttctgagagtccttcccacctccctcggagcatgtggcaaaaccttcctgcaggggtcatagtcctgtttttgaaaaggcacagggagcacctcacctgttttcaaaaacatctaacagaaaaaagcctgcattcattcattgtagtgtggttcttacaggactggactttgctgtccaggattccagactcgtgatcagtctctgtttcatatagatgcagacacttagaagaaaataaggtgggacaaagcaagcctctccttcccccagaagtacattgctgagtggaattttaaaatagaaggaagctcacatggagagaattgtttattttccagatgttcttctgttactcagtggtgcagagattctagaagagaggactccagttgtgagcccaggagagcaatggattgcagcagctggatctgtgcacaagcatcgttacccagttcagtggtttgaagactggggagaacaaggggtctgcgatggcattaattatgtttcttcctcctttcttcccccttctattttcagccttggttattggatttgttattgaattcactcagtagctggagtgtctgccatatgcccaactatattatgtattggctatatacgttccttttttggagaagatgctttgtgttcagagaccaggcacaaatgtttttggtttcacaaaaccaaaagtggatgctaaggaccatccactgtcttgcctgcctgcctrtttacaaataaaaatcatgcaaactgcacagacacaatgcgggttgatagagttgtgtgtttatgggcacggccatcttggaggctgtgtccctctctggtgaatttgttccttaactccgctttcccacgccatttgagtacatgatcctggccaccatcattgccaactgcatcgtcctggccctggagcagcatcttcctgaggatgacaagacccccatgtcccgaagactggtatgtgattcccctccttctcccctttgccccttttgtctttcttggtttcttctcctctgctttatcactctcccattcccttcctgcctgtgagttctgggaggagtttgctctttgctgggggacaagctaatgacagaccccatggggattcacacggaaaagaagagattacaaacactgtgtctgtgctgcgtggcagccagggaagaagraagggcaggcacaggcccattttcttccctcctctttcctaagggacttctgatacgagaggaagaggtggggagtagaggggagaggatgaaggatgctcagtgcttgtgtgtatttgtggttatgaacttcccaatgcttacgtccttattctccttaaagaaatgagtcacacatctaacgtattccccctaaaaagagcagacaaactgcctaaaattcacgtgtgtacttgagatgatgaccttcaagcttctaacttatgtgaagagcagcaaactccttcagggcaaagccagggccatcagggaccttcctgggaaggaagtctagcccctgggtgtgaccctcacattgtccatttctacagctggctcccctgggtctcccttgccctgtgcactcctgagtcacagacagcctgcaagggtcccttagcacccttgcttcccacctacacatgggcaggcccagcacagacatcyaggaagggccaggctgtgcttttgcctgtgtctcataaagcacagtcctcttctcactggtgcttctgctyctcatccccacaggagaagacagaaccttatttcattgggatcttttgctttgaagctgggatcaaaattgtggccctggggttcatcttccataagggctcttacctccgcaatggctggaatgtcatggacttcatcgtsgtcctcagtgggtaagtccattttctctctctgtctgtgtgtgtgtatgaagggggttggtatcatgaggtggctgggggcagggaacctggggtggaaagacagcaatctgtagagtaggggcagaagaaaaagttcaaggctaagattccccagggtgctggaccataggtcagccacctcaagaggaggatgagtactgtgtggagatgcgtgtggtgttaggcagaggccatgggactctcagccaggtctggaagctgccacttctggttttccattctgtgcttggctcagtggctaaacacccacttctctggggagggtgacatttcccaatgagccttttcaccaaagcaagcagcttacccccgcctgggaggcacctccaagacgggccaaaagatgtagtcaaatgcagcttcttttgggcgttggagaagacctcagccatattttctgaactgatcattgagacttgtgttctgacaacagaagtttttatcatttgcagatttgttaatagtataaaatcgaatcatattaaaatgttggataaatcattctgtggaaattaatatagccatacgacattggggctgacccagtgtcacagcagcatatatgatggcagtacatttagttaaatatttgataaatcattcttttggaartgaatatagtatgaggaagctgggttgacccagtgcccttggcagcaaatgtgttggccttgggaatggtgtgacgggcaggccttcctgggcttttgtggcttcctattggtctttgtgtcaggtggctcttggtacctgcaaagctgggcactgaggagtggtcctgtgtggatgtggcagcaagtgatgtggtctggaaattcccttacccaactgcttggcagacagggttcaaacccatgaagaaaagaagagagtgacttagaatggcagggaaggcgaaatattagctactactgtgattgaccaacaggaaaggagagaaaagaggaattgttttccagggaggagtcagaggaggggtgaaggtagataaagtcttagaaggaagggtaagggcttgggaatgattgcatctatttgttgtcatgtggaatagacaaaatactcttattttttaatctttacaccattgggattacatgaaagagaaaacactgaagatgtaatggactggaatatgtaaatggaagcacgtaagcagccagcccctcaatatgggaaatggataaatagactgggatgactattcatgtttaaaaatatctgttgccttacaaaaggattttctggaggttagttttctaaaagaaaattctactacattttaaatatgaattagtatatgaagatatagtttttacatagtattacagaastatattgggtaatgttgcaaatgtccctaaaataaataatatgtgctgtattagaagaggcctgtwtgagaatctgaatcatttagaaatgttatgattctatctagaagaaaagtgttgtataagtcactacagaagaacaacaaaaaaagaaaagtattgtratgtgtatataataagtttgtgtaaattcttggtcctgctcagctctatatgtggcagaatccatttgaaatttcttgtctagtccatttatttttgttttaaatgattatatgttcattaaagaaatatggaaaatacagaaaagtcaaaagaagaaaaaaaaattcactgattcagaaaaattcctgattgttttgtggtatttccttccaggccttcgatgctaagcaagctgtcttttaaatgcttgtaattttgctgctttcttcccaatatagtatgagcatattacatgttattgcatattttggtaaaaatctgtaatgactgatcagcagtttgttaagtagatgtacacatcttgcttctcatttttgcagttacttgacacttggattctttctgttttttggctctgataaataattattaaagatgctccaacgtacgtcttttggatatcacattttatgagacattttacaaggttgaagaagtacttctggaggagtatacggctgttctggtgtggggtctgggaactaatggctgagaggaggtrgagaaactggtctgtttgactgcatgagagaagacttccagtagatgttaatctctctgcaaataagggttgctacatggttgttgaagaagcagattcatagggacccatagggttcttttgtcagcgaagccaagaagggcccctgggtccttgcctgcatgtccagggggtgttcaagagtcagtgcaggtgctgagcttggctgagtcagttgtcctctctgtgctctctttcccatccctcacatcttcccttcttagtggcwcttcagatgtccctggctttgtgaattgccttcacaggcccctgatttccatatgaactcacaggactttgctcctgctcctcctccagacctgctgcttagccctcttctcagcatggaccgttccctttctcctcaattcatgggtgaatgtgctccaggcaaagagcttggtcctcttgagatccctgctgaggggctgagggttgcggttctatcccacaggaatgcatgatcatatttagtcttacagtcacatgatgctctcatctaccacattgtgtggctctaagatgcacgtttttcatgctggaacattgctgaaatcagcctgtgtcttacaataatggcatgatatagtttaattgacagcatgtttttctttcttagtgctacataaaattacggggcatcttacaattgttggggttgtagattcaatgacatgtgataccaaccagggaggcaggcaaagtggactttagagatgagtcatctggtactcaaagagggtaagttattcacccaagatcacacctgcctcttaatggcagatgcaggagtcagaattgtgccttttgatccagggctggtgttttgacccctgccctgtgcagcctccttaccaggccacctggtgtccccctttgtcttcctgacacctgcacccacagcagtccctgctgacagctcttccttcccacctcatctccaggtgtcacctcccattttcccctctgcacaggaggaatgacaggtrctggagcatgacacagtgcctcagggctgaggctgcacaacttctcagctctcggtgctgacaggagggaagtgggtgctgaggtgtcagtcagctggctcagtgtaagacctgctcttattgatctttgctgagagatgactagttgaggggcctgggctaccacattctgcctgtgacctctgacctcctaaactttagtgttctttggcctataagttgagggtgtgcatggtttagaaagcgcatttatgtacattgcttcatcttgtcctcawaatgccatagaaaasaccttgctagcctcattttacagatgaagaaaccgaggatcagagagggcacatgaattgctagcaggcactagatccaggacttgagaccacatctcctggctccaagttccttctttcactgacttttccccatactggcagttacttcacaaccccaagggccccatggttctaaggctctgtggttgcaggttcctttagtccccgtgaggcagtgtgggatgagctcagggaggtatgatcaggcaaatgttcactctcaaaggtggggcttcacatgtgagttgaaggggacaggggcccaatgtgtccatcctgagacttctctctgtgggcttgggatgagactccctgctctgtggtaaagaaggcatgtcactttaactgtcagcatagcatggtttgatgtgtagagagtggatcagagttccagctgatttcttccttaaatggcttgtttkttcactcattcactcaccaattcattaattcagtgaaactagtattgtgttggtgaaggcagaaggcaatgctgggaccgagaaatgtggacgttattatattttcccacctgctaaaagacagtggaatttgccattcttttaacacattcttatcttacagaacttgggatctctcttgcattgggaacaactcaggcaatttttaaacacttgtcaggccacctggagaattccaaattagttgaagtcactattacacattagtcaagagtgagttataaaaatatagtacctggagcagatggacagatgagatgggaggatgagagtcaagggtactcctaaatcatgggtaacaacagggaaatgaaggcgaggactgtgtcttagatgcccactcatctctatatgcccagtgcctggcatatagttggtactcagtaaatgctgattgaattgaattgcttgcctatccccagattctcttgtctataggatacaaaaatgagtgctgggggaaggctggggctggggtaaagagggattgtctgttcccagccttcccccttggcctggctgagccaggcagtgtctatgtctctctcatctctatctacctctgccaggctgctcatattctggtcattctattaggaaaatgaaagctgggagctcaatttctaggccattaagcaatattgggcttccagtcacctgtggttatttaccaggttgtcagtgttatctcctgagaattgcttcctgggtgataagggcagagtcagcactgcatattgaagacctaacctcattgaagtggctgtggatggggtgggggttggaggggtggataaggagaaagcaggggtatcacatcacctagcgtttaccatataataaaaatggtcatttattgaaccatgtgccaaagaccacacacacacacacacacacacacacacacacacacacaatttctaatcctaaaaatgtaccaggagttgagaatcattaggcttgactattacccagtcccattttacagatgaagaagccaaggcacagacaatttaacttgtccaaatccaaatggttggtataaggtaaagtcagaatttgaacccaggccagtttgcctttagcacctgggcaccttccctaggccaagtgatgtcactgcctcagactcagcgacagcaccagctgttcctgtgctgctggagcaatttagtctcctttccctatttcccttgtgtctctttgggttcaggccaaatggagaaaagtgtgttatccctttccatctaggaagtctttgttttccattgtatgttaaagtattggtgacattacagagctagtcttgagtgttggtaatattgtctattttcctaagaaaacccccaaatcagctcaaaatatgctctttcctgagttttgtcagccttgcgtgggaggtgacctgcgttggctcttccctttactgcggagcacatggtgtagactctggggaggggcaggtgtgtctgtgcctggctcttcctccttcctctgccaaggtcatcaccccagggcctaggaggcccctcaagagctattgctgaatacccactgtgtgccaggtactgtgtttggtgtgggtggaatggggcctagtgtcttccatggtggtgggggctggagccacgcaacatgagaacgtgaaagggtgtccagcctggccctggggcactggggaaagcttcttgaaagaagtcacatttaaacaagtggaaaggatggacagatggaacttagctgggcagggaaggagaagagcccttctgggagaaagaatgctatgtacaaatgccctgtgggggtggcacatggagagaggcacacagacagaccacaggacacttctggaagcctggcaggtggcatggggagagacctgcagaggtcagcaggggccagtctaggccattctgagtagtctgtactttaaccagagggcagtggggagccacggaaggctttgagcagggggttcactatttcactgtttcactctgagtctgctctggatgtggcacaactcttttttcttttttaccctggaatcaactctgaggaaagccatggaaaaaagttggagccatctccacatccttagctgcagtttgggagaatgtgcagagccaagcagaaagaggggaggcagaggaaaagggagcaggggagaggagagccagggagtgctgcagtaaagctgggagctgccgtcctcatccccagcttctcgccagtggcacatgcagaacgatttagcctgaagcctgttggtaggaggatgctatctagagctaaatatatattgataggtatttttagagggttttctgtaaagaggctgccctaatacaagagtttcctgagcagctaaagatcgaggaaagcagagttttcctcagcactgtctctctgaggctgagaatgtgggggaagagttgtgaatgcagtcctcaggcccccagcccaatttgaatccctgtggtaatagtatgatatcagtgggtatttatatagcatcaccaggccagtgagcctggcgggacctcagagacctgtcttttacttgtccttactgttctgggcaggtgaaggatgcagatggggagcaagggcagaatgggtagagggaggagacatgagaacttgttatttaggagatggggaaaccgaggctgagtggagcaaggcaagggactcagagatacttagctgagctgctagatgaacagatatttatttagtgccttaatgctaggcactaaacctggcatcagcattattaatgctgatgttggggaggtctgcaagcctgtaagccttaccacttttcagttcttcctctcagcatcgttgctggctgctcctctgacagatctccacctcctccctggctttttgtgcatttctagctccacactggggagcacagctgccacttgcagcatctccttttatcagaacattatttctgttccaattgcatttccccccagatgggcaaatgatggaaaagataaggttagaatataggatttcgattccagggagaggtgggcaaaagacaaaatgtgaagcttaaaggtctcttcttagctctgtgctgctgataaatccagttacttcagggagactcctagtgagagtgccagttagtagttgatgggcagctgagttgggattgtgccttgggtgggagggaattttttctcatgtatgcactctgtcttttttctatattgagatgcaccattggttcactcaacagatatatattgaatatacactgtgttccagatgtaagacattggtgttgggatggtttctgtttcctgaaaggcttcttcttgccacccccacccattgacagaagctccatatggacagaactgagtggggcctgaattggctttgatatcaccaaagaggaggaaaagccagagggagtgaagaaagcttcgaaatccctgggtggtttggtttgggactttatttgtctcctggcattgcattcactcagggtgatacagggaaagamattatggcaaggtgctttctaagtcagaccgttctcctgggcctggagctctcatttgaaggcagttaaackcgtgcattcttgtgcttgtgcatgagtgtatgtggaagagggaggtggggtgaaaatycccaggtatgttttcaaagcagaggtggatatggcataaatgcgaactctatagatttacaagaattgagaattaaaggaactgtttacatttccattctgtggttgaaatatgtctcctcctttgggtagagatttgtgcacttgtgtctatgttgtaaatgtagtccacagttaagtataaatgtgttggtgtgaaatgtgaaaatgcagcagcactatttaatgtatgtgtcactgaagtcaggaaatagcagatataatgagtgcagagtggttaccaaagggaaggggcaaggtggggcagagccgatgttgagaggaaaatgagggcatgctggtttaagaaagaacgtatgaagacaaggtaaggctaaggttactaaagctcaatcactgaattttagatctaggagaataataaatttgcctaactttcccttacttattatttttttcacagaagagaagactaaagtgcatgttgctaagtaacttgtccagggtcttttagatggggtgtggtgagctggggcttggatcctgtgtaattccaaatctaggactctgttgcagcgatgccttactacccctggcgatgagaatctgctgcttcttggttgtatttaggccatgaagctggaggtattaagaaataagattttctgttatttggctggaatatacatgtgcaacttacatggaaacagagtttaatctcatggactgaatgacctggcggctctgggttctggtcctgatcctgacatacattctctctgtcatactggtgatgatgtaacccatctcagcttggctttcctttatgaaacttcatttatgaagtgaaggtaaaacctgctgtagctacctccaccaggtttcatgacaagcaaakaggatagtgatgatgttgataatgacagctcccatttaaccaggagctcatgtcttattttaaatgcagaaggcttcatattctatattggcacttgcacatattattttaaatatagaaatgtaaggcaatagtgatattatctycattttacrgatgaggaaaccaaaacttaaagaggcaaagtcacttgctcaaggtcaaatagttactaaggggagagattggccctttaattctattatcaacaattctaaagcccttgctatatctagtgtacagcacagcctccactgccaaagtgttttgcaaaacaataaagcaaaataccaaatcagtgaacaataataccttccctccaggacagtgatattataaagataaatgttaaaatacacataaagcaccatgagtgccttgaaaaaaaccagcatataaaaattgaaagtactcaaaatactatggttctgtagacctcattaagaatggtcatttatctctataaaacttgcaaccacagaaacaaatttcactgaaacctattgcaaattttaaaactatggtaaatttaaaattttccattagttataattttgcctcaagagagaagtttactacatatcgcacataggatrtatcttatttcctatcagcagcatatctaattttatcaaaattagtcaaatcctgctacagtcattacccataagaacaacaaagaagttccaagagtaaaagttgaaacaaaggcctttattttaaatttttctaacaaggaaaatgttacattttctagatttccatttttttggtcttccctttctttgtcttctatcctccccacttctcayaaaacatacacaggccagaggggtcagcccctgtccgcccacatctggatgtgacccaggaaggctgacaatgccctctctcctccaggaagaatgtccaggcagagcccttgcacaaaggaggggctgaaaagaagcctgaggtctgacttcttccctcttgtctttcatttccttccttcttgactgccactcttctgtcagttgcctggaccttggtgacagaacatttaggaagggggatcagggccatggcttttctccctggcctccagcactggaacagtgactaggaggcagagtgacaagggtggctgcttcacatgtcagatgcattggaaacaatttacatcactgtgggggtccctgcatctcacctcctctccaccagccctctggggcccagctggccttggagagtccttacctagtccaggttggcatgactagccatgggagagctcaatctgaaatggaactgaaactgacctggtttggggtatctttgctgttgaatcttagtcaaaactctgggtgagggagagaaaaccagaaagaagcccactcagggctaagcatccctaatacccatatatgagctctgaactatggtgtgggggaaaatggacagagtcaggagaagacaggagggaaggaagtatagaggcagccggtattagttgagcacatcctgtgttcaaacattgtgctgactgctagggacgcagcactggatggagatatagcctctattcataccttgctgtccagcagagaagacagatatttactttaatttaatagtgtataacatgctgcataggagaagacttagggtgctaggataacttttcactgggaccctaacctaacttgagacctgaagactgagttatacttagctaggatgagacgagaagagggaaggggacaggatgaggagagttccaggcagagggtaggacagttgtgcagggctagaggtgggggaggccatggcaggtgtgagaaacaaaaagaaggctggaggggaccacagtgattgtaatctaagaggggttggaaagtaggcagggaccacatcattcacatcattcagggcctcgttggcatgtccaggcatgttcagtgggaggccattgaatggtttgaaacaggaaagtgaacagatttgcaggagaggcacgatgtttgcagagaagaagatagaacaagttgcccaaatgactccatgtctcctcagaattagggaaataggattaaagtcctcagtgtccctttcttccttcttgccccctccttccaacatcagccctcaactataattttgtttaacctattggagctgtaccaaaacccagtctacagaccttataatctagctgagcacatgttaaagatttgttaacctgcccagagtagagacatagtccctggccctctgagattatactctgagcatctcctactgattcaaataatgggtaagaattgatgagtgtgtgggcttttattttttatattcagcacagaaattattttaaaaatgctttgctgagaacattgctatatgattattatgatttttatttttctgatagaacaatggtcaaaagatcaagccaacccacatgcttgtttatgggatgtttctcttttccctgttcccaaagcccatgacacatcatgatgctgaatctggatcctaactgaactctggttaataaccactgtaaatataacattttgtgatttaggggcccttacatccttccagtggggagctcaaagtgctctgtgagttacattctacccactcatttggaagagggaaatagagaatcccagttccctttccaagtaagtgtcgtattctctgttctggagacaggtcacccagatggatccttcacatatggactctggtgatagagacgggaagggagtaaatgctcaccccggtcttttctcctgcccacttccatcccacatcccctcttcagatgagtgcagccagctctttaacgtgttagcttcttcctccctgctcttctgttgtccttttcttagtctccctaatccttccctgttttcattttacattctgttctgaaatacaagacttggggagtttgaggtagatgccacagagggtagtacgtggtgttgtggttgtggtgtgtatgagagactcattctgaccaagaccttcttagaactttgtctattagactctgacctccagtccttcttctccaataagcaaattcaagtttggggtgggatctccctactgggaatctgatcaggtcaaagtttgactagctagtactgcaaataaaggaggaggaacttccaatgatttccactccccccagctgtgactggtctgaactctaagcaacaagaagtcacctacaagcactggctgtttcctgaataaagtttccctcaaatatgtaacatagtatattttgtagtgtgtggatgctgttgtgatttataaaatataaatacatctaaaagtattgttgaatgagtagtattgttttcttttttaatttattcaatatagcatagtgattaagaatttgggcttcatagacaagcaaacctgaattcatatctttgctctactgttttctagtactgtggttgtgggcaagtgacccagcttctgttaagtctcaatgtctccatctgcatagaaaaaggaatggctctgggtaataacaattatttaaccatgttgttaaggggctatagtaattgaaataactcctccaagggatggggttggtcttgaatttgtgacattaaaaagagagcctcacacttgaaagaatgagaattgctagttcagtgtaactaacccattgatatgaaagaaggagatgaggcccagaactgcaatgtatgccccattttgcctgtggctaaagcctgattttagtcaagctggtcttcagtcttgtgtagaggtgatggggaaagtagaagtagaagttagatacaatgcttcactcgtgaacagaacagtctaattggagttcacgagatatatggcccgtgtttgatttttggtatttggtagtggaggtctgggagttgggagcaagcagctgtcatccttttgggaagccatgctgtccccagcaggtgacaccccaagtctctttgccagtgaggccccaccaccccacactagtatgagttaggttgctcatgcagagccatttctcaggcattattcctaactcttttccttttcataaagtgagagggcttatgctcatccctcaaccagactatgaaagagacactcacattcccaagtggtggttttatttttttatattttatgtttgtatgggaaattgtggataaagtgaaataattataaataaatggtatgtttccttttttaaaaaagagcaatctaattggaatagaatgtatgtgtggtcctaaggcagctgggaacaatgtgacccgtacagagcttgttccaggttggctggtccaggctataggagtctcatttttaaaatctaaaatacctctcttgcaagatttatgtactagattaagcagggctagatgctctaacaaataaccccccaaatttcaatgggttaacatagtaggttctctcttgctccttgaacaggccagtgtgtcctgaacagtgctcctggcttccctccacttggtgaggtagagacccaggctccttctatctggtagcyctgctgtcctctatgatctcgtggtttatgtcccttcaagagaagtggaaagagagagtaagaataaggcatactccttaaatgtattggtatagaactgatacacattacttctagtcacatcccattgacaaggaacagccatgtggctcagcctagttgcaggtgagactgggagatytaatccctaattgggcagctgccttctagcaacaaccttgccctgtgggaaggagagcatcaattttggaggacagtaatgatctcttcattrtctatgtgagtataaattgtcagatgcataggagatatataataaatgttttcttctaattattagtaacatccattgagtcaagaaatatttgctatgtgtgtacaaaacattttgctaagtattgaggctagaaagataaataataagatacctgcccccaaggaactttaagtctgatgtgtagatagtatatataggtagatgattttcatttgagcttgacaacatttgatcagaagaaaaaactgggaataaatgtgctctactctgtgcaatcagctttctatctgtccatctatcctcctttcattgartgggtcccatgtgtaaggcctagcggtgagcagtaggagggacagcagtagagttaaatagggaagagatggaagatcaytgggaatgtggtttcactttgccctaatgcagcagctgttgacacactacatgctggtgtaactagccattgaactgttgttgccacctstcttgatcaagctttgaagataagcatgagaaacaattagtgtatttcatattttttttatttttgttgtcatgcttatttttgtcctcttcaagatagcaaagcctaggggtagtcagccagctgaggctatttataaaatgtccatgttggcctggatatcactactggttaacatttgtcaaactctaaactctgtagtctagtaaarcagaggatcaggagccagtttcagagggaaaaccaacctttccatttactaatttcttttctatccttagcctgcacaaagaagrttgagaagtcagaattttagttatgaactgtgtrcaactacaacaaatagagtcagtagtaaataaatggttgtcacgagtctttggagaaggatttattattgtggccatagattggagtggtccttgaggatgttaattatgttgctgcttgttgcartttatgacatggcttctatgtggggtaattggatctaggggagctatccttttccatggaaaaaggccagtttggtctcaggtttatagccctaaggaaaggagtttcagaaagcagttgcccaaatttttcagcctccttgatatttccagtgcacaattctggaaaagggctccttaattcagaaattggcctttgttgcagggatgctaggtcaggaggcagggaggggaagaatggaaaggagagcagagattacctagttattcaggactgtggacctaattaatagctggtgttcagtgctaatcactgcattaaacatttcaaaggatttttaaaaaattcttggcaacatccctgtgaggtaggtactattataatcactactagatgaggaaaccagggcttaggtggttcagtaattcccccatatcatgctgctaatagttagttggtggggtcaggattccaatgaggaagcctgactccagagcttaggtttctgacygtgatgctacactgccttcctaatttatgtatctagtggctgcatggtctgaattttttttttttttttactcctgatgcatcttaattaacaaaagtgaaagggtgtatctgttggtctggatgtcaaaatccatccaagggaatataaaactcactacttggttttagttactggaaaaatggcttctattgaagggaattaagagaacaatagattattggtttttctatatcattttgatcttgaaatcaatttagaaatattgtccatttagcctgttaacaataggttagagttataayacaggacagcctggcaagatgcaaggaacaaaggctctggcatgacatagttctgtatttgaagtctgcttctggctttgtgacactgagcaagttatttaacctctcatcctcaatttccttactgggaaatgaaggatttagggtatttctgagtattttatgagactaaactggtatgatatatgttgagcatttgaaacagtgctctgcacatagtagattttcaacaatagtacctgctactattttatagtttattgatgaggaaagggaagcatataatgaacaaayatattctctgggttactctagcccccacaaaaaacttgccctagctgggatgaagttgttgtccttgtattttcaatctgttgctacttgtgctggattatgctagcttctagaacatactaaatcttgagttaatttcttagtccatttggacagctatatcaaaagtatcatagaccaggtggcttataaacaacagaaatttatttctcaacattctggagactgggaagtccatgatcaaagcagattcagtgcctggcaaaggcccctttcctggytgctggacagctgtctgtgtcctcacatggtagaaggggtgagggagctctctggtgtctcttttrtaaggacactaatcccatataagagcagagtcctcatgacctaataccttctaaaggctgaacctccaaatatcacattggggattaggtttcaacatatggattttggggatacacaaacattcagtctattacagtgggctttagagtcctggaatcacttcatctttgatctgtatttatagcttaatttatcttgatacaggtttcaaaatataattgaatagctacactcacttgataatattaaagtagggctatatctttaaggcacagtatcagctggctgtgaacaaaatgctggctgatatatatggtcttctttttctctctgtattcttttttgaattctcattccagttctggttttaaatgtaccttcagyaaatagatcctctttatttcccttctagttcattacttacttcccatgccttcctacttatataatcaaaatctcatgatagttctatgttgtttttgttgctttccaattacttatctgagtcttcctcttttgagagaatataacaccttaatatttattgtaataaatggtttgtttttattcttttcctttattttatttgctatttattagactttattactgtttcttcatttttcttcttacttctttctgtattgatcagcatcttttaaaccagttttttataattatctactggattatcaaactcttgtggtgaagaccattttttatctgtttcattttactccccatctttccacttctgatatggtttggttgtgtccctacccaaatctcaacttgttgtatctcccacaattcccacatgttgtgggagggrcccggggtggggggggcagtaattgaatcatgggggctggactttcccatgctattctcatgatagtgaataagtctcatgagatctgcygggtttatcaggggtttccacttttgcttcttcctcatttttctcttcctgctgccatgtaagaagtatgtttcacctcctgccattattctgaggcctccccagccaagtggaactggaagtctcattaaacctctttttgttcccagtttcaggtatgtttttatcagcagcatgaaaacaaactaatgcagtaaattggtaccaggagaggggtgttgctgaaaagatacctgaaaatgtggaagtgactttggaactggataacaggcagaggttggaacagtttggagggctcagaagaagaaaggaaaatgtgagaaagtttggaatctcttagagacttgttgaatggctttgacaaaaatgctgatagtgataggaacaataaggtcyaggctgtggttgtctcaggtggagatgaggaacttgttgggaactggagcagaggtggctcttgttatgttttygcaaagagactggtggcctattgcccctgccctagagatttgtggaactttgaacttgagagagatgatttagggtgtctggtggaggaaatttcttagcagcaaagcattcaaaaggtgagttgggtgcygttaaaagcattctattttaaaagggaaacagagcataaaagttcagaaaattggcaacctgacaatgcagtagagaagaaaaacccattttttgaggagaaattcatgctggctgcagaaatttgcataagtagcaaggagcctaatgttaatccccaagacgatggggaaaatatctccaggccatgtcagagaccttcatggcagcccctcccatcacaggcccagaggcccaggaggaaaaagtggttttgtgggctgggcccagggtccctgtgctgtatgcagtttagggacttggtgccctgtgtcccagctgttccagctgtggctgaaaggagccaatgtacagctcaggctgtggcttcagagggtggaagccccaagtcttggcagcttccacatggtgttgagtctgaggtgcacagaagtcaagaattgaggtttgggaacytccacctagatttcagaagttgtatggaaatgcctggattcccaggcagaagtttgctgcaggggcagggccctcatggagaacctctgctagggcagtgtggaagggaaatgtggggttggagcccccacatggagtccctacgggggcactgcctagtggaattttgagaagagggccactgtcctccagaccccagaatggtagatccattggcagcttgcactgtgcacctggaaaagcygcagacactcaacaccagcccatgaaagcagccaggaggaaggctgtacttcacaaagccacaggggtggggctgcccaagaccatgggaacctacctttggcattggcatgtcctggatgtgagatctggagtcaaaggagatcattttggagctttaaaatttgactgccccactggatttcggatttgcatgggccctgcaacacctttgttttggccaatttttcccatttggaatggctgtattcccccaatacctgtacctccattgtatctgggaagtaactagcttgattttgrttttacaggctcataggtggaagggacttgccttgcctcagataagactttggactgtggacttttgggttaatgctgaaatgaactaagactttgggggactgttgggaaggcatcattagttttgaaatgtgaggacatgagatttggaggggccaggggtggaatgatatggtttggctgtgtccccacccaaatctcaacttcagttgtatctcccataattcccacatgttgtgggagggacccagggggaggtaactgaatcacgagggctagtctttgctgtggtattctcatgatagtgaataaatctcacaagatctgatgggtttatcggggtttccacttttgcttcttccttatttttctcttgccgccgccatgttaagaagtgcctttcacctcccrtcatgattctgaggcctccccagccatgtggaactgtaagtctaattaaacctctttttgtttccagtttcaggtatgtctttatcagcagcatgaaaatgaactaatataacttttttgcaggcttataagcatccatatacatacagcactaaatttgatgctgagaatatagcagatttttaatacttatgtgtagctgacagtttgactgtgaaactcagttgattccagtgaaaaatggtgtgttgtagtggaaagcccacctagacccaaattagtagaatcctggtagtggtccttattggtggtatgactgcagcactagttgttttatcttcttgaatcttaatttaaaatgagatagcaatactagcttacagaaccatcgaagagactaaatggaatggcatatgtgaaaatgtctggtaactttattgttgctggtacctttacctgtctaccttcctcccatcccttctgctggccagtagcatgagtcatgaggggcaccatatgcagttatctatattcaggctatgggtgctgcagagaagagagcccattaaaatttgatggtgttcccaggagctgctgggctggagaggtaaaatggaagagaagagaaagaataagaaataagaatagtcagaaattttgcagcttttgaagaaggaaggcacaggcttatggtttatgatctgcttgtatgcatgcctgcctatgggttgtatttattcctgcctgagattacatcaaagtacatctacatctatatttcatattcatcctctataccatatattctcctaaggagaactcttgaatgtgaactgtgtggcagtggtgtttcctttgcagcttgcttgctttatgaatgattttgttgaaagaatttaaaagccttttccttcctttggagaaaccataacttatttggataaaytgctccagaatgggattcccctgtcttttctgtttgtatcttttctgccttttaccaatccatgccatgatgttctgttgtgtgggaaccagtctaagacctggcttcctagggggatagcccccttcctctgtgcccacttagcacttatctgcattttccctccatcagcaggcatttgtgtcccctctgtgttattctcgtggccctcttgtttcttcactgagattgagggcgggggtcatgttctcctttccctgttctctagggtgacttgtgtatatattcttagacccacaatagatgcccaacaaatgcaagatgagtgagaggtgaaaagcagggttctgtgcaaacctgtccatggagctgggcagggcgggaggtayggaaatcatgagcccagcttacgccttatcgtccatgttcactcatactttgcccagggtgtgtttactgctcctgagcccaggtagcaggtgtaaaaatctaagctataaccaaaccttaggcccaggagcagtaagagtgtgggttctaagctcatagtccagctgtgggactgaggctgaaggtagaaaaattgccaggcatggtggctcacgcctgcaatcccagcactttgggaggccaaggcgggtccatcacctgaggtcaggagtttgagaccagcctggccaacatggtgaaaccccgtctctaccaaaaatacaaaaaattaccccggtgtgatggcacgtacctgtaatcccagctactcaggaggctgaggcagtagaatcacttgaacctgtgagacagaggttgcagtgagccgccattgcaccgttgcactccagcctgggcaacagagtgaaacttcatctcaaaaaaaagaaaagaaaagaaaagaaaactgggtgacatggagtggggtcctttgatcaggactctgaggaggctggtgtgtttctcccttcctgtttcagaggcagcccacatcatttagccaattaagttggaggactctattttctgtttgagtgtttgttgttttttgtttaaaataaatgatgtgttaatacagtcagttgtttgcatgacacagatttcttttcaatcagtctcttttcccctctccccactcttcctggacaattagcaaagtgtttggtctttggtttggatgaataattgattcagaagctttgtgaatgattcatggcccatatgctggggcagcatgatgtggtgtatgggtgtgtggcagcagcacctcattacaaaggtcaagcttctcccragcttggtgcaggggctgtgcaggccacctccaggggcagagcacgttgcacstgatctttctctcatgttctctcaaagagagagtgttggagcttcttccagaaaagcaaggttctctatgggtgtatgacttccagaccagtgattctggtttgggttggatttgtcagtgaactgaagctttcccctttaagccaacacttcactctccccaagctgaatagctgatttgattttcaaagcatttgaggaaaggagatctcttgcctgtcttcctttacattacagtacttcaaaccttcccaagcaggggatacttttttctttggatcttctcctaaacactccctgctactacgctaattttatttccttgtctatctcctttactggagatggagaacacctggttaccattcgctttataggtctcccttgtctttgaagactattattacatacttgcttgcatgaggcaatgggactgttgcctarcttgtggaagagtggcattccctatctacaaaacctctcagtatttgagacttcttaatgtgtcctggtctttagaagctgagttaggaaaaataagttggttacattaagtcctgaaccaagttttttgtctcttaggcagtcagatcccacatttttaaatagggaatcgagacagagacaggatatgaataaaatccaagactctgatgaagatgtggcagtttggtgattgatcatttggggtttttttagtaagatcataaaaatattgcataaaaatttattttctagcataagttatgattatcatgtttaggtccctaatccatatggtgtttctttgcatctagtatgtgaggtatgactatacctatatgtttttccgtcacttcccaactccactgagtgaatactaacagtacaacttttgcccactgatttgtaatgtcacttctgtttgtataccaaattcccatatatatgtggtctgtttttaggctgtcttttctatcccattggcaatgattaatgactatatttttataaaactttttgataactgatagtgccaatcttcccctccatttgtctttaaaactggctaatcttagccattatartttcatatgaattagaactaayttgtcaaaatcttcaggttttgtttggaaatgcagtggatttattgactacttttggggaaaattaacattttcacaatgttgaatcttaccaatatttctccacttatttgggatatattttataccctattatagttttggagattttttccacttatgacttgcgcatctttgttataatttttcttctgtatcttgtaattttattactcttgtgaatgatttaatttttttatttctaatagaatgttgctaatgtataggaatgttagtttttattcgttgatgttatatccagcaatcgtgtaaaagtttrttagttaaaatcatgttggtagatttttttttagattatataggtagaaaactgtattaactacaaacaagtgttattgtatttgtttctttctaattcacctagtatatgtttctttttcttatcttattgccctaaacaggacttccaggaaaatgttgggtaatgacagtaatagaaggctgtcttattttgttccttatttaaagtttaacaatgaagacagatgttccttataatgttayggtgaatactctttataaaggaagtaaagaatgattgttaaactaatgtcaataatagctcaatattttcatctaattcataaactcaaaggttttggaagttcattctgtagaagattaaacattgacattattgtgggtgctattgraaactgagttaaaagtttagtactagcaataagcttatttttggagtgataatatacatacaattttgatgaaacatgatgttattgtataaacaaagtttttactaaattaagaaacctatggaacagaaacatataggatgaattgtatggacaaagaattcattatcacagccacacaaagtatggtattccgcattttgaaataaagactatgtattgggtacagtatacactgcttgggtgacggctacactaaaatctcagaaatccccactaaagaatttatccatgtaaccaaaactacctgtacccccaaaactattgaaataaaaataaaaaataagaaaagaagtagtaggcaaatagaatgagtaaaaaagaaaaagtaacaagaaaatttagcaagttcatcaaaaagcaagaaagcagagaaaggaagygattttaaagtgaggcaagcagaatgtgtgaaagtagaagtaagtcctgacttaatagcaattgaaacaaatgtaacagattaaacttattttttaaaagtcagaggccctgtgactttatttaattttttgatcttatgtttmaatgactaagctaagtaaaatgacactagaaaattgaaaatagaggaggtggcaaaaggtgttctagacaaatgccaaccaaaagtaagtgaacataacattaaaaaaattcaaggtgaaaatatcaaaggaaacaatagtgacyatttcactgtgataaaaagaaaataattgaaggacatttaaaacttatgcaccgtcagaataaatgtctgttaaaaacgtaaaggtaactattaggtaaggagatttccaactggttttgaacaaaaygcaacaaaaatttaggggtcttcataaaaaagttcagtatcattttgggcacttaggttgatttacaaagcaggtcctcagaggcttaaacatttataaaatgtttcccctcccccatttgtctttaaaattggctaatcttaggcattagaggtcctgaactaagttttgaacaaggtaatgggcagcaaagagaaaaaatgtatgctgcaattctgactttataaaaattcaccaccaacatcatcacaaaacttttgtagttcagttactctgtgtatttgaaatttttgataaaactataatgtgtgtatataaatatatttttatgtatatatgtataaatgtaaattacatttctgccatatatacacacacatacatacatatgtaatacacccatacccatgcacatatagatgattacctttaaatttttaaccactctattgttgtcttttatcctttgtggctgatagtgcttccaatatcaacatgattatttctttttttttttttttcgagacagattctctctctgttgcccaggctggagtgcaacagtgcaatctcagttcactgcaacctctgcctcccgggttccagcgattttcctgcctcagcctcccaagtagctgggattacaggcatgcactatcaccccggctaatttttgtatttttagtagagatggggtttcaccatgttggccaggctggtcttaaactcctgacctcaggtggtccaccgaccttggcctcccaaagtgctgggattacaggcatgagccaccatgcctggccaacatgattatttctttacagataacttttgtttcctctttcattggaagcattagcattttttccttacttttggtgctgtaaaatttcactaatatgtgtcttatatgatggtttctatttatttttatttttatggcattttaagatttctatttttattcaatgctgggaagtacttttgaattgattcttttactttcaaattctctgcttctccacttcttaattttgcttctctccattttatctattctttatttgtagcacttgttttaaatgatgttggaatttcttccctctatttttaatcttttctttatatttttcatctttttcttactcttgtgttgatttctgggaacactgctcagttcagtttttcacatctcaaattcacctgtctattttgccactcaatctacttaatcattttaaaagttttcagttatcgaaatgttcaattgcaccatctctaggtaattttgtaaaatgcttgcaatattctcacacttttctctaagctgataattatatgtcttcattctcattgagtataagttctttgattgttgagtttgttctctctctctccgtggtattgaaattcctcaagtttttggtgattcttgattgtaatattatcttctttctaccatgtctgtttgtgcaaacttcttggaaggagaatacctatgaagctaatagtctggcaagggtatagaagtggtgagacctgctgctggatgggtcactttgatgaccagtcccctgggagagagcacttcctgttcctctcaggcatggaaaggcatgagagcacttccccatctttctcacccaactttcatgcccattgcccctgcttgtgggcakattttcctttttgctgccyggtctgagggataaggtgggttaaggaggagggttaaagtgagtgcttgatcttcctgctactgtattcaaaccatcaccctgttggtcacctggatcccatcagatcccagtggccaccctctgtaggtgggagcacttgtggtgacatgcctacatttagagtggtcatattctcttctgagggctgggggccgtggtttcttttycttttctttttttttttttttttttttgagatggagttttgctcttgttgcccaggctggagtgcagtggcacgatctcggctcactgcaccctccacctccaagattcaagtgattctcctgcctcagcttcccaagtaactgggattacaggcatgaaccaccacacctggctaattttgtgtttttagtagagacagggtttcaccttgttggccaggctggtcttgaactcctaacctcaggcgatccacccaccttggcctcccaaagtgctgggattacaggtgtgagccaccacacctggcctgtgrtttctttttaaaaatcagattgtagctactttctgtccagaggggattcatcacaacatctagcctagtgagggtttgtttctcttttttctgtccagtgtggttactgtatgtatatagaaaatgatttctaggaatttggtggaaggggggagaggtcacagtgtgtgttcagtctacctgtctgagagagaagttgaggcaatattttcttctaacctctctgagtctcagttacttcacattcaaaatgaggtggtgatgatgatgaagcatgagggtggtagtggtgattctcagttaatatttgaaattggagtgtatgtcaggcactgttctaagtactttacctgtgcaaacacatctaatgcctcaacaaccctatgatgtctattctattactattgccattttatagatgaagaaacagaggtacagtgagattaaataatttacccagataaggggctacctactatgtaggattagtttgagaattattaagctaacacatgtaaagcacttagcatagtacctgaaatatattggaacaacaaaaatggcactaataaatatatactgagtgaatgaaaagtcaccaaatatttatattccatgcagtttgcagaagatcttgtagaagttagttggacagggtgccctgttctagtgttttctgtcttagtgtttttatgtaatataaaagctgtgtgtttctggccatttgattcttaccctaccagctcaatatttaaaatttttacatattgagttattggtgcttgaaaccattttaaatctttctgctttctcatatgatatgattgcaaataaattaggtaatgagttttaaaaaatcagttgtggttaatctttcaggttcagagaactgaaaaatatatctgctttaagggaacttacattctaatttccatacacatatatattacatgcatttttatacatgctgcatgagaaagatgtcctttatatggtggttctgtattgaataccagcatccagcacattgtctggcacagagcaggtgttcaataaagtactgctgattcaatggaatctttttcatgtgttatacgtaaatgtgcatgtatatgtaaattggaatgcaaatctgtgccttcctgggacccatagtctagtggaagagagtgacaagaagcaattgcaatacatcaccgcactaatgctctgttkaatgtattctgggagtatggaagaaggagaaggtgactgtgtttgggaaaaaaaaawcacagagaggtgatatttatttaagctggatgttgaaggtgggtaggagattgccaaggagaacatgggaaagggcattcagtcagggaaagtggaggaaagcaaactgactagcaaagtcctgagaatctacaaagtgaaaatctgttcagtgatatagtgttaatctgaaaaggcttctgttgaattttgaaaaagatcatgcagaagatgataagcatggtttcacaaaatgtaatataattctgcaattctttgcctaaaggctytcagtggtttgctgttttctgcagcagaatacaagatccctcctgacctgaccacatgcagcctgccctccagctatactggactacttgtggttccttgaattgtgtgctatttcatgcctccttccttttgaatgtgctcttttgcatgctgtaacaccaaccctgccatccctctggctggtatctattcagctaagtgactattccctgactgtgcttcctccccatttccttctattttcygttactcgttgactaggctcaccctaaacttcactcacccagttgacattagtatctcctccactacatagcttctcaccaagggcttgaaggcaggggttgtattgtattctatttgaactccttgtgtgcctggcacttagtagtcattcagcaaatattaccaaatgaacagataatgactgaacaagctaattaatgaattaatgaatgaatgaatggcagatatgaaagggggaagaattcaggaagacaggcaaaatatttcaaggatacctttaaggccaaatgaagaaatggaaggttgatccagccaatccttgtcacatgatcaccttcatgggaggaagaatatattattcccggtctgcttaccccttctctaatggtccttttaccactactaatgctctgtatgagcctctcaatccaggtgtcccgcaaggtctgagtcccactgaagcttttcttaagttgagtaaaagtaacctgaaaaaactgataagcatttttcttagtagaaatccttcctctgagcagtaacctctgaatattatgtataaaaccattacattacttaatggataagactcatgttaaaattcaccttgtctccacagaagatagacccagagtttagtctttgcttttagtggccacatgtaaaagtggtgtacagtggagctgtattacttattataggtcttgtgttaaaataggacaaaggtaaaattagaaaccaggatgccagatttcaggtccccagtcttacaacaaataaacatgcttcctatttaggtcctctttggtctctctcctccttatcatcaccatcagcagatgctcaatgaacacctcctatttgggtgtgacatcctgttgtgtgcttgtgatgcacagttagacccttcagattgtttataataagggagatggagaaccttcacaaaatcccccgatgtaaacgcatttcctagatcccttgtggaatttattgtaattctatacatgcacacaataaacatcagagggcttcgagtaggtgcctcatcatcaggaatgccctgtatcctcatctcccaaaccgtggcacagggctgattcccctgtgtttactaccctaatctctgtgctctatggcaacatggtgttttatatggcttttatatggtagtgtgtactccttgtgtgcctggcacttagtagttattcagcaatatttgataaatattgaacaaattaacaaatgaatgacacatatgaaagtgagagaattaggaaggcagatgatggggtttagaatatgctccccaaaatatgtcaccttggcgtactcaatgttttaagctaaaggaatttgaaaaacaacgtgtgcaggaaagactctctggycttcccctgaaagagctcatagaacgctcatgtgagaggtgccctcccatccctggaggaaaggagcatcgtgatccctgaagacagagggacactgacaggkatatgaacaaatggacctcgcaaagtctcccctagtttactgtacttagcccacaccattttgtcttattgtatttttccataattttccactcttcatcaaacctggtattaaaacagtcaggtataatcatttcttggagtcctcatttccttataaaggctcctgtgtcttataaaagttatacaggttaagcatccctaatccaaaaatccaaaatcaggaaatgctccaaaatctgtaacttcttgtaacgtggtattcaaatgctcattggagcatttcagattttggagttttggattagagatgctcaactggtgagtataacatgaatattcccaaatcaaagaaatccaaaacacctctgctcccatgcattttggataaaggatatttaacctgaattaaataaatctgtatgtttttcttttgttaatttgtcttttgttatagaaccacagctgagaacctggaagggtaaaaggaaaaggttttttcctccactacgcgggcaaaatattgcaaggatgttcttaaggtcctaaaaaatcttaagatttaacaggtttttaggcagaaatgttgtactttccatttagaaagaagttgaagctttatatccaacattatatatgtttaacataataacagttaaagatacacttaaaaaaagatggagagaattttcaaggaataggatttcaggagctagaggtactaggagttatgaatctccccattagataggtagacaatgaaaaaaaaaagggggaaggggatgatttgcagtttgatggtaacaggatcgttgagagcagcaaaacagaagtaaattgatgctcatctcccagattagttgagaacggcctaattagctaatgaacagttccagtcctatgttctgaaaggctctgyttctgggcaagccgcagtgcttagcagcagctgctaaaccatgtggacatgctaacaccaagcagaggagcacatgttatgttttgacctgcaaagactcgtctttttgagtcacacattcttcaaggagtattagagatcttgtttcttcgtataatagagaagtagcagtctcagtggcatgaactctggagccagactgcctgggttcaaatctcagctttgtcacttactaacacagtgatcactgctgcttggtctctatgtcctcatgtaggcccttgctccccaccattgtatcaggtttggtctgggtgaccaagagaacacggcagaagtgagggtgtggcttttgaggctaggtcctagcagacattgccatatcttccttgctctcttggatcacttgcttggtggggaagcaggttaccatatcatgaggacactcaaggagccctatggaaagtcacatgatcaggaactggagactcctgccaaagccatgagtaagccgtcctggaaacccagattagtcaagtgttcagataactgcaaaccccagctgacagcttgactccaactgtggttggtttcttgactgcaacctcatgagagatcttgagcaaaagatccccacaaaaacactctcagattccccacattgctaattactgttttaagccacgaagcttgcttttcagaagtgttaatagataattaaagcaaaaaactttgtaaagaactagtttaaaggatgttcttaacaacagacttgacttgatgaagaaatagtggctgatattgtttggctttgtgtctccacccaaatctcatcttgaattgtaatctccacagtccccacatgtcaagggggagatcaggtggaggtaattgaatcatgggggtggtttmccccatgctgttctcatgatagtgagtgagttctcacgagatctgatggttttataaggggctcttccccattggctcagcacttctccttcctgctgccttgtgaagaaagtgtcttacttcccctttgccatgattctaagtttcctgaggcctccccagccacgctgaactgtgagtcagttaaaactctttcccttataaattwcccagtcccgagcagttctttatagcagtatgaaatcggactaatacagtggcatgccttttaatttcttgatttatggaatacctttaaagtaatgttacctaaagtaacttttgtggaacagtagtcctgcaagatgctccatatataaggggtttgatgtgtttattagtttgggaaatgctgcatactagatctccttcttggaaatacacgttgctcataagcatattaaagaatataaacaagtcttaaggattttttgtttgtttgcgtagtccattgtttcctaaactcatataaccaaggaatttttaaagtcaaatgtcacatattaaaatattagagaatactctgtaagaaatgttgtcttataacactgattctcagacttatgcctacatcagaatygtctggaaagcttaaaacgagattgttgggccccactccctgtgtttctaattcagataacctggggtagggcttgaaaatttgcatttctaataagatccctgctgatgctgatgctgctgatgggtgcgtgtgtcgggaggggaccacaytttgggaaccactgttcactagggtttcagkttcctgagtaagagcttaaagaatgaacatgcaaatggccaataagcacaggaactgatgttcatctgctatggactgaatgttcctgtccacaaattcatatgttgaaaccccagtccccaatgtaatgatatttggaggtagggtttgggggagctaattagttcataagggtacagcctttatgatgggaatagtgctttcagaacagccgtaagagagcttgcttcatctctctctgtcatgtgagaacacagtaagaagatggttctctgcagactgagaagagggtcctcgccaggaatctaactggccagcaccttgatcttggacatcccagcctccaaaactttgagaaataaatttctgttgttgaggccacccagtgtatggtattttttaaagcagctggaactgagcaaggcaacatcattagccattagggaaatgcaaataaaaaccacgataagataccacctcacacccattagggtggttacaataaaagagacagacaataacaaatattgagcaggaatatggagaaatttggatcctcacacattgctgttgagaatgtgaaatggcacagcctcttttaagctccttaaaatgttaaacatggaccatatgacccagctatttcacctctagaaattttaagaggcataacatatacccatacaaaaagttgtgcattaatgtccatagcagcatcattcacaatagacaaaaagtatcccaagtgtacatcagctgatgaatgggtagacaaaatgtggcatgtcagacaatggaatactactcgacaatgaaaagcaacaaagtactgatacttgctataatgtgggtggacctggaaaacataaagaagttcctcacaacaggctacatattttatgactccatttatattaaaaagttcagaatgagcaaatccataaagggcgtacgatagttgttacgaaaggctggtagaagtgaggtggggagttgactggtaatgggtttggagtttttttggagcgttgaaaatgtcctaaaattagatagtggtgatggttgcacaatcctgaatatactaaaaaaaaaaaccccactgaattgtacgctttagaagggtaaattatgtggttgtaaattataactcaataaagctgctataaaaatgcatatagcttctaaattaggatggcaacaaaagtacaaatatccaattgcagtatacgttttaactttattgtaacctataaggtgccagaggcatactacaaatggtggcagtggtgggttggtgcaagctgaaaatttagatgtagctggcgttttagcacccttctccccctccttcattcccgtgcagataataaatgtttattgttgttctattgtggccccaagtgagctgtggacrtggtggggaagcagcaggctgaccccggagggtttgctaatcagagagagtgtaaaacctgtttcagaatctgtcatttacatggggcagcaaatgacagatagcaatttaaagggtcacctttcccagggtatggctgtttgttttggtcattgtggttggttgttttgcattttaagaatgtttggagccttaagctagcacagtggctctccaaacttcagcgtgcatcaaaatcttctgaggttcttgtttaaaatgaaaaatttggccctacccccagagggtaaggaatctgcctgtttagcaagcactcagatcattctgatgcaggtggctcatggaccacggtaaaaacatttcagctccaaaaaaaaaagtcttgctatgttgggggtgtacataaataagcatggggctgatctaaccaaccccaggacagtagttactcccagaaggaggggatgaaaacaggttgggtggagccttgcctgtgtctgaaatgtctaggttttttaaaacatgatttgaaagaaataacagaaaatattaacccctgttacatataataccatgtttgttgtatcttttgccttattttttgactatttgaaatgcagtatctcaaagtattttgtcatacttggcattttagatgttcgtccattccagggactcagygcactgaggcagggaagacagtggtccagttggtgggctccctgtgtcctgcagggctgtggggggatggcagtgctcccagcttggaatccccccacactgaggtgggagatttcctcctcccacgtgagggtgtggtcttgactactcctggctccacacaggctgtcccttagggcagggggcaggagctcaagaagctggaggayagaatttctcccctgagaacaggaaagagaggaggcacgaggaaaccacagtctgtctgctttaccctgatggacttctgttcagggagtttgggtgaattccacatttkgatcacaatagttgtcgcctgcctttcttttccctcatagctttcaagacccctttcawgtccctctgtctccaggaaagatgatttatttttttcttggcccaaggctcccccaggggccccaagtccaaacactttctttgctgttccttcaggagtgttctttctgtgatcccattatattgaaatatatgcagatggagcatcacgtgtgcctctagggggttggggaggagcctaaggaacctagagagccatcctgagatgtggggagagggttggggtgctgcaggagagcgggatgactggcctgtgttgacagacacgccgtggggaagcagaagctgccccgacagtcttgtaaatggagtgttcacctctagcagatgtaaggcatggtttggaaggggatgtgtgccaggtcgtcaagtttcacagcagtctcaggccagttgggaagcctggcagcgtgtgccatccctgagcaagagggaggctggaagagaggactgtggtctgaaagttaggagccctgggctcttgctagcttcttccttcttcgaacctctgccctgctgtgtgagagcaggtagtgcccttcctctgccttatggagtgatgagaaggaattagggcacttggaagatgctgatttctaatcctttagttgccaccaggcctcagcccccttgactttcttcctcaccccctcaattttcctgctgcccttgagctcttcataaaagtccctgctggggccctgccttctgttttctatctcaaattgtcccctttcccttcccagacctgttgtcctctatgttgaaagtttctaaagttatgtgagggactgtttggggctagggtggaagggggctcttagtagacaccaccactcacccattctgtgccaagcttggggccagctgctgcggtgataaacacaccctcttctctacacaaaaaagccgtgcagacagtgcacattcatcagctcctgttctgcctcttcatgacaactgtccacctctcaggacatgatgtgctctgaatatcagtgtcgggccatttcaaacccaggggatttggtgtctggtgttagcctggggtaagaagtagtgacccaggcactgggctcacccctttcctgcattctttatgcctgacagtttctcaagtcgtgcctgtccttttaaatcaagcgatctgttcttccctttgatgtcgtcctccyggccaccagcctacatcctcattacctgataacttagatgatttaaagcctcactggttggcttcttgccgtcattttctccccagcttcagtctgttaayggccatgaraatctcactaaagcccttctacagcaaggcacatgcctaaatgggaacccaaaacatctccctctttcccattgcmccctctgccctgttctctgtggcttttgaagccttcctcagcactgatgccacctgaactccagcagtgctcatgcctgcccccgactctggccaccgatgccaccttaactccagcagtgctgatgcttgcccctgactctggccaccgatgccaccctaactccagtggtgctcatgcctgtcgctttggatttctcacccctgttcatgatctgccctcctctggaatcctctatcctctcctctttcctgtgcatctttcaaagcctttcacgatgacacgggctggtgcatttgcattcagatcctctgttcactagaaatggaagggaccttggaggtccttgagtccagcttctttccagagtcccygcaaggggcagtaacttgccactgactacacactaggttattccaggaccagacctctcactcctagtccagcgctccttccaccacaccatgctgcccaaagatgtagaggaagcattctcgcccacagctgactgggatgttgtcatcaacagcggcggagatgcagtgggagtaaataacaatgtttgtggaggccttcttattcattgcatttgcgatgcaattagcactttattatagcttgttctcattcttattgtcagttccacacattgagccctttattttatcagaatataacactgcctcgtttgctaattacctcatacatagaagtaaaaactgtcttaaatatcttttgtagcccacagcatctcctgaagttctaggcatagaggagaacttactatctacttgttaattcactgggtttcaaggacaattccaggcaaggctcacatttgagccattagttgtgatgaagacctgtccactaacagcattgtcagctttgccttaattttctatctgaggcttcttagagcctcctggttagaggtaggtatactttcccctctgttcccataacactttttttttcttttttttctttttttttttttgagtcagggtctcattctgtcacccaggctggagtgcagtggtgcgatctcagctcaccgcaacctctgcctcccgggctcaagcgattctcctgcctcaacctcttgagtagctgggattacaggtgcgtgccactaccacccagctaatttttgtgtttttagtagatacggggtttcaccaggttggctaggctagtcttgaactcctgacctcaaatgatccacctgcgttggcctcccaaagtgctgggattacagatgtgagccaccgtgcccagcctccataacactttattagtatctttattgttgctcatgtcatatggrtaattatgaacagactcctgcctcctcctrtgtttctggggacaataagaagtctttctttgtatggcccgtaggctgctttgtccacacaatgtcttgcacatggttgtgctcatacatggttgttgaattgaatattatgaataatgacagagttaacagtagcttaccctcatgtggtttatctacacagcccagggctttcttccacagtgtggccaaaccccagactgggactaaggccaggctaggagggtttgggatggtttccagatgggcaaagatagttttgtgtctcagaatgtgtctctaaccacatctcaaaaccaaatatgataaatgactttcgtcttatccatcatgtttagttggctaagcctcttcctctatcagcccagataatgaagagatgggatttttattgttttctctgtggcacagagaataaagcaagttcccaggtaacaaggcacagcagcatctttcaagccccgaaactgagatggtctgagaagagcaggcacgtctaggagaaacagaaaggaaaagccagccggaaaggggaatcattcttaatcgatcccaagcctctgagagctggaaggtctgactgcattttacaaataaaaaagtcaaagccccataaaggaaagtagcctaaagccacagggatggtgaaggagtggcgtcaggatgggcagaaagagctctggactcttgggctgctgctacaaccacctggtgtgggttttcttaacaccacagctccatcaggttcttaggaaaaatgtcacacaaccaggttgtcaaaagggctttgagggcattaagaaagggacagaagtggatggattagaatggacaggtagggtaccaaggggccagagtgagaatgaggaagaagggctgaagagagagggatcagtcgtatttgcttctgtttctgaatagtttccctttttggaaagagaagtaagagaatagaaggctaaaatcatgccacagactggcaggggtggttgggtgtagacacaacagctcaccttcaggctgctttcacattcattcatctctttcccttataatgatgatgctgcctccagtttttagaactttctggaaacttctgagaagtgactgtctaaagggggatgatgggagaaggggagttgyccatgggttcccatcgtgcttgctggagcaatgggtgttggcagatttcttcagaaggagtttgtcagcagtggggtggggctgggaagaaagccacagtgaggcaacaggtgcaggcatggagaccagagcaagcacagtgtccgtggagaacggcatgcatgtcacggcaaccactggagtgagcgtggagtggagcatggcggagagtgggggtgaacaggcaggcaggagctctaggtctgtgtactgcggtgacacttctggattctactgtgaagacaatagagggccattaagaggcttaaagtgagggggtggtagaatcctggctacatagacctcccagcactcagagccttggaatcttgccatggtggtacatgtgtgtgttgggggtaattagggaggaaggggtgaggctgagctaggatgactagttaggacaccatctttactgtctagaatatactgagggctgtgacctgggctgtgtcagtgggaccagaggaggggacagatacaaaaaatacttaggggtctttaaacttgggggatgagagggaagaatccmagatgaatcccaagtgtaggggagggtggcttttttcaccctggatgaggagcagtctggtatggagaggggatgagggtggctctggctttggcggttgggtgtgtcttttggactgggtgtggtgccctatagaaaggctggagcttgggacaggtctgtgtgracacctcgattcatcactgcatggttggtagttgaaaccatagacatgggtcagattgtcccagtgaaatggcagagaagagggcaaggacagactccaagaggccctgaatcaaatgggtatggaaaatatggagggcctgggatggaggctgagagggagctggcaggaggggtgggggcagattggttgagaccattagcagggaaatgagggagaaagartttccagaagggaatggttaccaggttcaaatgtgagggaggaattcactgctggcatttgtttgagaagccctgacctttttctgttcccttgctagaaataaatgctttttttttttggtagcagacagtaatgtactggaatggaatcatgattgttccgtgtctcagaatccatatgtaaagtcccttgtcagatagcagggaaacagtcatctttgggcagtttgtactgagagggaggggaggccgagtgtaaaggatcggtgccttaattttagcaaggctctgagccccttggaaggcaarctttatttctacatagattgaaagtattattattattacatccttacgctgtatcagcgccaaacactggagtcctcaatactgtatttatttctctgggcttttggaggggtggggaagaaacggsacatttaggttgctaagtgattgtgcttgcttctaaaaataatgagattccccagtggctcgttctcctgtgttttgcttagagttagaggatgccaaggtcaagttatagatgacaggctgtgtctccaggtggtgtcagggcatcctgttggggaaggacaaggtaaactctccctctctggtcctcccacctgcatccccttagggcccactactttgggaaattgcaggaaaaactgggcctccccctgcttggattgaagagcctcgcctaggcagtcagmctcagtggttgccatggtgatggtgggtggttggtggggtggtgatgcagcgtttggcctgtgcagctgaggtcctcaatgcaggctgcttggagcccaggctgctgaagcttttgacagtttgtttaggattccagagggtcacttgctgcggtgttgaaatcttcagacagacccgccagctcagccagctgaaaccttcattgttgaatatgcatctcacaggccaaattttggcaggcgctcatgggattaggagctccacagcaaccttggtgggggaaggggtgtgcgaaaaagctctgtgcaggggagagtggctgggataatagactctgaggacaacagaaggccagaggcccttcagatcgtccagttcatcaacaccttcaacaacatccctgacagctggtcaccaagcttctgcttggactctccttgtgatggggagctcactaccgggcaaggcacaccactccattgttgaataggttttacattttctcctctctccctcacttctttcgttcctccctcattctctccatctttccttcccccctcctttccttgcatcctttcatttttttggcaaaattctggccccttctaatttgattcactgactcaagttatgccaagaaggaaagcagtgtaagctttcatcaaagtgacaaccacttgccacccaacaaaacattcatacttttctcagctacttctgacattatttcaagaccccttgttatttccccatcccctatatttctccatattgctcttaaaatataacacccagaatgaaccacagtactcgactggtctgaccaatgcagaggactttagggtgacacccatgtttgtgaacagtctgagatgattttgtagccccctcctcacacccttggctgatacgaaggctgtgattctctgtcgttcccagatcttttacatatgagcagctgatgctgggctctacatttgtacttttttgattttgtcatctaagctgttgagaaacacgttgaaatggacagaaatgatgatggaatgccgtggcaaaactctagaggcctccctgcaggtggaaattataatagtattcatagctttttttttctgtttttatatccaactatctacttgtctaaccaattaatcactgatctttttttttttccttagagtgttccattccattgtatggatgtgctacagtttgtttatttattcagcaatggaaggacatttgatgttttccagtttggggtgattatgaataaagctgctctaaacattttttaaaatcattatatatttattattttactttaagttctgggatacatgtgcagaacgtgcaggtttgttacataggtatacgtgtgccatggtggcttgctgcacctattgacccatcctctaaattccctcccctcgcccccaccccctaacaggcccctttgcagggacatggatattttggtgttatttctgaggtctctgttctgttccattggtctgtatatctgtttcgatacccagtaccatggtgtttcggttactgtagccttgtagtatagtttgaaatcaggtagcatgatgcctccagctttgttctttttgcttaggattgtcttggctatacagggtcttctttaattccatatgaaatttaaagtagtttttttctaattctgtgaagaatgtcaatggtatagcattgggaatagcattgaatctagaaattactttgggcagtatggccatttttacgatattgattcttcctatccatgaagatggaatgttttttccatttgttcgtgtactttcttatttccttgagcagtggtttgtagttctccttgaagaggtccttcacatcccttgttagctgtattcctaggtatcttattctttttgtagcgattgtgaattgggagttcattcatgattcggctctctgcttgtctattattggtgtataggaatgcttgtgatttttgcacattgattttgtattctgagactttactgaagttgcttatcagtttaaggagtttttgggctgcgatgatggggttttctaaatatacaattatgtcatctgcaaacagagacaacttggcttcctctcttcctatgtgaataccctttatttctttctcttgcctgattgccctggccagaacttccaatactatgttgaataggagtagtgagagagagcatccttgtctcgtgccagttttcaaagggaatgcttccagtttttgcccattcagtgtgatattggctatgggtttgacataaatagctcttattattttgagatgcgttccatcaatacctagtttattgagagtttttagcatgaagggatgtagaatttatcaaaggccttttctgcatctattgagataatcatgtggtttttgtcattggttctgtttttgtgatggattatgtttattcatttgcgtatgttgaaccagcctggcatcccagggataaagccgacttgatcgtggtggataagttttttgatatagtcactggtattttgaggtgattgctatcattatcatgatcttactaataagaaagcagagccacagagaggtaaaataagttgctcaaggtcacacaggctctaaatagcaaagtcagtatttgaatttagtgttttttgttgagctagggtttcactctgtcatgcaggctggagtgcagtggtgagatcacagcccactgcagccttgacctcctggactccagggatccaccccagcctccctagtagctgggaatacaggcacattccactatgcccagctaatttttttagttttatttcttgtatagatgaggttttgccatgttgcccaggctggtctcgaactcctgagctcaagtgatcctctcacctccgcttcccaaagtgcttgggattaaagatgtgagccactgcgcccagcctgaatttagttgttattcagtaatccatataatttgggaatgattgttcaaatggcacagactctsacaggggttcaatctaccattgtgtcagtgtagcagatgagatttttgtcaaggggcttgctgaaatccagggtaccatatctttagcattttcctagtctgtttgtccaataaccctgtttaaaaaaagaaacaagattagcttggatcggtttattccaagaaatctcatgctaattcctaataataagaaacaatgccaatagtgatactaatggtcctcacatttgctgagtcccagcctgtgccaggcactgagctaagcttgtcccatgcactgtttgatcatcctgctttctcgttgctcacacactgtgtactgacstacggctgaattctcctgggattgacaatgagcttactggttatcactgtagagtcttctgtttggaatcaagacatttgctcaggttttaaggcctctgtttttatccccagtttctcacaagctgcttgtttggatgtcttatcagtgctggatctaagtgagcatttaatttggagctgcaggctgggttcaagtctggctctatgacagctttttatcaatgagaccaacagcaaatcactcaaccttgagctttggtcttctcctcttccaaatggagattataatccctatgcagagtatttccacagatgctgagatgctcatacaggagaatgtttgtgtaaaagtgcttctcagacttcagttgcagacacacttgagccatttttgttatttaaaatggttaagtgttcctactagtattatctcctatccaagtttcacttttaacagaatttatcctcccccttttagatttttaaaaaatattcataagacactcagaggtatgactgaatgttggtcactagacccagaaaggggtatacctaccagctcttgcccactgagttgtgcttgaggtggaagaaacagaattgcagactccaggaggaaaaggtatgcttctagaggtctttcatctagagcgaatctttcccaccttctcctaatcagcagaaatcattacaggaacaagacatatcgatcctggtcagagggcaccatatacatagagttctgttttcttctttttctttccaccctcccccagcctcagaaggctaatccagtgccacctgcgatttcttctgatgttactgtggaagggagggttacataaagagaataaccaggttttctcctgtggcacctgcagccccattttctcattgggaaaaccaaggtatgaaggaataggttaggacttaatggtgcataaactcagagccagcagtcattcttccatccctggtcttggcatttggaagatgwgatccactatgttgtaagstctaaggggcaggaaatacaagatgatgtatttatgtaaatataatgtactatgttgtaatcatatgtgcatgcaggaatgaatgactgaataagtgaagggagaattcttttctacctgaactgtggctcctgctagtctgaaaggcatgcagcctttcttaagctttatgaagaggaaggctagaaagaagttcagaaaagcttcccccatctttattctttaaactctatataaaggcatgaaatgttctgagactgacgaaaacatgggcctagaccagcaaatgattttggaataacaaagatgagcctagttctctagctattgtcacctcctttgttgtgccagtggtggttaccatgtgtcctccttcactggaggatacagccaaagtgaaggatgctgcagtgtaaggatgcaggatgggttttctggcttcaaattcgttatagactagagtagcccagggcatcttcttactagatgtcttgcatcatggcagcaacacccctggtccctctggggtggatggggtgcagcacaccttggtgaggggtttacactaaatactgctgaccccaggacagcratttctcatacatttttattccaaagtattcctgaaaggtacttttgcttcctcatgtttccacaacaaccccctctagagcaaggatataaataagaaagcaaaatttcaggctccctttacaatcacagtagctgttaactgctgaaagggactcagagaggggcccctatgggagggggaggcagagggtggagcaggccagcctgtctccctgggtagcacatccccaaagaatcctctgagcattgatctttgattgtgccccttccgtgctacccagcaggaccttctcccctaaagargggtcactttgtattgaggatctccttcttatattgcatttgcttagagggtgcatggcctcagaccacattttggggctgatgggaagaagttggggcaggagggcactgtggtcataatgaggtcatggactgctaaagcttccagttctgaggggctcaggtttctcaacagagtgaagatcaaagtgtgttcagtgtggctgctgctgctgctacaaagaggtgtgaaatgtgggtttggaaagagaaccgaggataatttgctagtttatagcctttcctagagttcacacagaatttttagtactttctctccctcccttttttgtaactgtttcagagaaggtgtgagatcagcaggctgtgaacatcgtgcagtgtgggaaaggggagctgaggcatgggtctctgtctccttggccctgggagaagggattttggtgggagctgggggagtgtttgggtgtcatcttggggagcatgttggggagtgtgtgggatcaacattcccaccaccttcctccctgtcacctgggtgctggcttctggaaggctcagccctgcaggtccatagcaggactttcctggctgtgccrtacaaagtacctgacgatgagattgcttggaagggcatggggaggagccagtgacagatgtggtgggatccatagaaagggctgctgtggagcctctgcgtattactcaggagcacctactgagttttctgtacagcctttgttttgccctctggaaaatgccaccaggagctctaaccttactgtgatcaccctttgccattcagtgcctgcctccattccatctgacagctttagatatttgaacagtcctcttgctgacagctgtgtggagcaggagtgtcctgttcgcatgccaagtactcagactctgggaagacagagataatgaacttccttttcaccccagtgattgcctccgagttcagaactctgtgccctcgcatcaggctgtggctgagcctccaacttgctttgctcccttggcccagcatctctccccttcctgtctactttctcaaccactgctgggagaccttcctaaagcatagctttgctcatgttatccgctgggcagaaaccatccatgggtctcagtgctcatgagaggagggggcagagctggctcagcggcactctgtggggaaaggactcgggttatgttaagaaagtgagattgctgccaaaagggatcccaccctctgggcctgctgtgactgggattccaggccttgaataagattcagacagtcccatttttaaattcagctctggctagactgcctctgcagtgtttttgaaatgggtgctaccttagaagagcaaaaaggagtagtctcagatacaatygtccagaataactagggtttaatctaaagagtgagttaccaggaaatgagagaaggagtgaggacataggcctggagaagcgaataattccagaagcaagtgacatttgtcttggaacacttgaagggcagtcttgaagctacactaagagagggttactttgtgtagctccaagttcagggatgggctgtgctgccctcactgcaagagttcatatagatgctgggatgagcttcgcccaggaacactgtgttcctggagtttgggcttgattttctaagatcatatccaacttgaagtttatcagttcaccctttcctgccacatacatttatcgagtacctactacatgccaagcaccttagtttgtgttatactggaaaggcagcacaggctttgccctcagagaactcagtctagtagggaaaaacagataagaaaactgaattataagatagaagactgagggaaagggtggtttgggaaaccttcctgaagcaagtgcatgctgaacagtgttgaggaggagcagtttaaacctagccagggtgaggtgcatgcgagagccctgaaatgtgaaagctgggcacctgcaggaaaccaaaattagttcaggtgactggagggtggcaggcggaggcgtggcaagaggctggaagacaaggtggaagacagatcatgacattattctaaagtcagcatggaaggattggaggattttaaatgagaagctataagccagacttggattttagaaagatcactctagtaatggtctggagagaagaatacgggaggaaggggtagggaggcagagagaaaccagtaggtattcttgtgaaaaattatgaggacgttggcagtagggatagagaaatgaaactgttaatagagaaaaagctatggagttcctacaagacggtcttttgggaaagacagaagaggtgacatttaagttgagacctggaagatgagaataaaacagtcacgtgtagatgtgagaccaagagagctccaaattgaaggactagcgaagcccttgaaacagaattaagcctggagcattcaagaaacagagaaggctgttgtgcccagatcacagagatcagtggagacagcctgaatcttgcagggcctgggagaggtttgttcctgggaaaggtttgggctgttactgcaagtgtaatgagaagctagggagctataagcaaattggtctgacttacaccctagaaatttcactccactgtgtaaagaatggattrcacagaatatgtgcaggctggaggccttgtagggagctgttggagagtggaaatgcccagcagggtaccaggtatgcaaggagagaggtctgtcctggagataaagactgggagtcatttgcatccaagtgatagttgggcacttcrtttcagtaaggccttttagggagtgagtgtggattgaaaataaaagtggggaaaggcaagtatgaaactttaggaaatgtggcttttaaagggaagtggaggaagaggagtagccaaaggagaaaaggataactcagaaggaaagggaggaatttcaaggagagggtactaaacactacagagttattataaagtgctgcaatacaataccgacaagtacatcttgaatttggagacctgcgggcctctgatgccctgtaatgagtcattttcacggagtgaggaggacagcagccaggggcagcaggctgggtaggtagagggtacaaatgtgcaccagcttcagaagctggaccagggaagtgaggaggctaaggaggggccacagagatgcagggaagagctgtgtcagaagagagcacacaaaaagttgaggaaacaggagagggggtcatcacagagctgctgaaggcgtgggatgcagagcatcgacattcttctgcaatgtgagaaaaagggtcaccagcttttaggagacttcagtccacattggtattagaaagttttgattgtttaaaataaggatctctaatgattatggaagagctattttttttttctgtatttgttgacctttagtcatgtttgaagtttagcaatcagaacatgtactacagctcttaatttgaatgtaaactcaccatccaggcccacctagacagggtcacaaagagttgcttttgtgaagagctctcaatatttttgccaacttcagaaggttaggaagatactgcaaacaaccttgcttttttttttaagtttttttttttgtgtgtgattataaggaatatatttccattggaaaaaaaaatcaagaaaatacagataagcataaagataatacagataacttgtaattccactacctaaagacaatcactgttaccattttggtatatttccttctagtcttttttttccttttgaatgtattttacactgttgaattaatattttagataaaatattttccctttaaagttatactgcttttcctcttaagactatatgatgccttttccattgtattaaaagttctgtagaaataacatttaatagcatttaaaaggctgtgtaatattccattgagtgcaccatactttgctcaaccattcccctactgttaaaacactaaagactttctgtggaaaaccagtatggcagttcctcaaaaaattaaacataatatgattaaccatataaaccaaattgaaccataaaaattaaaccatatgattcagcaattccacttctgggtatgtacccaaaggaattgaaagcagggacttgaacagatttgtacacccatgttcacagcagcattattcacaataaccaaaaggtttcagaagcaacccaagtgttcactgatggaggaatggataaacaaaatgtggtctgaacatacaatggaacagtattcagccttagaaacgaaggtaggcctgacacatgctacagcatggatgaaccttggaaacatgatgccaagtgaaataagccaggcacaaaaggacaaatactatgtgattccactcatattaggtacttagagtggtcagattcacaggcagaaagcagaagatggttgccagggggctagcaggaggggagagttattgtttaatggtacagagtttcagttagggcagatgaaaaagttctggagatgagtggtagtgatggttgtacaacaataggaatgtacttaatgccgcagaactctacactaaaaatggtttaaaatggcaaatttcatgttatgtatagtttaccacaattaaaaatcttaatactgacatttttttgaagttgggtttattggggtataatttgcatttagcaaaatccattcttcttagatatacaactctgtgttttgacaaatgtatatagttggctaactactaccataatcaagatatagaatatttctatcaccccccaaattccttccagcctctttctagttaatcttttctcttcatcctcagcctctagtaactgctgattttttgttcttatagttttgccttttctagaatgtcataaatgggawgaggagtctacagcctttttggcttcttgcactttgcataatgcttttgagattcatccatgttgctgcatatatctgtagttcatttctctttatttctgcctagtattcagttgtatggatgatcacaatttgtttattcaccaatcgagggwcatttcagttgttttcagtttggggcaattatgaatgtagctgtgataaataactattcattgctgggtcaaatggtaagtatatgtataactctgtaaggagctgccaaactgttttccaaaatgggtgtattattttgcattcccgtcagcaatatatgagagttacagttgctccacgttctaagcagcatttaatattatcaggctttttattgttttggtttggtttgtttttagccttctaataagtgtgtagtaataactattgtggttttaatttgcatttctctaatgattaataatgtcccatcttttcatgtgcttatttattctccttatctctcattgctgaagtgacctgttcacttcttttggccattttttaattaggttgcttgttttattatttagttgtagatgatttttaaattttttgctattatagataatgcttcartgaacaacattgtatgtgaaaatattgccctcactttgggtctatacttataataatttcctaaagctactaaatcaaagagagtgaacatcttcaccatccttatatgcccatagtccaacagctcttcaaaaccattgcaccaattcactgtcctactggtggcagtttaataggcatgacaggccattgtgttgtcttaattggaatttgtttgattataatgctatggaactttttttcatatgattattaaacagtctgtgtttcttcttttgtgagtcatcatcccttgccttttttgatactggattgacatagaaatttgccatggctgtatctctacaggattagttctacagtatgtgatgctccatgccaggatcagcagtttacagtattttcataaaatcttaacttggtcttagcctcgtttctttcactttcggaggtcacgagttaatttgcgtagctggcaaggtaaaaataagagttgaagagaaagatttttgccctcaagttaaacttggacactgggtgtcagcacttctgtgagaggcagacatctctctgttgttcctaataaatagaaaaagtgttcttttaaattcctctctgagaaaatggccatgccacttagtttccctgttgtgagagtaacctcttgattcctctaacaactcagcattttatgtgttcacaatgaaagtacaattaaaatcacttacttcatgcttgcatagctctatcaaatagattcaggcagcaaacagttcctgtatataggcacaattcttttttaattattaaaattgcttatcttttattttattccaaatagatggtatgggatgtgatatgactcagaagtactagaatgaattttgacttaataactctaaaaataaaaagcattttgttttctctgacaaatagctctcgttcattttgatgctcgacagacagctgatattttataaaactttatgattgcctcttcatcaagcactgtaattgtaggtttgtcttctttgcaagtatggrgaactgggtattttcttttaaatacttgtcatcctaggaggcggattgcctatgcctgtcatgcaaatcaacttttcaggcatcataggcagaactaggaaagtagaacaatggaaaaatatatatttttgtctaaaatttatggatctgtgacttgcctgaaagagttatttgagaaggtttttataaactcaaacagatcctttaaactagatatttcccagactgcccaaaaaagggccsctgtcccccaataccacacaacactatgagaaagtagaattttattgcttgggtttttcttttcctcatactttgaaagatctctttggccagctttccattcagtgttaacccacactcgtcagtgtttgatgtcatgagaagaggactctggcttgctcaaggatcatgagtgagtaaatttttcagtcttccagaaggggaaaaggaagcatcattttggtatcttagggattaagacacttgctaacatgatatcaagaaaaaagcttgcacactctccaattggtatactggctccatgccagttacatagttttgggtttttccttgtttttcatgtacaaggatacctcagagaatggttgtttggctccagaccactgcagtgaaacaaatatctcaagaaagtcacataaattctttggttttccagtgcatataagagttatgtttacactatagtgtaacttatacatatagtgtagtctattaagtgtgcagtagcattatgtgaaaaacaatgtacatctcttaaaaatactttattgctaagaaatgctcatgattatctaagcattcagtgagttgtaatctttttgctcctggtagatcttacctggatgttaatagctgctgactgattagggtgctggttgctaaagggtggagtggctgtggaaatttcttaaaataagacaagaacaaactttgctgtatccgttgactcttcctttcatgaaatatttttctgttgcttgtgatactggtttatagcatttgtctcacagtagaatttctttcaaaattggagtcaattctctcaaactctgctgctgctttatcaactaatttcatgtaatattataaatcctttgttgtcattttaacaatgttcacagcatcttcatcaggagtagattttacctcaagaaactactttctttgcttattcataagaagcagttcttactgtgaaagttttatgagattgcagcaattcagtcacatcttcaggatccatttctgattctagttctcttgctattcttaccacatcttcagttacttcctccactgaagttttcaactcctcaaagtcatacataagagttggaatcaacttcttccaaattcttgtttatgttggtcttttgacctcttcctatgaatcatgaatgttcttaatggcatgtagaatggtgagtcctttccagaaggttccaattgactgtgaccagatccatcagaggaatcatgatctatggcagctgtagtcttctgagatgttatttcttaaatagtatgacttgaaagtcgaaattacttcttgatccatggactgcagagtggatgttgtgttagcaggtatgaaaaccacattaatctttgtttccatcagtgctcttggtacactgtcaatgagctgtaatattttgaaaggaatctttttttttttttctgagcaggtctcaacagtgggcttaaaatattcrggaaaccatgctgtaaagagatgtgctgtcacayaggctttgctgttccatttatagagcacaggcagagtagatttagcataatttttaagggccctaggatttttggaatggtcagtgagcattggtgtcaccttaagtcactaactgcatttacccataacaagagagtcagcctgtcttttgaggctcttataagtctggccacaccagttttaccatctttcactttggtttcttatctagatggtattatctatatggaataggcaagtgggttattgtgagtgacagaaacctaacttggactagtttgagcaaggaggtacttttcagggaaatgatgtttcacaaaactgccacrctgcaggcagaattagaaaataggccttgggaattrcagaaatagggctccaggtccaccagaattatttcctcttttcattccctcttggccctgtaagattggctttatttttctctctcactgtagccagttttcttctggaagagaaaacatggatagtgacagctcttgagccttttagcttatggcttcagctgcttcagaagagatcaaccaaactctattggtcctaactccaaacatccagggaaggaacttcctgcccctgatcctgttaactgtggccagtagtgccatgtaagagcactgaaatttttggaaagaccttagggatgaagtattgttgtcagaggaagaggagggactggtagtaaaaacaataggtgtacattctttgtgggcagtgctggattatatagctaatcatggggcttggatactggagttcattagtgcatcttgtaacaaggccacttttgggggtgtggctcccacatggataattagctggatcctggtcttcagctgtgtcctgctctatccctgactagccatctcacaactgcttgttcctggtcctgggggggtacctgcggagagaaagtgtgtgggtggtagatcaacagaaatccctcgccactgctagaaaaacaactcaaagaacatgtatttatgtagatgatttcttataatgtgggatttccctctccagcaattttcctttgccaactctctgaagcacagttttggtaacattcatatgatgctgcaatcataggataccataaagctctgcagagaggcaactctggttgtcctagagaatgcatttgtcaaatatatgtgcctttgggatatattactagctattagccattatctttcgtagcttttgaaagcactccaaatttggaatctaaatttctgggtttgagtctcagcttgatcacgtattatctcagtgacctggagctagctagtttctctctctgaaccttaattctcaaacttataaaattgggatagtggtacctgtatggaacagggctatataaactgtgaaacaacaataagaaatgtttctttttctttttgttatcacctgggcctgaatgacagagtttttctccatctcttggcatttctcctagctgtgtctgagtgaataatcagggactttctcagaaaagagaaggaaatgcaggaccattggtaggaacttgacctttgtttctatcatactgaggttaagcaaactctttatttctgtattcttcgtctggcatcctttggggaacctcttcttgaggttaaggtgagatgaaggcttcctttggagacacgttcaggccaagcttcaygctctgaggagttgtttcaggaagaaagagagaggagctatgtgtatgttctcccagtgtgaatagggactaatgtgaaacatatgccattgcctttaatcaggctattaagcatttctcagttttgatggaacctctatctgagaggttcacctatagcagtggttctcaactaggggtgatttttgcttcccagaggacatttgacaatgtctggagatgttgttggttgtcattgctgggtgaggtgggagggggttggcaggaggggttgccacaggtatctagtggttagaggccagagatgctgctaaatacactactaccatgcataaggcagctccccaccaccaattgtctgtccccaaacatcaatacaacatcttcttcttagtgtggtggttttgattgttgagctttcttttggtggagaaggagaaaggatttttaggccatgatttttattctcatcaaaaggcatatattgagaccacttcatacccgctaggatttttctgaaatttaattatgaatgccattttaaattccagaaggggttgccttacttttgttaaatacagtactctttattccctcctagaaatggcacagatctctcttggagagggcaaggtgactctactccccttctcatcctcttaagaaatatcatggcttcttatctgttatatattgtctgtggtcttagaagaaagtctgtgctccagtttggccataaattaactcagagccatatgtattgagcaatataccccaycaagctgtaaaacaaatgaacaaatggaaaacaacaaaagaaactccaaaccaaccaaccaatcagaaacaggtcactgccccatgacagttttgaagtgtgtgtgaaagaggagaaagagctttaagactgtccattctggagggcagcaagatgttgttgcttcrggtagcataagagggaacagattctcttctacaatgccatgtttgtggttcttggaaaagcacagcaaaacctttcaaggcaaactgtttcatcattctgggataacaccaagaagctgcatggtgctattaaagcagccattcatgttggtctgccttgtcttctgtagaggtgggttttttaaactgtggatcagctcctttggagggtcatgaaatgcatttagttgattaaaaccttaagtaaggaagaattgaagagaaaacatgagtacatcacacaaataaagagtactgttttatgaaacattatgtaattttatgtatgtgtgtatatatatatacacacatatatatacacacacacacatctggcttgtgatgtaaaatacattgcttaatgtaggctatgatcaaaaaggcttgaaaatcaccactttatatgcttttacctttgttctagaacataggtcaattgaagcccaaagtgtattttctgttctaactcaggggcctgagtttcattacctgcttacctgctcattcctaaaccagtcactacccaggacagtggatgatttgcttatacgaatctacattcacccacaggggagtctggagagctgcctggcctccccagcatgcatgttgtcagggaaggctgctgcagagaaggcagccagcacagccgccccaggaatggcctgtggggatagagaaagtagcattagtttaggtacagagaccaaggtaaacacccagttatggcaactggggctggggcttggggagaaggtaaaagaccaatagttaatcaggaaaattcttttgagcttagagtagcagtgtggttaacctggtgttccattgccaaatttaagcctggagttctttgaacactgccaggcttggtccaaaacattaatacagcctataaaattttccttctgtgacatttcccagtctctccagatctgttcattcattcattcattcatttatttttgagacagagtctttctctgctgcccagactggagtgcagtggcatgatcgtgattcactgcagcctctatctcctggggttrtgattctcccacctcagcctcccaagtagcagggactacagacacatgccaccatgcccagcttatttttatttattttcatagagattcgtagagataggttcttgtcatgttgtccacgctggccttgaagtcctgggcccaagcaattcctccaacttggcctccattaagtgctgggattacaggcgtgagccactgtgcctggccctcttcggactccttactgtctactctcccctgattcattaggtttcagccacaccagccttgtttcagtttttcagatatgctggtttcttttgtgcctcaagactttctgtgcaggcctttttctgcatctgggatgttcttcccacattgtttcctctgacctactccagcttcactttttagctcatctgccacttccacagtgaagcttccttccctgacctttcrcttatcataattgagacctatttaatgtatgtctctttcattaagtatcgcaaggacagccatgatcaccatcttctctactgtaatgccagggcctgctgcatggcatatggtcagaagtatctcgattgtagagtaagtcttgggctctgggatggagctaagcctgatggcatcaaggggccccggcagagtaggtggggaggaagaggcagcttgcagccatctgggctgggcttgacatcttttacacctttcccagcctcgtcctcttccctcagatatatttccttggtcaagttgattttctttggcttatctctatgtgaacagtttaatacacagggactttttaaaaaataaaatgaagtaaagtctccagaaattgattcccaaatcaaatcacacttcagtaatttaaaagaaatagagagcaaaacatcatgtgtaattcagtagatttttgatagatcataattacttacacatgtggctacaccccctttaatttggatatccaattattaggtgtcatgggcccagtcacagctccgtggatgcgtctgtggatgagtccaactaatctgcaattggaaatgtattaacacccacttctccttgagcgaagggcatttctagagcattactgttgcatattgttccagaaggagccatagtgtgtggaaatgggaaagatggtttctgccatcagggagctggttttgaactgagttacgaggatctaactcattaatgatcagacccatgttctaagatataagaactgtatgtaattgggagttaaacatagagcagctctctggatgttgagaggaagggagattggtgtgagctacagaagcatagcaccatcagggcaggtgttggctcacagagttagagccaggaggggtctgagaggtccgtttatctgatcatttcattttatagataaggaaactgatatattatttctcttcttcctctgtaacacctaattattttctatgagccaaactgtagtagactttttttttttttaaagttcttcctcattcagcttccccagtggcaccagttttcccttttgggaagatcttattgtgtgttcctcggggggagtcttgctcaccttggaagtggtaggggatttgggtgcagggggacttaaccttgaccacacgcttcttctgactttactcttaagctgatgatgcaacaacagcaagacagttgatgtttataatcataccaatagccacagtggcctaagaatcagatttcccagaatctctgacctttgccaagtgtattagtttcctatagcttctgtaacaaatgaccacaaatttggtggcttaaagcaacacgtgtattttcttacagttctggaagtcagaagtctaaaatcactttcactaggctaaaatccagggttgtgcttcccatctctcctccccagaggctttagttcrkttctttgcctctcccagcttctagagctacattcttgtgttctttggcccttgggcccttcctctatcttcagagtcagatgcagaataacttgcttctgtccttacattgccttctctctctctagtcaatcttctgcctttttcttgtaagggcacctgtgattgtgcctcgagtccacctggataatccaggttattctttccaccaccagatccttaatcccatctgcaaagtcccttttgccataacaggtaacgttcacagatttctcaattaggacctggatatccctgccccaacaaggtttctgctttcctcttttcccagcctggtcttccaatatcccctcaattctgtgagttcctggtatcttctcagtatacctttttggagggagggagctgatgggtctgcagtttaagacagttgaaatctgtttctgttgtttatgaccaggaacctccatggtaaatcagtgctatgtgcagaactttacaagcattatttttttttaatccttgttttaactttcttaggaaggcactatctcctttttccaggtaagaaaactgtagctcagagtggcaatttcaaaaagcctgacagctagtataggtgatggaactgggatttgaaactagccagtgtgactgaagagcgtgtgccttatccctttctcagaatcctagttcaactagcttttggtcttagaccttttccaaggaggaagtagaatgtcatctgggccctgaggtctgaatcaaattgtttaggcaggggagagaaggcaaaggagaagcattccaggtaggagagaggctggagactaagaagtgaatccaagagatttaaaggaagggacatgacaggtaaagtggaatgacagataaaggaaccaaccacgtatggaatgcttttgaatggacacagcaactcatttatgtcaactacccatgggaatgatattctgactcaactttgtgttggaaattcagcttgtattaggtcccttgctgcctcctcatggcctcctcatcacatgggctggttaaacatctaacatcctttgctagtgttagccttttctcacagatgctgatgaacagcctgtctttcaaaaacttaacaaggttctttgttggtatcgatatgggtaatttctggagcttgggagacatcctggacctaatggtgtaagatctctggcttgtgtctcctttcagaagagaaattggaaatttttttctagggctgggacaatgactaagaagggagctctttatctggtgttttctggttactacttaagtgtaactgatagatttagcaaatgaaaatataagacatccagttaaatttgaattttaggtttcagataaacaatgaatattccatgcattgtacaaayattgcactaaaaattatttatctgaaattcaaacttaactgggtgtcctgcattttggctggcaaccctgaacctatgaccactgtttcagggtattttcaggcatagacttgtacagtgaatgtgcctgtgaaaagatattatagacctggattgacaaggaggctaggaaagaaccccaagttcaaagggartgcaaggttggagaattctttgggcgactaacttggggagagatgatttggttctcattgcccagagcattgcctctgtcttctgttctgctgtgccactgtgctatggccacratgagaaagacttgtgctgcatcatcaggattgtatcaatctccattctcttcctatttgctgacacctaaaagtaaaaacattcaaggtagggttgagccatgatctctaacaggaaatagttattgaacttgactgtgtgcagaacatgatacctgtgctggtggtggtcagagggctgagtgtactctccaactgtcctctgttgtgggggcaaagtgggcattaagcacccccctgtatacagagctttccaccgggctgtgtgcctatagtgacaaaacaaatggaaaacacgcttgtgctcttgaggagcacagatatatgcctcttgggacagcagagagcttaggcttttattaactcaaaattggagttattctcagtggccccactctgattttgtggtgtgtgtgtctctccatgtgtgtatatagaaatattgcagcaatcatcacctgccattaagctacttttgtacatagtaattaggagaggtgcatggagtctggtcctgagagtgagatatggcaagtgatctgtggcgcttggtaatttgtggccttagaatgaagggaagaatgctcacttgcctgtttggggatgaaaactaaaaaatcttgatattttttagcaacacactggactaaggaacagtggaccctcccagcactgggcaaacattacacagcgtaatggcagggtggggaaaggactggatttgacatcagaagagaactgactttaactcctgatcttaccatttattagcaatttaattttttctgagctttggcttgctcttttatgagatggagacaatagcaatatgaggaaaattttgaagatttaatgacataccacttgaaaatgctaactgacagcaagcaccttgtatttgtcactgcggtgtttcccattctcatagcactttgtaactaactctgttataatgcttcatggtgtgttataattatttcttttatgtgtctgtctacttccactagactgagaatcaagggccattttcaactctttacttttccagtagcctcctgattaagccctggtacttacaaggcccatagttttgctgagctgtgtgtacttcaatacttaagctttgctaggaggcaagtctttaacttctgagtttccattctttcctctgtctctctagctctcttactgagaactgggaagatcccacgggacaggatctgtccagtcctcagtaagagtctttcaagaatattaccatctcaacaccagtcagaatggtgattattaaaaagtcaaggaaaaacagatggtagagaaataggaatgcttttacactgttggtgggaatgtaaattagttcaaccactgtggaagacaatgtggtgattcctcaaggacctagaaccagaaataccatttgacccagcaatcccattactgggcatatacccaaaggaatataaatcattctgttatcaagatacatacacatgtatgttcattgcagcactatttgcaaaagcaaagatgtggaatcaacccaaatgcccatcaatgatagactggataaagaagatgtggtacatatacaccatggaatactatgcaaccataaaaaggaatgagatcatgtcctttgtagggacatggatggaactggaagccattatcctcagcaaactaacacagaaacagaaaaccaaacactgcatgttctcactcataagtgggagctgaatgatgagaacacatggacacagggaggggaacaacacacactggggcctctcacgggtaagtgtggggagaggggaagggagagcatcaggagaaataactaatacgtgccgggcttaatacctaggtcacgggttgataggtgcagcaaaccaccatggcacacatttacctatgtaacaaacctgcacattctgcacatgtaactcagaatttaaaatttttaaaaaagaatattagaagatcctcattagactctaaatgcttgagtatagattcccagtattctcctgtgtactcaaacacatgtatgtttgaatagtatcccagcttgctaccctattctcagtaagttctaggatttccttgatgttctctccttttgacctctgcttcaacaaatttattaatttaatcagtgcaattcaagttcaattcatcaagcctttattgagtgcctcttacttgccagtcactgggctaggttttgggggtagagatgagtaaaatggtgcctccattagaagtgtttcagatttagtgggagagacagatgagaaaacagaatttctctaggatgtggttagggcagtgatggaggtggacacgttatgggagcacagaatagggctattttcctttattgtctttttcctctaagaattccattgttgrccaggtatggtggctcacacctgtaatcccagcactttgggaggccgaggcaggcggatcaygaggtcaggagttcgagaccagcctggacagcatggtgaaaccctgtctctactaaaaatacaaaaatcagccaggtttggtggcatatgcctgtaatcccagctactcgggaggctgaggcaagagaatcgcttgaactcaggaagcggaggttgcagtgagctgagatcgtgccattgcactccagcctggatgacagagcaagactctgtctcaaaaaaaaaaaaagaatcccattgtccctgcttactttctaacaggtgaayggggagccggctgtcattcctgcctcaaggagtattggaactgtgggagttaggaagctgccagtggccaatgtgcatcaattaaagacccagttggtagccctcctgcactggrggacagaaaagaacacttggaggcccaggacagcacaaggccacaggctgcatggccctggctgcagtgtggttgggagaatttggggagcaggtagtttcagccaaagactaacttggtgacatgcgcatacctcatggctggctctgtgagacccctgcaacaaatgccacctttttccttccctttttcaagttagctttgcttttgttctctttcccatttctctgacatttgcttctccccccagttcttatttatttcctttgttgtttatatccctacattttcttttactgctcactcttctatcatcttattcttctttccctctaccatttttcccctctacatttgagccttctttgccttttaattttatctttctgcctctatcaccatgttctgaaacataactgttaaactcagggttggagaggaaattttcatttccaacagggctttttatgatatgaaaagagtgtctcatgtgtatctgagtatcctaggaaacagaagtctaatttctaactcatattctgcatactgtgtttgaaagacatcatcatgaaaggagagtctcccacctgggcagcacaggagactgtgctgtgcaccttacctttattacaagaaccagccaaacaatgattccttcttttttgtggttctctatctccacacctatccttgaagtttctctttatctckctctttctctttttctatttctgtcatatttttcagttctattttctatgttgcttctcgttcttttttctctttagtccttccctrcttattagaaattatatgaccccctccttaatgtctttccttggccttggaagatagagtcaaaaggagtgtggaagactccactgccccaagtccccccgtttctgacgacggcatggaagtgtgactcaggagagatggggaagattcagaaaccttgtctagctcttgagattctttatgagtaggatttctttctgcttcttatttttaggtagtatgaacgtagactcagagaatcttaaagttgacaggaatctctattggttgtttarataacctttaccccatgtaggatccctctttacttcctaatgatgctctacaggtagctcccggatacttggagttttgggaagggtgccagcacatgaakccgtccgcttggctgttggcagcactaattgtgtcagttaccgcttgcgattctgttgtcctggtctgtatgatttgtacctaatgattgtatrtctgcttccgagggccatagggcatgcactttccatacagttctttttctgagattgaagacacgtcaaatagtgaaggaagttcaggtaccttctttaatacttgaactatttcagagaggttccatcagaaataaacaaaacaagccatttttgccaccctttgactatagaggaacccagttttctgaatgcctcatttcctgatggttctgagtagctgagattgttctggagggattatgggtgagaaacttcctttcattcttcacagaaagaagaataaaatgagcaagttttaaattaagattttattaatattagtaagctttgcattagccacaatgtctgtgtgtacattatagtttatagaacactcttaatattaaataccatgtcattttatttttataactagaccacgatacccccttattttagagatgacagaagtggggttcatagaggttgagagacttgtgttgagttaccccattctcaacagagtgagtcagacttaaactcagttcttctgctcttaatcttctgctatgtctttcataaatacatatatgtccttgtctctccaaagtccctgcaatgtcatgagattataggaaataagttgtctccttggtgtacacaatctaatagaattatggatttgtatgtgtgtgtatttctggatttggctgtggaacatggaaaaataggaagaaatccaattagggtcaaagagtggtttgtgcaattataaaaatactgatactatgtgaagaccattgaaattcttctccagttgcaagcatcagcataattgatttgtttggtaaaaattctgtcaaggtagagatgagtgagttacttttttactgcagttaatccagagaaatttcctgaaggagatagacaggggaacctaagaaaattttgaaataaaaaaatacaagggcctggtgggttggaaagaggggaaggagttgaaacagggcagagaggagaaaggggacaagtgttggggacaggaatgggacagatgttgtggcccttgtgttttgcttgggatttggaactagggttctggtatgatgataagttttccttctttgcaaagtaaaacccagatggctaaatttaattccacttggagccactggtgattcacccaagctcaggtgcacccacatacagctggcgtcagcgctgtgtgctttccaggctgagcttgcctcagccccgcttcctgcatggaacaagaggggaaaaccagactggtaaccttgacccttctgtgtctctgtctgcagcatcctggccactgcaggaacccacttcaatactcacgtggacctgaggaccctccgggctgtgcgtgtcctgcggcctttgaagctcgtgtcagggatacctagtgagcatctgccattctttctgctctgctaagaactttcttcatgtgtcctcagctggatccaggtctaagggaatttgggataaacaaacaatattcctcctgggaggaagcctcagtggtaataaatagtggagatggagcaatctggtgtaacattttactttacatttaactttttgcaaatataaaagataatagaaaatctttacagaaaatgtggaaagtaaacaacaaaaaagaaaagtgctctttatcttatcactcagaaatcacttttgttaaaatttcaatatttttcatttttcccctgtgcattttaatataattgaaatcgttatgtagattgtagttttatatcctgaaataagtattttattttcctaaccttaaaaattcttggctgagtgcagtggctcacacctgtaatcctagcacttgggaggctgaggtgggtggattgcttgagttcaggaagagtttgagaccagtctgggcaacatggtgaaaccccatctccacaaaaaatagaaaaaagtaaaaaaaatgtagctgagcatggcagctcactcctgtagtcccagctactcaggaagctgaggtgggaggatcacttgggcctgggaggccaaggctgcagtgagccaagatcacgccactgcactccagccttggcgacagaccgacactctgtctcaaaacaaaaaaattcttatatgtgttatgatttatttagccatttttatgttttatgttgctggatggcataaaaaataaaaataggctatttccagtttttctccaactataaatgtgctgcaacaaacacctttttacttaaatctttattcaaatctctgactgttttcttggctagaatcctagaaatgcaatgtgtgggtcaaaggatatggcattttctgaatagtgcttgtactaattgtgcttccccaacagagactgagaactgggtctgagatagagtgaatgggaagatgaactttatcccagctcttgaaggatttacagcctagcagagctgggcytaatttcctttaggaaaggagcacattctaataaatttaatctatcagaggcagacggcagcatggatgaaaccaatgagggaatgaaactaatcctcccctatcagatggtgctgagggacagctgcattggtcattctctgtccttccttctaggcctgcagattgtgttgaagtccatcatgaaggccatggtacctcttctgcagattggccttctgctcttctttgccatcctgatgtttgctatcattggtttggagttctacagtggcaagttacatcgagcrtgcttcatgaacaattcaggtagggtcgttcttttctgtcttctccttttcccttctcccctctgttaactggggtaatttcagggcacttggaggctcattggaaaagtatgtcctattctgaccctggaattagaatcagaagcttctagtcagcagccttttgaggcacagtcaaccaagactagatatcctcacttgacattaatattgcaaagcaaatatgtagttggaagatttcaaatagatggtcttggctcccctatcccatggtcaagggccatgggaatgaacttgaaaagccatctgtctgagccaggcatagtggcacccacctgtagttccagctactccctggaggcttaggcaagaggattgttgaagcccaggagtttgaggccagcctggacaactagtgtctctctgtccctatctctctgtctacaraaaaaaaaagtgcaacctctctgaatatctgaatcaatacccctttactctttgtacagcagcctctgactgaataaataagtactttttgtatagtggcctctctggcccacaggctggtgagatctaggagtccagagtcagagttgggtccctccggatctgtggagacattttcccttcatgatccttctcaccatcttctcgctctctgttttgacccacacgtggtatggaagaactgagggagctctgagcttggtttgcaagtgtgcttgggagattgttagggtacacaaccccaaattctcatatctttgtatttcatttgttcttttcaagttgagttgagtatcctaggaggaaaggagatgggaggcaggctgaagaattccaaataagtaccatgctttttatgaaaagaaccttaaaagaacactttccaccttggatttctattttttatttttatcttttattcaaaaccaggaatccacgctggaaaaacaaggagttaaacccccctaaaaggaccatagtttataactgtccccaagaaacccaggaagaactcagggctcatcctggagtctgaagccagaaaacctcactttgccttttcctcaaagtgtgccgtgtgattcagtcctcttaattcctgtggtacttcaggtgagggtagaggatgaagcttgcagagagcaggggactatgtggaggagaggctccatttttcaggagactgggaaacattggatkgaacacatgatatgtgagctgggaggtgcagagaggccagggaggagagggagcctgagacaaaaaagggcaggcctctttccgtgggggaatggaattgcttgcctatggcttcctggggtcatttccagctcatgcgaaacaccatgtgatttatctcctaccctccaaatgtgtctgcaggtattctagaaggatttgacccccctcacccatgtggtgtgcagggctgcccagctggttatgaatgcaaggactggatcggccccaatgatgggatcacccagtttgataacatcctttttgctgtgctgactgtcttccagtgcatcaccatggaagggtggaccactgtgctgtacaatgtgagtagagctggtggggacctggaaggaggagggaagaaccctggatggaggcttctgtggttgtttggcctggctagtccggggacagggagggctatggatataggtgtattgggatgggaggtgaagactcaactgggataagccttagcagttcataaccctcttttgtctggcctgttgctacgtacaagtacacagcttcttaatacgattaggaaattacatcctatgttggataggtgaacaaattagttaagtcagatcaacttaatagttacagaatatgttggttggacgtggcggtagggtatagtgaagggtactaatgtatgatactggctgcccagtagaattagctggaagccttaaaaaattttatcaccccctcaggatctgggagaatttactaaaaaagaacaaaaagaaaagaaaaaaaaattataccaactgagctccatcccacaccaattaagtaggaatatttaggggtgaaggtcattttagaaaagtcattgacttttctaaaaagcttcctatctgattctcgtatgtagccactgtcaagaactactgcattacacacacataaaaagcatgcttaattgtgagattcaccaggggtgcttgttgaaaattcagattcacagaccccttctctggagattctaattttgtgtagctttgtatagctagtgagctgtgcttttttcaagtgccctggtgattcacatgatcagacatgttgagaaggttctgagttggtctagctgcctgtcagggatgttggggattcctgcatggggacagaaggtagggtgatcatgaagtctcttccatcttccagagtctaattttaataagttakcaaaggcttggtgcagactctatgctcaaaaatgagagtgacttgaggtatgtggtttgatgtacatggatcctaggtgggtaaagcagtttgggcaggtgcttttgaaggactgtacccttacctgcattcagccagcccaccccaaaacagtaactttggaatgatcatgcctcttatgcacgctcccaccgtctgcctttaccttaaggtgccgtctgtttccttcagttcttctctagatctttttagcctgattctatctgtataaaacttattaggtggaacataaggtggcttatacaaagcaccctttagaaagagctttggatataatttacactggagggaaaggaaatgctgtgtctcagaagaaactcgacgagactataatgcccaaagagcaaggattgtgtaaggcctgtaaaaggaagtacttagtagaggtccattgctaacctggatccattcccacataggatgagcaaggcaggactgaagctttgcagaaaagagtcactggctattatgctaaagctctaaagggcagtgaagaagtcccaaggaccagcttacacccagcaagcccagggatgaagtgtgacccagaaagccctggaggacactctgcagttctcaccagctgtgggargcagcaggaaggaggggagggaggcaaggttgatgagtgcagtcactcctcatttgagatgtaaaggttgtcttgaggccatgccactcaaattagccaggcacctctaggaattgcagcactggccctgcagtggctggtgtcacatggagggctttgagagtgatgcatttcaattawatgtgtagactcacctaagtgatgtgataaatgcattgaaagcctgaaaggagaagtgttgcatttgaggatacaggcgtgattgttggtcctctttagccaagattcagatggtactgagaggagaaggagcacagctgaagaaccactcattttttctttattagtttctttgttcattccttcattctttctgtgtttattaactgagcatctattacatgccaagcactgtcctaggcactagggaaatagggagaaaaaagtgccatgattcctgctatcatagtgctctcttcaaatccctctctccccagttacctgtcaaccacaggtttagaagttacacacaggcagagattttgctcctctctctagttttgctcactaaggagggaaggagggaggggaggagatcaagttgcagatactttgaaaccttttattgcatgggtgtccagggcccacagactcacatactctgacttccagcctgtcagtcattgaacttgagtttactgaaggcctcctgctattctgatggctggatttagggctagggggactgttacccaaagactgtctacctgtttggactgtctgctacctgtttggactgttcctacacacacacacacacacacacacacacacacacacacacacttatacacactggttgcgtaccatgaagttaactatgaatgactagtcagcttagtattataaatacatgtatacatatatatgtgtgtgtttctgcatatagaaaaatgactcactaagcatcaccacaaccaccaccaataagatacaaatataaatataactgtattgattttcctttctaccactcctcattctgggaaggcccagttcacccagctgctggatttgttcatgaagagcactaagagagggggatcccctatttcccagccctatgcaccttctattcagtggtgcaacgaacatgtaagatttattgttgttagttacatccaaaccagtaggagaatcttcaggtttacccagtaggaagaagctctcaagcatgtgggctcagtttaacctttttatatgcaatgtaaatgcttccctcatgtttgcctcccttttctgtagcacagactcttcctagatgcctccctatgaccttgtgttgctctgccaatgattactattaacttcatttgcttgtggcttttctcattataatgaattgtaagggggagggttcccattgtcaaggcaacctggagtcacctgtgcttcatttagtctctatccaaatgtcaactgcttggtcaaactccaactatattcttggcttccctccctcctctggtggaaggaatgcaaaactgtcgacagttctggctattgctacctgtttgcactgtctgtcccaaaggtctcctcgacttgcaaactctcttctttacttatttctcgtaacctgataagtatgtcttccacagtacaatgtgttctccttctgatcaatgctcttcattcaacaaatgttactgtggctcgctaaccctcttcacctgggctggaggtggctgagagaagtgactttcttctgattctgatctgagtcttatttctctttgtcattatagttttatgttatctgctgattcagttagctcttttattgtatcaggactaattcccagattgcagaggttcccagtccctgtctgcagttactcacatctttgctcctgaagtctagtatgtttcatttgtatttctgtagttggagttatttctcktcttacttactgttgataaactcatgtagaggcagaaatttcttggaggtgtactgtttctgcagctttgcaggtatgctttccgcatctgttgtgactacttaagatgctccaagctgctatggtggaaggggttttatggacttcattggcttttggcaagaagaggcaactkaaagtctggatgctttctgagagtcttcccaactcctcagaaatcttttggtctataaacaatgactgtggctgtcttttaagttgccttttcacagctgcatatagtcaggatttattaaatggttaacagctattcactttctgtctcattgagattttgctttatgttcctctatgagcatggtgaggcataacatccatctcgcagttgatgaaaaacyaccattctctttatgaagttcctctcattttgtggtatctacagagaatgctttgggttctgagatccatgagactagggaatgtggcttccatctttgcttcagtcttttcctaccacctcctccacattatagtagaactactcaaaactaatttgacaaataggtggcaggagtctatgattatcttatggtgctagagtgataagatgaaccaactgacctaggatcaggtgtatagttcctaaaatttgtagacactgtaattgtgactggtattgtagatactgtaagtgttactgtaattgtaattggtatccaggatcactcatgctctggaataaactggtccccccccygcctcaaacaaccccatctggactgccctgttcttatgtccttgcatgagtctgggatcctgtaatataggtgatgcttggaattggatactagtatctgttcatctgttacttatccatagagggattggtaagtggatcttggaagttactttctttttcccatgacggctgggaggtgaggtgtatgtgcttagtgaggagctatgataacttctttttaattggcagaacaccttgcttgtcaggcttttcatggagaggagagagtagagggagagggaaactatttcctgaactcayagtaaaggcttttcccctctgtttacattcatacataagtatagattcattcactaactcattcattcaccaaataatttttaagtggctactatgtgccaaatactgttctagatgttggtgatacagtagagagtaaaacataggaaagtcccggccctcatggaacttatattctagtgggaaaatgcatatagaacataaggaaaacatatggtatatcagatagtgatagatgctgtggagaaaaaaaatgtggggaaaaagagaacttggttgcaattttaaatggagatgtcaggaggaccacattgagaagatggcattcgaacaaagacttgaagtgggtgggtgagggagtgggccatgtggttatctgggggaagagtctcctgagtcccagatagctgggccagcaagtgcagagatcctgagatggggacgggctgggtgtatttgaagaacagcaaagagcacagtgggttgaactgcagtgagtgaggcggaaagtaggagatggaatagtcagtcagatcatgtggagccctgaaggccattatacagactctggtttttactctgagtgagatgggaaagcaatggagggttttgaggaaaggagtgacatgacctgacttgtgtttgaaaaaggatcactccacctcctttggtagagcaaaagtagaaacagggattcaaatcaaggttatagcaaggatataaaaaaaatgatagaggcttgggccagggaggtagcagcggaggaggtgaaaagtggttggattctgcatatatttttaagtagagctcatgggattcttcgatggattgaatatgagtttgggagaaagcagcaagaagagyggagttgccattaactaagctggggaagaacacaggtaaagtatgttgggaggaagaggagaattgagtttggatgtgttaaatttgccatgctcatttgatacagtagtatagggaagggggtgaataaatgagttcatggtagaaggcttggctggagaaataaatttgggagttttcagtgtatagatggtaaagtattgagactggccaaaaccaccaaggaagtgaatatagacagggaagagaggagattccaggactgagttctgatgttaaggtgaagaggaaaacggttatcagcaaagaagactgagaaggagcagtagggaggtgagaggaaaattagaaacctggtgtcctggggccaagtgaagagcgcgctgcagagggataaagtagaggatgatcaagtcagttctctgaagaagtgtttttcctatcatatgattattcagttaaaaaaggttattactagagtatcttgcaaataatttcttggtcatttgtataaattcatccacagattctcttgaattcacattcatatttactctttcaaaaactcttatctatatgctttgctcatttgaatcaaatgcttcagatgggtcaaggaaggtgagggctaagaaccactgaatgccaggagcagtttgagtggagtaggaaggatttcagagagcaatggaaacagcgtggaagaaataccacttacatgctgatgggaatgatccatttgagataaaaattattgttgatgaaggagagggaggagaattggtggagtgatttccttgaacaggtgtgtgtgtgtggtgtggggaggtctagaccacagatgtagggattggcttagataggagctctaatcatccattcatagtactaggagtagaggaagaacaagtggctgcaaaggctggtacgtgggtagatgtggtgttggaatcttgtagaaattctcttcctattgcttctattttctcaatgaaagaggaagtaaggtcatcagcagagggtggaaggaggaaaatgttgaaagtttgagaaggtataacatagttttccagaagactgagggagtaagtggagtaggaaatgcattgggttgctgggcagctttatggactcacttggagttagttgtgatgaagttcaagtgagaccagtgagcctggtgtgttttcctctggtcacattcagccactgaatatgggaagtaggtggagatttggcttttatgagaatagttttgccagttgagcacaataaaatgagagaagatcaagagagtgactataacatagccatggaatttgagctggataaagagcaaagaggtggcggagaaaccgtgaaaagggaggagagaacgtggattatagaccgtttttraaatgtgactcttagggccgggcgcggtggctcactcctgtaatcccagcactttgggaggccgaggcgggcggatcactaggtcaggagatcgagaccatcctggctaacacggtgaaaccccgtctctactaaaaatataaaaaaatagccgggcgcagtggcgggcgcctgtagtcccagctactcaggaggctgaggcaggrgaatggtgtgaacccgggaggtggagcttgcagtgagccgagatagcgccactgcagtccggcctgggtgaaagagcgagactccgtctcaagraaaaaagaaagaaagaaagaaagaaatgtactcttgaatctgctggacaaattcagtctgtggagtaagttgagaaacctgtctcactgcatagaagtagggagtgggttttgaaaccaaatgttctgatttctaatttgatgctcgcactgcccccagtggaaggagagtgagtgtgtgcatgtgccgcacatgtgcagagtaagctgtgactctgggcgccggcgcaccgctgggccctctgtggcaccactcccagggtgtctggtcctgtttcagctcaattcagaatgtgaacttggggaacatttggggactgaaacccaccaggcccgcccacctacctcactagcattgtactctgtcatcttggtttcctcctcagagtgtctgtctctttttttaaacacacttaacgttgcagcttatgatgctgactttggcagcctgttctgttaatacttgtcctctctaaaccctacagtgccttcttcttggcccctgtctgctgggctgggagcctgtggtccacagccttctccccaccgctccctccctgggaagaaaccggcgttttctttctttctcacacttaactattttcccatccatagcagtctccaccctgaagttattcctactcattgcatttctgtcttggtttgtcaaaccaggatgccatcatgtttgggatttattccaaatgtgctaagtgtgcctcctgatctggtgcctgaatttcacaccacgaaccaggccagtctcctagtcttttgtctgtgcatagccattaggctggctcagggctcctttcctttttgtttcatttactctaatatgcggtttaatttctaatccatggccaaaggcctcaggtgcctgatgtgtcargcagctttgggctatgatcttcctgttctcaggcaacaccaggccttaggactgaggggcagaaattagctggaggtggtgcgttggtgactcaatggctgtttcaggtacttttcactctggaatccaaatgctgacagaatctcagccaggtggggatggcacagtgccagtatatggcacactaggaaagccaagaagtctttattcactgttcctcaattcattattcactcgaagacttatgagcaatttttttcatgcccttcagagtgtggtccatcttggaatcatccaggggtaattattgtaattgcagattcccgggccctgccccagatctggtgggccagcatctctagaggtaggaggaaggaatctgtattttcagcaagctcccatgtgattctgaggccacgctgaagtttgagaaccactgttctacatcaatgtaattgccaggcagtaagagggtgacatggcacataaatgggagagtactgaagaaaaaggcacacttctgccttcaggctgcaagcctactatgtgaatttccatgaggtcatgcgttattcaatgtttgcctaacataaagtgattgacacacagtgggctctcaggaagtagttaatttatggacttaggtcaagaaggggcaataagtcaggtgcatgggtacatacatatacttgtaacaatagggcaaactaaatatagcgaataattgggagatatacaagcagagatctctgggaggattgaggagagagtggataatttaaagtgaactgctgagcctggcttggtggctcacacctgtagtcccagctacctggaaggctgaggcaggaggatctcttgagtccaggagttcaaggctgcagtgtgctatgattgacctatgaatcataggtcagcctgggcaacatagtgagactccatctctaaaaagaaaataaaataaagtgagcttctggacagcccatgtagaaatgtgaaagctggtgaactcaaggggagcccatgatactggattgtagcctgttggacaaagatgtcagagctcttgataacacatcaaaggcatcatttacccactgggtgcttagatgctactttatatttttaccttcctttagggacaaggctcagaaactgacttgaaagttagtttgcccaacccttttggtgggagggaagggttggatgtactaactttcccttaaccatcctctccttagctggtcctcattccatgcctgttgaaaacaatatgcgtagatttacagacctttgcctgcctccagttccctatgttgcagttagatgtcagctgtttggccacagcgaagcttcagctgcagctttccctgttgattgacatgtgtgccctcaattacacctcagttccctcccaaagagagggaaggattgaacaggatcttttctcctttaaggtgccaggtactaggggccccatttacacttctggagagctcttttaaaagggattcctgagaacctccactcttcactgccttccaccttgagccccattgtctgtccacaagaggaaacaggattttgtgcactgatgaggcagcagagtagtggagtcaattacaaaaaaaaaaaaaaaatatatatatatatatatattgtatttgactgatgagtacagctttggtttatcatctgcactggaatatctttgatgttttgggaaatcacaacactcaaatcagataaagaagccacagtgacaggaccaatgccagaggacctgggatatcttctgacttttgtcccctcagcttctcctagtgccccttttcttgagaagcagtgacccaaggcggggcccttccttgcagtgtgcagtcttcctcaccccaggagctggtgggtgggtcacagcacctgtgatagtcagagaggaccacttgaatttctgttctcctgagggtgccttgcaggtgctcccacccctccctcccactctccccactcaccatccccaagccatggccttcactccgaacccaggacttgtcagctggtatctgtggatgggctttgatggcatccataaattttgttgcaagttttgtttttaaaatatatcttttaactaccacattttcttgaatctaagatgccattgattatatactctatcaaaaattgaataattctgttattaaatttaagcattattaaatgttgggggaaaagcyactgctttctatgcattatgtattcatatattctgagttacaaaaccttccactgtaaagaaaggtatattgtagaattgaggaaatagaaaatgaaggaataaaactgattttaaaagccacatgtaatccatgtgttatacaaattttcacacttgaagaccacccacagtcacactggcttaattcttttctttgtggagaccttggagtcaatctccctttgctatctctgcatttatttgagctttgtgtaaatgtggtattgattagaaagcttctagttctgtgttagtctttttaaaagaatcaggccccagcttgtttgcttttataaagtgatgtaagtgatcacactattacctttctgtatgattcaagattttctcaatactgtgaaactaaaataaaatacaaaaataagctggatgccaaagctgattcaagactgcaatagtcatctataaccctggtttcaaatttttatcttccagaaaacaacctcatgttttgagtgatattgaataaatgttctttattatgaatatatttatattaaatatatacaatatatttatgccagaagatgtctcatttttgtaagttttatgcatggatgttctgataaaagttttatttgaaaaaagtgatttctgatgccaaaggtactataacatagtggttaggaatcctggtcttactttactatctatgtgactttggcaacttacttaatctctgtgcctttatttttctatcagtaatgtgaggataattatggtacccacctcactgagttgtagtaagaagtaaggtaacatggataaagcctttgacacatgtctggcacatagcactcatgtgagaaattattagttaaaaagttttgaaaaccatctaggatagacaaagcatcttcttccattggcccactgtataaacctgctcctctcagactggtccttcctgtctctcagtctagccactttacactttccatttgcatcattgccaaccttgagtgtacactcttggaattacctccaaaactctgatgtcgccttctccacagagccttctctgactatccctgagaaattcaaaagagaggagatgcttccctgagccttctcccccagacctaaatgttattagcactccttcccagattctcctgtatcattcatcgtcttctaggtgtttacatcccttttccttattaaatgttctgtctcctggcatcaaccccagtcccctagacatggctaagtattcggtaaatatccactgatggattgatttcacagagtggctgtcggaacccaccaaagatgccatggcttccagactgccaggctgtcgggagatgcagcacaggttctgctctcagagtgagctgctgtccgcagggactatggctgctgcagcctctgcttgtcctgcctcactacagctcagctccctcctccagtgaccggtggggggtggggggtggggaaacaatgaaaagtaggggaaaggtaatttatttcagtgtttacagagggtttgcgtgtaattagcagtttatttctgtgacacagctggcctcctcagcttggaacytgactttgaaatgctcttaaagagaccyatacctaggcaatctgaggggtgctggggacttgggaagagagtgaagaaaaatgtcatgccctgtctttggtgatgatgcttgaccaaggacagccactaaagtgaagactcccttgttccttctttccccaactctcccatgcatgcacacacacacacacaaacacacttttgtttcttgagtcatattctgttagtgaatccaccttcgacttagaccttttacaaggtacattttttttaaccttttgttcacatcaaagcttgggctttgatatcttcactggggataggggaacagtcacttgatcccctcctgccataagccccatgattgcaggcaaaacactgttctcctctttgtaagtattgaatagatgaataaataaatgtgcatcagtcttttcatcagtaatatgggggtaatgctgcctgctgtttctaccttgaaagttttatagcaattacatgagaaaaagtatacgaaagtgctttgaaaaagacgttcagccctcactatatgagtgtactatttttatgactttttgctgctgtgagctgtggacttacaaactcaattttgctaagttagcagtttttttgtgcttatgcagagtgggtgtctggttgcttcgggagcatgtaagacaaattatcctaacatattttctgtctcttagcatcagtttgctgtgtttgttctgtgttgtgagcgtgctcaggtcctgtgatcttggttagaaatacagtatttatattttgtacatattgaaaaacatacctatatttggtgcaaaagtggcactttaatagttcttgctaacttgcataaactgtgaataactggtgaaacctatgttgcagttgcttccaaattcaaacatgtttcagaactttttttctttttgaggtggagtcttgctctgtcgcccaggctggagtgcagtggcatgatctcggttcactgcaacctcctccgctcgggttcaagcgattcttctgcctcagccttctgagtagctgggactacaggcacccaccaccacacccagctaatttttgtatttttagtagagacggggtttcaccatattggccaggctggtttcgaactcctgacctcgtgatccccccgcctcagcctcccaaagtgctgggattacaggtgtgagctaccatgcctggccaaggacatcttaacctttgcaagtgttagggtagacctgacattcatctgtggcagtgttcctgaatgagctggggctgagcccatgagagagtctataccagaatagcataatggaaaaataatggcaatgtagtttttcatgaaactaaatttgttcaacttgaaactggatttaaacattgaaaatgttagtgtcctttcctggcaaaataaaaagttaagaacatcattgcgagcatagatatttttgtctttgttttgtgaaaattttgtgatctgtgaaggctaaaaatctatgctgatatatattttatctatgtaatagatataataggtaaatatattaatataattatataatttacttgcaaatgcataatattgctattagcaggttgagttttcttttccattctagtgatactgagatttttatattaattttaagagaaactggtagtcatttatgtaacctgtcattgaagaatgagtattttagaaaaccacataggctggtatagtgaatgccatttctaagaataaagtagtatcaggcattgggttatattcagaagacctgtatttgggccaagtgtttcacctaggctggagtgcagtggcgtgatcttggcttactgcaacctccacctcccaggttcaagtgattcttgtgccttagcctcctgagtagctaggatcacaggcccctgctaccatgccagactaatttttgtattttaatagagacggggtttcgccatgttggccagactggtcttgaactcctgactgcaagtgatccacctgccatggcctcccaaagtgctgggattacagacatgagccaccgcacctggctgcaagttttgtttcttatccattcttcctgactctgccatggtattaggcaagtcacgtgacctcagtgagactcattttcaacttctattaattaggaacaccaattcagtacttagtgcatacaatggctgtaagaattaaagaaaaatgtatgtgtgagagtgctttgtgcatcaagatgtgccttacgaatttaaggtattataaaaatcctttaaagttatgaacattcatgttaggaagatttctattaytgagatttacaatacaggtttttcacgtatcatttttaaacatgttttgacagatacagtcaatggtatccctcagaagaaaggtagaacgtatattcaaaatattgttaggatatttctctttcctttgtgctcaaagcatcctgatatcatgaccttttcaagtgttttcttgatatgaaacaaagctgccactgcctgagtagtttgtataaaaacatcagatttctaggtgaagcagaaaagaaagggagtgtggagcttgattccttccccaggggtctctatgatgccatccttgaatgaatgatcaaggcgtgtcccccactgcctctgaaggtacttctcgtggctgccaccagctgccttaacaatttggaaggaaaggcaggcccaaagggcagcaggcacatgcacacccaggtgatcacacctccctcgtcccctgcacacatttaagctcttggcagcacatgttccccaggcacaggcggggctggcgtagtcagcaaggctgccacatctctgtcacaagcttccctttctcctagtgttttcagcaggcctgtatctctccaccatcctccccttcccgggtctcccactctcctctctctgtgacaggttctttttccttggcagattgcactggaatggtgtgacagtccctcagggatcatgccacctgcccaagctggggaggaatagcagagaggcatccgtggctggccaggtcaccaagataacactccccacaggcgagggtatccagggctcctgggactgcagattccattgcctcattgagccaggagccttggtctacgctgtaggacctcagtccacccaggaacactaaacttgcctgcctgccacttggcgctactataggcagctgtacctatcagcacaccatgcctgggaaggtgaccacagagagtaattgccagtgtttagtctgtgtgtgcatgtgggtgacagagcgaaaaggaaggtatggacctctcttttatatccaggttatttattgcatttgtcttacgacttccatttagagctaaataaactgcaaagtaggttatttaaactggatcttgggtgctttagcaagtggagaagtgggcggtgaggagggagaaagatgggagattgggccggggagattgagagaaagaggccaaaagaaacacaacgtggcttattttcctccccttggtagtggaaggcatggtgtgctgtggctcacagacagagatcccctttgctgggggatcttgaagagctttctgtctcaggcttttgggaagcagcctcctgtggacatatcttgcttttacaatttataaataaaaaactaaggcacagcctaggagtgcagattgcacaaagcctacagttacctaccgcacctggaagggtagctccccacttctttgcctgcttgtcacggtcacgtgccccctccacctgcgtcggacttgtgcagcctaatagagggcaggtgtacaaggaagaacgtcgttggggcattttatcgtcaccctgtccaaatgaggtttcagggagtctcatctccagagagtagtcttccacccaccatgtacgtgtgtgtgtgtgtgtgtgtgtgtgtgtgtgtgtgtgtgtacacacacatatttaagctcagatgccctgcaggcccagggagctctttgccaagagactcttggtccatccagatcactcgtgaattctcttttgtacagacttgataaagggtgtttcttgagtaccagaagtactgtagtactgtacataattcataacacgaagcaagataaagtagaaagaacaagaaaagataataactggggaattaaaagtttccaacattgttagaagctgggagagtgagtcagcagtacatatgtccttagggagagctttgcacagggctggttttggggtaggggcctaggtgtccaaaaaaggaggaaggagatgctcaggaggagcagaaatagggatgtggaggagaaggggctgagggcagggagaatgggtgcagattgcaagtgggggtgaattctagctctgccctgcctcctcccctccctttgaaggaaagagatatcatggggccttaatcatctccttatctctcattcctttcctggtttaattaaatttctgttctaatttggaagagcttgcatgttctcgactgctgtggcaaccaatctcttttatgagacccaccctggcactcagaggagtttatcacctccatgggacttggaccctctgtagcttttgccatcatggtcagttctgtagtgagcagaggtggatttgagaggagaaaggggctcccttattattgtcaaagtcatcttgtttacaatggcttcagtctgccccttcctcttcttcaccagggagtgaagcctcttctatccatgtatattttttgtgtttcgcattgtgttacctctcctctcccaggacaaaacacacttcgttgggatctctttgaatgttaaataataccgaaaatacagatgaaagacaggaaacgtggataaacgtaccatcagcattcctcttacacctactgtgtgcccaggcacagtgctgggcactctacacgtgtgactgcctcgaaggtgatggatcggtcctcatttgataaatgaggcactgtattagtccgttttcatgctgctataaagacatacctgagactgggcaatttacaaatggaagaggtttaatttgacttacagttccacatggctggggaggcctcacaatcatggcggaaggcatggaggagcaagtcacattttatgcagatggcagcaggcaaaataagagcttgtacagaaaaactcccattttttaagtaatcagatcttgtgagactcattcactgtcacgagaacagcccaggaaagacctgcccccataattcaatcacctcccaccggcttcctcccacgacacgtgggaactgtgggagttacaattcaagatgagatttgggtggggacacagccaaactatatcaggcgcttaaggcttacagaggttaaaggatcctcccaaggtcatacagctgttaaggtagaaagcccaactggaaccttgtcttgtgagctagaaaagcccaggctgtccccactactccctgttagaggaggacgtgagaggagatggatgaatgatttcggcaattcacttcaacttaacggacataccaaacattggagtgccgaccgattaccagggcccgtgttaggcattggatggtggaagagcttttgctcctgccctcagggagacaagacatgcttgtgttcagtggatgccttgaggaagtgttatggtccctttgagcattatggacccattgctgtgkggtataaaggcagtggcggtgttctctctgaggtagccaagaaaggcttcatagagaaaccttgtagacatagaatttcaccagggggagaaggagatcaggacctgggcagaagcgtggtggaggtatgacatttgtgtgccgtgttgaggaagtggccacaataaaggagttggggtggaaaatgcctggagatgagactggggaagagattgggggtgagtgataaaggactgagtgtccattaatgactacagagttccttctatcagggaaatcatctcattacttgaaattatcaatgacttatctgtacatctttttgtctgacactgtccttgttcagtgcccccagggctcaaatgtgggaattagtctaatgaactagagttcatccctttcatgcctcctttggtcttttactgtggcccacatagccctgataatctgtccctggactgctcttctgtcttacttcacgcccttgcctcctccattgactgtgttcccttcaccatgactgctagccgtctaggctctttcctgcttcctggctgtggccacactgtttctgccatttttttttttttaaatttctaaattttgttttaagttcaggggtatatgtgcaggatgtgcatgcaggtttgttacataggtaaacgtatgccatggtgatttgctacacagttcatcccatcacccagataccaagcccagcatccactagctattcttcctgagcctctcccccctccccactcttgccctccgataggccccagtgtgtgttgttcccccctcccatgtgtccatgtgttctcatcatttagctcccacttataagtgagaacatggggcatttggttttccgttcttgtgttagtttgctaaggataacagcctccagctccatccatgtctctgcaaaggacatgatctcattcctttttatggctgcagagtattccatggtgtatatgtaccacatttgctttatccagtctatcattgacgggcatttaggttgattccatgtctttgtattcttcatctggccaatgcctactgatccctcaagcttcatcttaattgttacttccttagagagcactctcctaatcctaatataaattgagtgcttttggtataattttttaaatcacaatcttatttccttcatagcacttatcacctcttgtgtgtgtatttgtgtgaccatttattaagtttctgctctgttaactacactgtaaactctgtaggtgcagggatgtctattatttcatgactattgccagaaccttgcatatcgtgtggcatgtagtaggtgcttagtaaaaaatctggtgatttactggatggatggagtaataaattagtgaatgatataggatcaagctatcagcagggaatattcttatgctcagtgaaaacacaaagcctatgttaaatgaggcaaatttgttggtatttccaattgcatttttttaattcaacaaatatttgttgagcaccgattatagctaggcattgtgctaggagtcagggatatagtgaagaacaagcaaaatcagtccacctggaattcgtattatagtgtgatgatatctattaaacaatttaaaaaataagtgtatactgtcaggtagtgatgagtcatatgaagacaaagcaaaggaaggggcagagagtgttgcagggaggcagtatgcttcagatgaggtggtctgggaaggaggtggtatctgagcagaaatctgcagaagtgggagggaaagccctgggatatctgtggaagagcattccagatggagagccagcaagtgcagggacccaaagtggttgcttggcaggttcagggagtgtccaacaggccagggaggcttgagcactctgaggggcaagaggtcagagagagggtcagggccagatcaggttgggcctcgttgactgtgattaggagtttggattttactccgagtgtgatgggaagtctttgaggtgctttgaacagatgaggtagaagatctgatatatgctgaaagatcactctacctgctgtatggagaactggccatggcagggcaagagtggaggcgggcagctggcagtggtggtgcagcctggaatggctctgctggtggggctgagcagtgattagattgggatgtgttttgaaggtggagctggcaggacttgttaatgggttgaatgtggggtaggagagatgggaagatcaaggagggctcttcagctacattaatctgttaatagcrgtgccatctaccaagataggggagccgagagaaggggcaggatggttgagcaaggtcaagagttgagctggaggcatgttaaattggagtggcctaattgatgtctatgagatagcccagttmgagatgtcataagaagtaagtagctggacatctgagtctggagctgggtcagagcaagagatatacacttgagaaacattaatttattaatggtgttttgaatcatgagatggactgatgtcccttagtcttgaagaaggcatagmcagagaagaggaccaacgacttagctctgagaaactacaacttaatgtctattagcactgcagtaggtctattactaaggccctgagaacttgatcatcttctcttggggctatttcttctggaattgagcccaaatttagtgttgttgctccttttaggaagttattatgacaggggctactttgccataggggatgaaaataggaattcccactaccaccccatgggctagctgaaggtgcagggcaggtagagattcgggtgtggagggagctcttcagtctgagtctgttctgttttggttcattttccttttgtctgctgttcttctcctgtgaaaattgttttccctcaagctgatgtttttaaagcttaatttttatttctgtaactgtactccttttcattctacaaacctttattgagggcctgccatgtgctagacactgctcagaactgctaagtgctgggatgctccctttccaaacacacggctcctccccgtgattcttttcctgctcaaagccatctgctctctcccacctggtcctcattttattgatggctattacatcatctacctgtccatcatttttcatacctcttatatcattattagatgttctagctaccaagtcttggaaccagtcttcccattttgtcttacaccccacatttaactcatcagtagctcctttggctctatattcaacatttatccagaatctgcctaccaatcctgacctccagcgctgcaccctggtctaagccaccaccatctcttgcctgagttagtgcagtctctccctgattgcatcattaccccacttcagaacatccttatgatcctggcagtgtaaatcagaccatgtccccgctctgcacagaaccctccagtagctcctcttcccttgctgagtaaaagccagagcccttgcaagggtctacagggccctccatgatctgctcttccactcccttctgcttcttgccttaatctgctccagcacagtagccctcttgctgcagatgacatgttgggcatgcttctgccttggatggaaccttgctaacatgggtcttgctggaacattcttcccagttatcagggtgggctcactctttcccgtcctctggtctttactcggtgagttctttcctgaccatcgtatttaaaatcaaacctcctccttcccagtactctcttaactccctttcagatgtatttctctccagagagcttatcactagcgaccacagtatatactttgcctgtttattttgtctattggctaagtgatcccactagagtacaagcttcatgagggcaggacttttgtctcacacactgctgcaaacagttgatgctcaggttagtacctggcagaaggtaagtacagattgagttacttttcattggaaatgcttgggacaagaagtgtttcagatttaggattttttcagattttggaatatttgtattatattggttgagcatcccaaatccaaaaatgtgaaatctgaaatgctccaatgagcatttcttgggccatcatgttggttctcaaaaagttttggattttgaaagatttcagatttcagatttttggatttgggatgctcaacctgtatttaataaatatttgctgaatgaataaatgacagaacatgagttcatgggatgggagggtggtcaatgcactgtatttgttctagttactgttactctcatagtctttgcactaggccctttggtgacaagtgggctgcatttgtgagatggttggatgccattagggacctaagctgtgttctcagaatagcattgccacactagaagccagttggccttagcaagttgaaccatttgctgggatgtccttagtattattaggcaaactgatcatccaaggtttagggttagatgaatccacaaaagagctcattgaggttgtattaataaaaacaaccattcattgagtccacaagatccatacttacgcatgaaaattactctaggatctcttgctgggggataggtgggggatcagaattgccaagggtgtcctcatgaggaggcctccatccagcctcaacaagccttaaacacctcattcaggtgccgtarsaagccttaaacacctctgggtagggtttgaatctgtaaatgaatcagaggtaaatgaatcttaaaacctactggccttaagaattggaaggccccttgcttatatccttggggatatttactgtggtgaaaggatgagggtaaggaatgatagcaaacattcacagagcacatattatatgccaggcgctgttctaagagcgctctgtggatataaacccagttaattttcccaatagccctttgaggtagaaagattatattcccattttacagttgagaaaaccaaggctgcctgtctgcagggtctttgctcttgttgattatgttacaaccatctcaaaagaagtgttgttctagggccatttaggatgatacactgatgtttaatacacttatgtgttacattttgatgtgtggtattgttgtggggagtagctagctgtgtgtggaaacggacttttcatgaggcatgcatgtgtgaacactgtaattagtatttccaagagagaaaagcaaccccctcccccgcccccgccaacaccccaacactgyacctacccggagactttgctcgtgacacatttttttttccccataggagagaatgttaaagtagggccatctcttagatgaaagtcctagaggctttgggacatatgaagactggtcagatgctattgagcatttctcacctttgatcctctgttctgaggaattcttgatagcctaggactaatctatagttctcagaggggccagttgtcttgttgcctcctgttctcgcctcygcctgcctgtctccctggctctgagtctctggtgatatgtactggctcaccgtcaggtgttgggggatggggaggcggctgtgcagctgccgccgagctgctcacttggtaggagaagtgtgccactaagtgaaaatgaggcttggcgactgccctgtgacccactgccctctgtaccttgcccttccctgtgggtggcagagctagacagccattctcatcctggaaacgctggttttaagggagaggccagtcttcttgtgtttgctgcacccatcctgacttggaaggaaggtctttgktgactccatgaatggcacccaggggtccagtcttcaagttccattgctttctctggcctgtggctcatgactaattccaccccaaccttgtctcagactggggtcccactcaccaccagggcgtgagcttttggggaaccctccctgcttgtcagcccttcttttggaggagtaaccaggacccccagaccccacttttagatatccgggttcaatataacacatagaactttcccctcttcttctgggcaagcttgagatggtgtttttcatgaaaagggccagctgagggatcgtttcagagaagcccaggttggctacactttccttaggatgagactgggacatggaaagtgggaggagaaggagcagttgggtttggcccttgcaggcagtattttcctctggactaggagatcctctgcacagtgccaggcctcacactgcatgtaattaggcttctaatgccattttctattgacaagggcaagctgctgccaagtcacttgagatgaaattgggtcacctgtcacaattcctgtgggactgaggtagaactgtgcttactacacactttgccctattttaacctctgactggatctgatcccatatcttagctggaggaggagatgagggaggagcgggggcctctcagagccactctgatcctcatagggtgggaacttggcccggggatgccttgcttaacctagcggggagtttcttaacagaggtcagagtgaatcttttatccctttctaagtccaatttgtaggacatggggaagacagtgaccccaaattcccagtgtgggagacatgagagaggcctcatttgtcactctgagtcaggaggaggaacgggcagttatttgtcttctctcagaaagccacgctgtctagttgatagctcttctctgagaatggaaataaggagagctgtccagagattgagtgagggaggagagggagagaaaagaaagtgcttttgagtgtgtgcatgcatgctcatacattcacgtgcttaacttaggaggcaatttcggaggaaacagagagaaagaaattagaacaagcaggaagagttccaagatgggggagaaaggggcataacatggacaaaagcctgcctaaagaagcagtgaatggaccacatgcaattggggagacagaagcagaagaaaaaggggagggtggggtgggggagaaagcaggtgggggctgggaagttctgcctatgtgcattgtcttccaggtgcttttgtaagcctgagccatgcccaaggcagcactggcagctcaagctcaggccaaacacacacgagaagagtatcgtattgtgtttccttttcttcgtgtttttgaaacaggaataaaaactaccaaaagagaaacacaggaaaaaaaaatagaaagggaaaaaaatctattcaaggaggcatgaagatttaatcaacacccagtgttcttagcaggtcgggagcaagcacaaatcgtattgtctatgcagctatttctgacaccccccagcagccctcagagcaacctctgccactgcccagagtctgggaggcagttcctgggttccagtgtcctgggctattttgggtgggaagaattgctgagccagtcaagggaatggggtacagggtgtgtcatcttcttgaggagcttctcagcatatagagatttccggctttacatggtaggtatttgtccagatggagattttggcattgacatttatcctaatgtgctggatataaacttgggggtaattcgggaatttaaaactcagccatgttaccttcagtacagtatatggatcaatctcttctgctttatctctcagtggcattcaacacggttgctttctctctctttaaaattcatgactttggtgccattacaccgtcctgtttccatccgtctttctggttgcttcttctcctttggggctctcatttattctcactccctctccttctaggagatctttttgaagtctcttgactatacaccaatgagttgaatttctatttccagcccagaactctcttctgagctccagactcatatctaatcagctactgttagcaccgttctaaatacctgagactaccaagccttcaactgagggcttgatccctctgttgttctctttcccacctgcctgtcctagtaaaacagctctaccacctacggagttgcccaagccaaaaacctcacattgtccttctttttccctactccttcaccctcttgttttctgtctgccatcaaacagcaggtcgtatggatgctacctccaaaatatatccccggctgcgcccagtcctccctccccattacatctaccctgacctggccaccatcttctttgcccctgatgactgcagcagcctcttgactgtctttccagctttcttccttatttctcttcaatccattctctactccatggccagaaggatttttaaacaatgcaaatgtcctatgtcacttccctttttataaaaccctttactggattcatttgaaatacagacccaaagctaacatgatccataagacgagtggcctctgccagcctttccagccttgcccttgttttacccatgctggcttgtgtcagaatcagcccccaacccgactccatcaacctcagaacctttggacatgctgtcctgcatgcatgagggtttcttccttcggcggcccctcccatttgggctaattcctacttattgtttccatctcagtgtaaaggacatatcctctggaaaatccactctgatcattgaccctaaacaaagtcagtccctctcagaaatcacactcatgaccctttcaatttttctttggaatacttaccaccattgtaacactccagttgtttttggaatgtttaataccattctacctactaaacctaagctccatgagagcagggccatgtctgtcctgttcactgtggtgtctccaggatatggcaccctggatggtccatcgtagaggttgaataaatgagtgaatctatctcgaacacttttgtgcctagggctttgattcaagcacaaggtgagagtggagcagggtgggatgttctaaaagacagaataaagaattcttgtccttaaggcccctcctacctagtcctgttctgttttgtgttatgattatcagctatgtgtatataaactttcaccaaataaagattgttgctttttgaggattacgtcttaaattttgttgtcacactcactaggtttcatttccttggatgttttatagacatgtatgtacctttcagtccctgtctaggtggatgcaccttcctccccttcccactggtctgtatccttgcgatcccagcgtgtgcggtagcctgaactgcttgagttatgacagcctaagagctgggcgttcctggccatggctcttattctctagaagcttcagcctttctgcaaaatgcgaatgagattattaatggtaataataccttgtctatctttcagggttgttgtgaggaaaagatgagttcatttatgtcaaatactttgaaaactacaaagctccatgagagtgttggaattaagtaaggatgctggggagtgacgagagatgagcaattgctcttaactacagagaagaaagtttcctgcaggaggtggagattaggaatgaggctggaaagatggtgtttcaggcagcatcctggcaggaaatggaaggcaacttcagctgggttttgaagagggtttagtaatggtaccatttcagggatgtggacaggaatatgggactgagaagccatacttagaccctggggattagctattgtgggatgtcatttctagtcctgggcctgaaggagcaaggtgaggaaatgaggttgttagagcctggtgaggaaggaagaggggctgcctgaccgtgaccacagagggacctcaacctgcctgaattgccacactgatgcttctggtgccacctcttagaaactagagggctagggagctgggtgatgcagtttgtagggcctcacatctcagggmacagagaagggtggaaagtaggtgagggaggggcaggtaagtggagaataaccagtgtggatgggtattatttgggaagacagggaggagcgaggaacgatgaggatatccaggtaaggatagtgatgggagaaaaagcagaaaggctggagaatacctatggagcagttgaagaaattagtgggaaataggatttaagaagttggcaggaatgaccaaaccatgattgtcaggcttggaagactgggctttatcctgcagacaaggggggctacagcagttgtttccacagaggagatccattatgaaaastgtctggagaaatggtttgggcagaggtatgtgagtagagggaggcaaggaatgaccagaacactgttgtgaccaccggtgagaatggagagcgctgggtgaacacaagaaccattgggaatggatgagactgaatgcaagggcatgtctacaggagaccccagggcacagagaagccccaagcctggcatttctgagcaggattgctttgctcgatgccaccttctccctctcctctattctagtcatgtgccagggctttgtgacccgtgcttttctgttcttttccttgggacatctctgctactgtcactgctgcctcttcccttatttctgaaggtttcttccacatttctccttattgattgtatattattactgcaactcatgaatgaccgtcagaggtttctgagcctacagggctggggcaggggtgtctcctgaccatttcaatcttctgccacagcctggrccwcacagacagctttagcatcagaagagatggccacacccagagctgggcccccagtatccacaaaggaaagttcagcttaggaagaagaaatggggagagaacatttttcttccttagcacctgaatgaatgctttgcccagcagggctacctcccgccagtctctacctttgttgtaatgccaattcttatttaatgtctgccaaacacaaaaggtccatcaggatcacgtggaaagaaagtgaaatgctggcggtgccccctgggtgtaggcctgaaataagatgaacaggaaataaaacataactgcagggaaggcgggccctagacaaagaatggcagtgggcttgcttgttcctcctctttgctcccttcctttcaagcctcttgctttgagagggagaggcttgtgtgtgttttgtatgggttggtagtgtgagaaggaagtcaagatgtttgggaaggatgaattttgagggaggatgttaaacagaagaacagccaagtatggggaaggattgggaataatggccctaaatgtggcagagtagaaagagaaggaaaagaacagagtgaaaaggcacaccggtttcagtgtggcagaaggagctcaaacacagggtggggagttgatgagggctttgcttggctatttgtgtgcaagttatgagaaaattgctaataaaccaatgcaaatcatcatttattcatgtcattaagcactatgtttagctccttcgtgcattatcttattctcacagcagttgtgtgagctagaactctattttctatgatttgcctagatttgtagatgactaaactaaggctgaacatgagtaacttgcccatacagctgacaagcagtacgctggatctgaaactcaagtgggcaaaaccaggatggtcaagggagtgttccttctggacatagctcctaggcattaactcccagcatattggctggagttagagaagtattgccaggacagagcacatctccatcttcctctgtctccccatcccatgtcttgttatccagttttgtggcccctggacaccaacacagtattcattggatggtgaagaacggtgggaaaagcctggtccatttggtgtgcacaaarcatcttcctgacctcttactgtaaaagccatgacagtttgctccctatgttgtacaagagaaaggataaaagccttttgcctccagtgttacagagagagtctgtagactgggcatacttcctgaaggcaagtcttttcacagtccctgcacataagtaccaattagataatttttccagccatttcctcattcccatcccaataataaaccaataatctaaacatactaaggttgagaacgctcctcccaaatatcttgggtaattggatgatctacagaacgtatatgaggacttgttgggtgatgcccaagtgctatgtctttgtctgcagcactttctactttgcgtggtctrtaaaagacagctacagaatacagtgtggtctgtctttggctttgaagttggacatgctgaatattattaattattccttgcaatacagcaaaaagttctgatccaaacattgtttcttatgcttaagtttgttgaaaaatttgaaatcaggccttgtgaatttgatcatctaaggtcttatttgcagagacatgtacttactcaggtagtaatgtcaatagagatgtcctgaggctcaagaaatccctgtttgcattgtggtgagctcctcagccacattggagcatcttgggtggttccaatgaggacttttgaggaccagctcagccccatgcacaacagcatgcagttttgctctaatataaataaaaacaatggaagtagctatttttattggacttttactattataatatgtgctaggcactatgtagagggcttaagttcattatttccaactcttacaactttgcaatctaacattactacaatttttttttcttaagatggggaaacagaagagttaataactcaccaaagtcacagctcagtccatgatcttagcctctaccagttctgaaagacatgcctcctgctgtgtagtagttccaacagggcatggttctgatactaatccatttccatgattatgaacaagcaaggccttggcaaaattgtgagatagtaaggcatgccttctagctgccagcccttttgtcctttcccttagaacctttcgtaaaattctccacccccatcaccaccatcaacacacttctacctctcactgtctccactagcaaattcttttccccattgattccttcattcatttcgtcaactgatctttattgcatgctgactatgtgctaggtaccatggtgggcactgctctaaggaaagattctaatttcagttacttccatttttgcttgatttttaagtcagtgtttttttttttttctcagaagcaattcattctgagtgcttacctctaatcagagaatgaaaaaccttgtcaattatcaaaagaatgtgagacattagcaggcagatggtgggttttgggcaggtgcacctctactgtcaagacagttgccattcttcctcaaggataagatagacctgaggtacacagaagtgagttcatgcatgatgtggatctacctccagaggccctatcccactagataatttgtagattcaataggggaagggtgcttcctgacttagaaagcagatctcagcctctgaccctatccttgcactgtggctgagttatgtttactgccatagttactatagtgtatttaaagctataatattgaaagaccctatggttggcagatttcttcttgggcaacaggcttatgttacagttcttagataaagaccacttgtatatgatcattctagtatgcaaccaactctctgtgatcatctctgatgaaattctagttgagaataaacttttcccttgatacatacagaaggcaaaaaagatattctctaaaaaaacacgcaagagaagatttccatctgaaggccaatgcaccaatgcacctaagagcagagactgtcaagtcaccctacagagtcttcctgtcccaggagaaaacacgacacttgagattaccatacccaaaaaaggatgaccctctcatggcctggccacctatggaagcaagggaaagagcaccagaggaaagaataggtaggacccatcccaacatctgtagggaagagggagctccgtccaagggctggactttcaggtctctctggaggggagcaggctgaaccatgctactgcagcctaatgccactgactatctcagtcacgtgatgcactctccttgctctgatccatcttccaatcacaaattgacttcccaggaggcttgcctgtgagagggtgatgggtttacctgagctcatgtgggccctggtctttgcaaggttttatttttcattggaatgctcaggtgtagtgagttcgacctgagaaacaatcaactgtcagggctgatcaatcaggtttgtgagcaactgacattgagggctggactctggagtagatagagtttactcaggaaagcctctcactagaggcttccygggagaatgctgtctggcctgtaggcaatagtccttgatgccattccttttccagtttggtgatacttgactctgagttttctttaaggcagctgggacagttccatggagggtagactcatgcacagagatatcatattcataacggctctttgctatacagctactgcaatctacaatcccacacaagataccccctccttcagtttttgagtacacatataactgtcaggttgactgaataagtttgcctatcctgaggtcataaagacagtctcctgttttattttctagaagttttattggtttatttttcacatttagtttccaatccacctggaattgatttttatgtgtgttgtgagcaggagttaagatttatttttttatgtggacatccaattgacctagcactatttattacaagtttttattttctctgttactgtctgtcacctttatcataaccatatcctgaccacgtgtgtatgagtttgcttccggactctgttctattccattgtatctctttgtatcaaataccacacagtttcttaataactgtagctttataataaaagtcatgtggtgatgtaatttttctaaatttgttctctattttcaggtttgtcttggttattttkttttcttctcagcatttatgtatacatttagcctttaaaaaacatgagggctaggagtgctgaccacctcctgggcaaaaatccacatataacttttgagaccccccaaacttaactactaatagcctactatgggctggaagcgttactgataacgtaagctgtccattaatacatattttatataatatatgtgttatatactgtattcttaagatagctagagaaaagaaaatcataaggaagagaacatatttactatgattaagcctaagtggatcatcataaaagtcttcattctcttcattttcacattgagtaggctgaggaggaggaggttcttgttgtccaggccttcttattgtacaaccaaaagactggcagctggtgtttatcttttcccttcaaggcttgggggttagcaactttatgggtactttatcaggaaggtcctgatcataaacctaactgcatttgcacaaaacagtagagttagcctattccttccagccttaaatcctggtgctcacttctctcccttactaataaatgtcctttgtggcatatttttttcccaaaatagggcactttgtctgcattaaaaccacttaaggtagacatctttcctcctcgatgatgttttttcactggtgcctgggaactcctctgctgcctcttggttggtagcagctgcttctcctgttagcttgacatttttttaagccaaatatctttctaaaattatcaaaccatcctttgctggcattaaagtctccagctttagataattcacattccttttcctttgtcatataatgacttcaatttttttcaaatcaaattagtctataggtatgccttgcttatagcaatcctgcacccatgtaaaagctgcatttttaatatgagataaaaagatatttcacaaaaagtataatgtttttgtacctgctgacgtagctgctacaactacttcgcaattttcttttcttttcttttttttcttttttacaatgatccacatgttggattcatttgtcttgaaatagcaggtagccacagctgtaggcctcaatttatggcaaatatcaagcaatttaactttttcttatactgtcatgacctttctctacttcttgggaacacttccagcatcactagtagtgacatttcttatgggccccatgatgttattcaaggtttacagtattgctctaaacacagtgaaaactatgcaagaaccatgagagatcactttttactacagcatgcaatttactggagacaattgctcactcagagatgattattgtcacatggtgtttgaagcagatacttgcaacacttgagctcattgcaatagcaacaggaggtggctacaaaaatataggcagtagtacagttacacatgcagttaattttatgcagttatgctttatactgcatctctacatttgtttacatttctcttaactaaatggtatcatgtacagtctgtaaatgtgtggataagttttgatacattttaactttttataatctgtatattttatggtagtaaatgatatagattaatatctacatatattttgtgcattcatgacatacctaactttgatatttctaggttacacagttctgtaagttttttcaaattgttgcaaaygtccaaattttttttccaatatatttattgaaaataatctgcatataagtggacccatgcagttcaaacatgtgttgttcaaggatcagttgtatgtactttagaattatcctgtcaatttttactaaaaaaactcttgctagggttttgattgggactgcattgaatctatagaatattggggagaattgacatctttataataatattgagttttctcattcatgcaggtaatatagtcatccattcattatatactttttctcattaaagttttatactattttgtgtagaggtctgatatatcttttattttattctattttttgagatggagtctcactctgtcacccaggctggagtgcagtggtgcgatctcggctcactgcaacctctgcctcccgggttcgagcaattctctgtctcagcctctggagtagctgggattacaggcacctgccaccacgcctggctaatttttgtatttttagtcgagatgtggtttcaccatcttggccaggctggtcttgaactcctgagctcatgatctgctcgcctcggcctcctaaagtgctgggattacaggtgtgagccaccatgcctggctgatatatcttttattaaactcattttgatgctatcataattggcattatttttaaagttctgttttctagtttttgttgccagtatataaatatacacattaatttagccatattcagctatcttgataaattcacttaccaattttagtagtgtatctgaagattcttttggattttctatatatataatcctgtcatctgtgaataatggtagtttaatttttcattttcaattcttattccctttttatttctcttatcttattatactggctaggaccttgttataaattaaatagaagtggcaataatggaattcttatctcattcacagtctcaatggaaaagtttcactgttttctcattaaacatgatctttgctgtaggttttttatagacaccctttttaggactaagaaagtttccttctattcctaatttgttaggtgtttttaataaacacaagttgaactttactaaattttttttctgcagctattgcactgatcatgattttcctcctatattcttttaatatagtgaatcacattgatttttcattgcaaccttggagtgacatcacctttgttgtgatatgttttttctatatcattgggtttgattttttacgattgcattatctgttttcacaatagaaactggcctataatttgcttttcttgcaatgctcttgtgaagttttgatattaaggttaggtttccttaatgaaacaagctagatatgctgtctttttctactctttggaagattttgtaagattgaagtattttcttccttagagttcacccatggagatatctgggcttggaggttttttgtttgtttgtttgttttgttttgttttttttgttttttattgtggtttctaccaagttgtaatttaacacagtggagaatcaatctgttatttaccatgttgaaagaataggctggggacagtggctcactcctataatcccagcactttgggagcccaaggtgggtggatcatgaggtcgagattgagaccatcctggccaacatggtgaaaccccatctctactaaaaaaattacgaaaattagctgggtgtggtggtgcacacccgtagtcccagctactcgggaggctgaggcaggagaattgcctgaacyggggaggcagaggttgcagtgagctgagatcgcaccactgctctccagcctggtgacagagcaagactccatctcaaaaaaacaaaacaaaacaaacaaacaaaaaaaaaggaggtggggggaatcatggaatcaatgcagaaaaaaatttaatgaggttcaaactttctttgttttgtcttttttatgtctcttataagttacagatttaatttctttgaaagagaaccattaagcttttctacttcttgtgtcaattactgtaagttattttttgaagtaatttatccattgcattcttattttcaaatttagttgcataaagctcataatgtctccttattatcttttaaaacattcataggatctgtagtgatgtccttttttcattcctgatggtgataatctctgctttctccctcttatttatttatatctattagtcttgctagaagtttatcaaattcattagtcttctcaaagaaccaatttttggttttgttgatttttctggattgtaaatttatttttgtttttatttatgttctttatttccttctaaatttgaggggtttaatatgctgttctgtttcaaacttttccatgcatatctttatatttaaggtgtatttcttatgagcagcattttttttttttcctagtgggagttgttagtgtgtgttttgctcatcatggtattttgtacctggaatagtagctggaacatcctaagtcttccgccagaaaatattgaatgaacgagagaatgagcactgaggtctttgtcaagggtggaaggtgggacagagatcatcaggaatctgagtttgtcctgcaacaagtgaatcggtgcaactcccttgaggacttttgttctctgtgtattccctatctgacgatgatttagccagtcttcatgcttatctgtttcatgccaatccccctatcaagaacttctgctttccttcttcccacctccatcactcacaattatagcagtgaggggtgccacaagcttaagtatatagcatgttctttgccaacattcccaacaacccctccttttcaatgttctctcacagaaagattgcctcccacacctctcttcattacaaaagagcccaaatgactcctggtattttaaggggcgcaaagttatgacagtgacagagcgatgtggtattagcaaaatgactccgttggatgtgccattagggctttgcatgtcatctgggtgactgctgttttgtccacatttagctgggtgagccccagagctgaaggagtttattttcggtgtaggaagaaaagctttttggatttgcctgtcrgttccttttatttttttcaaagactccaaagttgatatggctttttccccctgccttgcttcagaggcccaaagatgtagacaatgagtctctgcatgacatttaattcgcctacggtgctgttttgaatgttacagatgaaccaactatgaattggctgtatgtctgtatttrtatgaatatgtgagacaaggggactagatgaactagagagaagcattcttgggaagaataagaagacaccagcgaagagatggtggtgggcatggcagatgagagtcacagtggtagaggggacttcaagagatcatctgggctgggcgtggtgactcatgcctataatcccagcactttgggaggccaaggcaggtggatcacttgaggtcaggagtgtgagaccagcctggccaacatggtgaaagcttgtctctactaaaaaatacaaaattagctgggcatggtggtgcatgcctgtaatcctggtcactcgggaggctgaggcaggagaattgcttgaacctggraggtggaggtttcagtgagccaagatcgtgccactgcactccagcctgggtgacagagcaagactccatctcaaaaagaaagaaaaaagaaaccatctggttgagtcctttgtccttcagtagaygaagtgtcctcatccatattttatagacaatacaattgaaatccagagatgtttcattatttgaagaagaagttggaatctgattctgctagcctgtgaatttcaaaggtcaaagactatattgacgttgatcactgttgtattcccagcacctaattcagtgagtagtacagggtaggtgctcaataaatatttgctgagtaaacaccaaatatatacctacagctgctgaaaattcatttatgttacactttaagttgttctccagagcatctggttaatctggcyctaaagtactacaaaaattatcagtttttaaattcatagatacatgataacaagtaaaataaatggatttcagtttattagatgagggttcattcatataacaaatttttgttgagtatcaatattatatacaaagcactggtctaaatactggggatacatcagggaacaaaacaatccaaatccctgccctcatggaacttacattgtttacagtgtaaaaataaaayagataaatcatatacatagtgcattagatggtgatacagtacaaggggacggggtcggttttggtaggagggcctgatggtgtacttttatatggggtagttaggaaaggcctcacagagaagttgacttttgaataaagacctgaagaaagctagggattaagccatatggacatctggggaacaagcattttgagaaagaacagcaagtgtgaaggccctgaggaaggagggtgtctagagaggtcagggaggagctaggagaaccatatggatggagcttatcaactaggggagccaggtcaggtagaatcctgtaggtcatgatgagactttgactttaacttggggtgagttaggaagcctttggagagcttcaaagaggtcagtgacatgattcagcttacatttgaatagggtcaccctagctgctttgttgggaatggactgaaagggggcaaagatggaagtaaggagaccagttaggaggcaattgcaataatatgagtgagagatgatggtggcttagcccagagggtagcagtatgaatggtgaggaggagtgaaattctggataggttttgaaggaaggaaaggctgatggatttattgatgaacctgacatgggatatgcgagacaaagggggagggtcatgattatttgaaggcttttggcttgagcagctggtaggatggcattgtaattaactaagctgtggagaatggtgagaagagcaggtctgtgttttattrgggaggggggaaggatcaggaactcaggtttaaacgtgaagttggaggtggctactagacatccatagaggatcttttgtaggcaggtagaaaaatgacttgaattcagagaagtttgtggtgaaaaaatacatatatatctgcattattgtagtatatagtttttaagaccatgagaattaggtgtgaataaagctgatgtcatgagttttattagtatatggccaagatagggttttctattatattctgggggtcaactgattagcttcagggctactaatccaagatagccatgtagagcaagtatgtgttaactctacaggtgagctggtgagggaagggggtggatcagcttaagccagcctcactgccaggaaagcagccttgggtgttgagtcagctctgctatcatcctttctgtgaaggggaagacatcctgattgctattatagatatgaagataaactcacctggataatgtcatttcaccatgtaggcactcctcatccacatgttgagacatgggcatacacgtgcaattgaattcatttcttgtttttcttgtgatacattcacctcaaggtgagacttaggtagagttgaccaatgggctggagatcatgtgctgaggaaaccctgagaacacagctgctctcaacttgtcataaggtgtttctttccaaggagccccaaatggattgtgctatactcatggcattatggttggtaatggaggtgcaaagaagtagaagacttggagagttcccttaaggaacttatctggtggacttacatgaaaattcaaatagtaatgcaagatggaaggtgccagacaacagaggcatgaaatagttcatatgagtcatgagaaattctgagtgaaatcctaggtgccataaagtcaggaaaggctcattcacataggagattgggcttgagctgacctttgaggagtgggaagacttaaataagtaaagaggaagagggcttcctagtgtggttgtgcaggttgtacataaacaactctaaacagcaccataaatgtcayamtccatgtgtatggccccaagatggaaagacactccaggagggaaaaaaagcatggaaaaaaacaaggagatagagttacataatacatggaaagtttatttggctgatgctagtcaaatatccatctasttatttaggaaatatttatcgtctggcatcattgagatcacactgaacagagtggaagattcatttaggaaagcagtgacaaaaatgtgtgggctgttgctattcaatgtgaggccttgaatgtcaaaccaaggacttaggactttgccccatgggcaatcaggaggtatagaaggttttggatgagaggttgatgttttaaaaatagtgttctagaaggatatcttggcaacaatgtgccagatggcttgggttatggggtgacttgtggtggggaagtgaaggaaaaccataaaccaggaaaagagtggagagtgttaaaggtaattcagtatgggttaacagaaagacatggagtcattttcaaacatacagagtcgactgtacattcaccaattaggtgcttggtaaatgcttactatgtccgtggttctctaatacatgtaaaagggagacagaaaaaaattcaacagtaataatcccaggtatatctgtgaatataaaacacatatccacattgcaagtcagcctgtcaataagggaggacagaacatagataagcagaatgagatatagtgaataaatttaataactgccaactagttagcatttatggagctccttaatggcttaaagcatgactgtatcacaygagttttttttactacaaccctatgaaattagtgttatcagccatctttcaatttcaatgaggaaaccaagatgccgagagactgagtgacctattgtgctacctagccttgcactgtgccaagctcagtatctctacaatacataggtaggggaacctctagttactgagccagctttgtcagctgtggcgagggtcatacctgatgcagccatgagtgcatcccttcctcaaggggcatacaagaccctgccgagctaagacatccagtatggggtctttgtcactgccaagaatgcccctggccataataactgtccttgagtagcaagaatagcagagtccctactccctgctcctggatgagttaggtcaacagggactccaccaactctccatggcactggtccatcagagctgcctcatgcctatttccatgcctaggttatgctgtaggaagcattggcatatccaaggctagatctttcatttccttcccctgcgagtcttctgtaattgcttggaactctgggaagtccagcttttggcttagtagagggctgttctttcactgagtcagggccctttcatgatggaacctcttctgattatgaaggtaatgttagagtagttggtgggtatatttgctagggctgccataacaaaacaccacagactactggcttaaacagaaatttactttctcatagttctggaggctgggagtcctagagccaaggtgttggcaggtttgttttgtcctgagcctctctccttggcttgcagatggcccccttcttgctgtgtcctcccatgttctttttctgtgtgcatgcatcttttgtgtacaagtttacttttcttgtaataataccagtaaggttggattagggcccaccctattgacctgatttttaaaccacatcacctctttaaaaggccctgtctccaaatatagtgggagttatggccttggggtgaattttggtgggagacacaattccgatcataatcctggggaagctcttcccactccacatttcattgtcctgttgtccttgctctcctaattctacttcccttccctcaccttttctggaagtctatttgagcctggatccagaagatgcaagggagagatctgaagtgttgcttaaaaaaaccgcgacagcccacttatgcttaggagctttttctgggcacctttcagcagcaacacaccctcacagttggacttcctgtggtgaaggaaattttctaatttcttttattaggctaattaggaaaagaaaaacaatcattttttctcaaatcagatactataactgggacacaatgattattaatcatcatcagctgcaattgaagtccatttggtcattcaacaaacattccccaaccccattcccacctttccaattatgcaacccctcagttaaaatcgccatctccagaaggctctccctaactaatttggcccacaatggtaaaccccttttcaaaatttgtgtaacatttgacatctgtattacttatttggtatgtattatagtgtaccttaaaatctttaatgtacacatatacataacaaaataagttccttaaggacaaaagaccacactttatataatttttgtttgctggaatttaacagagagtaggcacagaaaaagttctcaaatgtttgctgaatgattaaatgattaaataatttgaggatgggtattttttgggcccataaatttagaaattactgttaaataacattatatagatttcgtagattacaaattttgaaaaaattgaacagcaataaaatacattttaaattcaaacaayatatggrcataccttggagatattgcaggtttgatttcagaccactgcaataaagtgaatgacaataaagtaaatcacacaaatttttgtttcccagtgcatataaaagttatgtttacactatattgtagtctattaagtgtgcaataacatcgtgtcaaaaaaacatatctacataccttaaataagaaatatattgctaacaatcatctgagccttcagaaagtcttaatctttagctagtggagggtcttgcctcaatgttgatggctgttgactgatctgagtagtggttgctgaaggttgggatgactgtggcagtgtcttaaaacgtcttagtgtgtttttcttgctataaaagaatacctgaggctggatattttataaagaaaagctttttatttgccatacagttctgcaatctatacaagaagcatggcattggcgtctgcctctggtgagggcgtcaagctgctcccactcatggtggaaggcgaaggggagcctgccacatggtgagagcaggaagcaagagagtggggagggaggtaccaggctcttaaaaattctagacagaactaatagagcaagaatggagaactcrtcatcattaggatggcaccaggcatcaagctattcatgggagatccactcccatgacccagacacctcccattaggccccaccttcaaccctagagatccaatttcaacatgagatttggagggtcaaatttccaaactatagcaataagagaagaatgatgcttgctgcagccattgactctttcgtgaaagatttctctatagcatgtaatgctgtttggtagcattttaccaacagtagaactttttttgaaactgaagtcaatcctctcaaaccctgctgctcttctatcaactaagtttatgtaattttctaaattttttgttgtcatttcaacaacattcacagcatctttacaggagtagatttcatctcaaaaagtaaaaagcaactcctcatcaatgaaaattttatcatgagattgcagcaattcagtcacatcttcaggctttatttctatttttagttctcttgctgttttcaccccatctgcagttacttcctccactgaagtcttgaaccccctcaaagtcattcatgagggttggagtcaactttgttcaaatgtctgttaatattgatatttttaccacttcccatgaatcatgaatgttcttaatggcatctagaatggtgaatcctattcagaaagttttctgtttactttgcctagatccattagaggaatcactatggcagctatagccttatgaagtacatttcttaagtaataagacttgaaagttgaaattgctccttaatccatgggctacagaatggatgytgtgttatcaggcatgaaaacaacattaatttccttgtgcatgttcatgagagctcttggatgaccaagtgcattatcagtattttgaaaggaatctttttttttttttttttttgagaagcagatctcaacagtgggcttaaaatattaaggaaaccatgctgtaaacagatgttctgtcatccaggctttgttgtttcatttatagagcacaagcagagtagatttarcataactcctaagggccctaggatttttggaatggccaatgaacattggctttaacttaaagtcaccagttgcattaacctcctaacaagagagttagcctgttctttgagtctttgaagccaaacgtcgtcttctctacttacrattttctcgtctctagttatgaaagtcctagatggcagcttcttgcaatatgaagctgtttcatctacattgaaaatctgttgtttagtgtacccgtctttatcaattatcttaatcttctggaaaccttgctgtaacttctgtatctgcacttgctacttcaccttgcactttcatgtatggaaacggcttctttccttcaacctcgtggaccaagctctgctagtttccaacttctgcagctttctcacctttattagccttcacagaattgaggagacttaggttcttgctctggattaggctttggcttaaagggatgttgtgactggtttgatcttccatccagaccactcagacgttctctgtatcagcaaaaggttatttagctttcttattcatgtgttcactggagttgcacttttaatttccttcgacaactttttcttgcactcacaatttggccatttggtgtaagaggcttagtttttagtctatctcagccttcgccatgccttcctcactaagcttaatcatttctagcttttgatttaaagtcagagaagtgtgactcttcctttcacttgaacacttagaggccattttagggttattaactggcccaatttcaatattgttgtgtctcaggggatagggaggccaaaaaagagggacagaaatgggggaatgaatggcaggtcaatggtgcagtcataacacacaacatttatcaattaagcataccaacttacataaacatgacttatggtaccccacaacaattataatagtaacgtcaaagattgctgatcacaaatcaccatgacagatataataataatgaaaaattttgaaatattgcaagaattatcaaaatgtgacacagaaacacgaagcgagcatgtgctgttggaaaaatagcatccatagtcttattagactcagggttgtaaaaaatgcaacatttgtgaagtgcagtaaagtacaataaaacgaagtgcagtaaagtacagtaaaatgaggtatgcctgtagaactaatctcgtgtcttagatgtgtgaaaaaaagaaaagaacactaaagccaggttagaganttctgctttctgctgtgcctttcatggacttttgaaccttgggaagttactcagcctctctcagggcctttcaccatttacaaggtgaggccatggactctcagatgacaactagatttaccttgcatgcagttttcagtgtatggacatggtttactggagaaagattctgagaccatgtccaaacccatctatgaaaagtacctggaattgttagtcatgtcagcaaatgcagaggaggaagtataggtagtgtaagtatagacgttctctgaggtccctccgagcagtaaagctctatgaatttatgattcactttctctttcatgaagagaaagcacttcagaaacttatggggctctgtagtcatcaccaagaacatttgctttcattgtactgttaagtaggagtgctcatyagcagagattctggtcaaccaaatgctgggttagtgtagagtatgctacttgatctaaattcaggaaaacatgcccagggcgtaggacttccatactacacaaattttcttaattgcattggtgtaaaatgtgcaattaaaagggtaatgagagtggttatctctaggtaatgattgtgggtaatttttgttttcccgtttatgcttttctgtacttctaaatgttcatatataacttttatagttagaagaaacaaatcctataaaaaagaatgatagatactctagcaagatgaaagaacaaggaagaatttcaaaattcagttcatttcagtgaacatttatccatttcattcaataaatatttatttaccacttacaatgttacaggtactgcaggggttaccagtaactgattcaagaaggagagctgttcacagagcaagatgtttcacagaagrgaaagctattgaactaggtcttayaggaagagttatcaattgacagaatatgaaaatggggcatcttgggaagaggaaatggtacctgtatctggaaaatgtaatgcattatcaaaggaccgtgaatgtttctgagagggatcctccttaggagtggggggagataaggctcggtaaatggatgaggcccagactgttgtgtcatggtgtctaactagtgggcaaagtagagccactgcagggttctaagcagaggaaggccaccatgagaacagtgtgttgggaacactgatgttggcttcaggagggtcagagggaattcactgggcagcacagtggttcagggtaagggaatgctgtataagcaccaggcttcttcccaggtgttcttaattattacaaattaggaagattaaggtttaaattgtgtcactaacatgcttattcagtgggtgaggctacaggttgctaaacttgttagaattgtgatacaataatctcattgttttagtgtcatgtcttttccacccacctctgctttctctttctaaccgtctcccaccccatgttattggcatttagttcatattcattttagtattaaagkgaagtaattatttctgtattgtgaaattggcatttgagatcattggaaatattctttaatgctgtaagctagagttttaaaaaataggattagttaagtcatattttttaaaagcgaaaaaaatyacccagaagctattgaagatgatgagataaygagatgaagaagttgagatggactgtgtgtctcttgagtcaatgtcgataacctttggaacctgtcctaagtgagaacctcgattgccctactgcaaatgcacgtgttcagctgctgattcaggactgatcactgggggtgcctcagaactttccattttcttagattcgtcagcaaactcacactcagggaccttatgagaccaagtcagagtaaatgtccagggtttacagagtggatacagtggctctgtttctcaagaaggactctgtataattaaattatcattcttctattaaaaaattgaaattctttctcccaggagctcattgccagtgccttctctgtagtcttatagtcaattcaaaaatatatcacttctggaagatgtgagcttgaagtgtgaatgctatcacatgaatcttctttttatcatagaaaaggcttttaggtggggtgttgatgtcaagattaactcagagaaaattggctgcagttagggctgaatgatagtgatcattccaaaactcattaggagtctaaaaagtgaatatttagactttgaccaaaacccatttgtcctagagtgaaatatggtagcgagagaaagacagccctgcaaccccgaagtgtaggcgggcctttctttaggaaccaggcatgttcttgaaatcttgtgtgtcaatcagctttttgtaaatggaatccttttttctccttcattaactttccctgtaatttcagcagtgtttaacattcattactgattgatcttgagttggcagttaactgctaacattcagatttggattttagtgcttctttcttgattttcttgcctttttttctttgctcactttctttcagcaactacttaaggagtaaatactatgtctcaggcccagtgatagggactgggaatataagtaagaatgacaggtaaacaattaccgtaggaaatggtaaatgcaaatcctaggagtacagagaagctgtggtagcacggagtccctstgtctggggagggcttcccagggcaggggttactgaaggatctgaagatgtgaggaggtgcttgcttgggtgatgcccatccaaggaagaccaggatcagaggcaggtttgggattaactaactggaaggactttggtgttgaggagtttcagtctcaggacaagcagtgaagcagctgatgmtctttgcttagccttctacatggagtgagttgtggggaaaagttgtttgcaacatgtatttytctaatggccagggaggggttatttcactattatttctctccarcttttctatcaaatacacttgtggagtttctgtagtgtgaattgtcttacttcaatctgtaagttcaatctatattcatgaagtaggagggcacccctaaataagattgagagggaaaaaacatgaatattttcagttttagtgggaactctcatatttgacttagtaacattaaaaatgattatatataaattacaaattttttatggtaaaggacaccataagtaatgtcaacaaatgattaatacactgagaaaaatgacacgtraaaaaaattctaatataagtatatataaagagcctctatamatttataagaaaaagacaacatatagaaatatggacaaaggaagagagtaagcgattcaaaggaaaggcaaaccatatggccaataaacacctgaaatgatgctaaaactcagaaaaatgcaaattaaagcaataaatyggaccaattctttatccatcagattggctaacatgagtaggaagattagtggaatgttgcctacctgtggttctgtgcrtctgtgtgggtctactttaatgagtttagatctaggtgcttgtcctggaggcacattcacagtgtgttttttaaataagaaaagcaagttacagagtaatgtgtatagtatgatcccattcaaaaaaatagcaaaatgctatgtgtaagtttgaatgtgcatgaagataggtgggaagaaaacacatcgggccataagcacttaccacagcaggatgggaatgggggragggtgggggcaagtaactttttctatatacatctttgtatgcagttgtatacatattgcctttgtaatttaatgtacaaagacaaaataagtacctagaaattaagaacagattagtacactttttctgctactgtcttgccatagtgttgttcaaaccagctagaaaacaattctgtggtgccaggtgagatgaactctccacctcttcctgagggctttgtcttcatgcatgggacaaagcagtgtaattaacatgcccccccmccccgccttaaaacctaatattcattcatctcttactttggttattatttaaaaagaaaacatttgtcaattacttcacactgacaagcaccatcccactgagggggcaggcaggaggtccatctcaccacccagctgtattgcaacaacgccctctccatctgggaatacggcccaggcactcctctggaatcctraacacactccaggcacctctcttcttactgaacaccacctatgcttggagcaccatgtgagaggacacctctggtatcaggcagcttcagatgtattcagagagattgaaaactgcaaggattcaaggcataacaaatgatacacagacaagaaaaaaagacatttagagtgggggatagggcctgaaggcttgaatggtcctacaagactttctcaaaagtcgtcaccctgggacctgaaacattagagctctttccagagtaagtctattctcrgccagaggtctccaacagaggctgtccatgtgtactggtttcaagttctgcttacctcccaagtgttgttttttctgaccctgacctaattcctcccaggccaggctggccagcaccttctkaaattgctctcaggcagctggaaggcctggctggcaggagccctgggtttttcaccctcagccccagggctctttgaaggcctactctccaagaacaaacaaacctggcctgacgctgcatagctgcagaataggggagctttctcggcctggtgcccagggtggccgagctgccagccaggtgcatgatcctcagttaattaggtaactataggtagtcctgcagcccaggctgtgtgctgattagtctgggctgttgttggagacctctgagaatagacttactctggaaagagctctgatgtttcaggtccagggtgatgacttttgagaaagtcttgtaggaccattcaaaccttcaggctctatccccctctctaaatgtcttttttcttgcctgtatacatctgctatgccttgaatccttgcagttttcagtctctctgaatatatcttaagttgcctgataccagaggtgtcctctcacagtgtgctcccccagcatcgtgctctgagcataggtggtgttcagyaagaagaraggtgcctggagtgtgttyaggattccagaggagtgcctgggccgtattcccagaaggagagggrgttgttgcagtatggctgggtggtgagataggcctcctgcctgccccctcagtgggatggtgcttgtcagtgtgaagtaaaccctggagcacctgagggaggaagaggaggagatagatcttcagcttccagggattagactgaaagctcaactggcaaaatgcccattttattccctcattgcaagctgaaagtagagagctgaggaaccccgggcttgaccacttttttgcattgacagatcctttgtgggagacacatgatccacatgggcattcctagatccctttgaagactccataagcccagggagatcagatttacctcaggtttcaagtagatctcaagatcccactggaactcagattttcaggggagttcagaattagggcacgaagtgcaggagatggtatcaacagcaacaaatctgtctgatattctaaaagagttcatcccagtgtagccccaaagacttcagactgaaccagattcaccttgaattgaataagctgatgcaatattggcagctacacattcttcatatgacacctcttttctcaacttctcttcaccctgtagtctccacagagatattcctgagggatagcaagagtggggagctaacctgtttctttgcactgaatgagcaatgcttgtgcctttcctcttttcttgtatcygtacatttccagaggagccagtttatagagggtatagagtaacccaagaatacaggtttgggagtaagggagctggcttttattccaagtgctgccactggctctctgtgtcatcctggtcaaggcatggggtgggagcaggtgttgaaaggagcctgctgctggggattggctggcccccaaggagcttatgcccctcttgctaggatgctggggatcaggtcagtaacacctgtatttacagatgtgggctttgttacatatttaatatttaatttaaaaagaattaatgacagtcatagcccatatataacccacttcctgatgtgatttgtttggcccagttttacaaagttgtcctgtcagaggaatttcatttataaagttccttattgctgagcctctgtgtgttccagttatgagtcacatgtgtcaacaccgtggaaatgaaatttgtaccccctggacccatgcagattgatttgattctgggctaaatggaaatagaacctgtacaagtcaaatgtttctggagcatctgccatctacagggcacttggaggaaacataaagacattcaagacacaatccrtgtattcaaagaatgcacagtccagccaacaatgttttaaagcttccagtagtttcctaaaaaataccatagtctttttgagtttggagaatattattactgttgtcaattactttttattagcaccctgtatgatataggtactatcttaggtkggtttccctggaagtcagctctgcaaaagagaattgcaagcagaacgtctttcgaagtgtgctttgggaagatacacctgaggatgcaaaaaagccaaagttcaacagaggaaaggctgactcgcaccaccagaactggatgtcccttcagaggtgtctctaatcgaggcaaggggcagtttccaaggaagggtgcagcagctggggaataagagtgtctgccctgaaagcagaacctgagtataatatcatggtatccactccaggcattcaaattcattcttatcaccatagctaatacttaccgaatgctttctgcttgccatagcttgagcgagtgttttagctgcactgtttccgattcatgcaatgtagagatgaggcagttaaggggcagagaagtgaactgcacaatgaataccatggtaggcagagaggtggagaggggaattattaataactgtcagactacacttttttatttttttgagatggaatcttgctctgtcacccaggctggagtgcagtgccaccatctcagctcactgcaacctccacctcccaggttgaagcgattctcatgctttagcctcctgagtagctgggaatataggcgcctgccaccacgcccggctcagttttgtatttttggtagagacagggtttcaccaagttggccatactggttttgaaatcctgacctcaagtaatctgcctgccttggcctcccaaagtgttgggattacaggcatgagtcattgtgcctggcctcaaactgtacttcacatgtaattttcaaagcgctatcccatgataggaattatcattcccattgtacaaattgagaaactaaagcatggagaggttaagggatttacccgatgtcacagaacaaagaagaaagaggtaaggccagggttttcctattagcctatgatgtctcacagagataacctgtccagktagatacccagttttggctggagaaggcatcacagaccttgggtaattgatggcccaccagtttgcacccctttccattaatgtggaccgatcatgccctttgttgtgggtcagtgagcgtggtctttgaagttaggcagatgtgggtttgaattctagctctcattttatgacttacgtgtcagttcacacctctaagctcactttgctcttctttaaaatgggggtgataatgatgacttcattgggtcattatgaggattaaaagaaatcaggtatgagaaatctctcagcacattctcccctccctggcaaaagggttcaaggctgcacaaagattatctaagggcagatactctgaacatagccatagtttattgattcagcgttttgtcatttgcttccctctctcaagaggcaagagagaaagcgagactgtcttccatgcagtttgctcagaattctaacactagcctgttagtctaatcataacacatttcttcttggaaacaaacatagcaacagcaattatatcttacttttaatgtctaattggctgtaaacttgcttttactaagttatttccatcgaacatgtagagcattgtgcagtttgcttatcttgatgtcctcctcttgcagtccccatcttggctttattcgggaggccaattatgtgtatgctagccttgtgggtgccctagaaactccagcaaaggccagtgacagtgttgtgagccttctgcycctcattatccacagaggcaggagcctatcagagcctccaaccttgaatttttgtgtgagttctgcttctgttctcctactccaggtatgtcccctcacctggcttctggagtaacccatccctgctctctgaacccccacttcgctgtgccttcctctgcttctaaccctgcctctacgatgggctctctctccttttcctcataagccgatcattcttttcctgcaagaagtcccacagggaagccatgccatcctagccagacttggttatggtatgacctggcgttcagaggacacaccccagcacctctacactggctttcagccagatatgtcttcaccgcttgttgagacagaacagctttcttctacctttatgctatgaagcagcctttccaggagccctactggggccagagcccaagtgggaagatcctcccttaagctttcccctctgtttttccaactcctgaaacttacatccttctgcaggcttcaggactcagtgtaggtgtgtctgatgcccrgtcatcctagagaaggggttgtgggaggggctgtacctgttgctatggcagcaaccagttgagatcatgaacccatttgattcagaggcaattgcaaggtgaatcaatctccttgtcacccactcctcttctcctccctctccatctctccccacagccttctgtcatctttcctcctccccactcaacctcaagctttctccttccccagttctctctctctctctttttttactcctagttatgatacatcaatgtagcagctaaagctactcatggtagacttcttatttatattatactttagcaagcatcacctaaagggcttattaaaacacagattgctgagcttcctctagagttctgatctggactctgcaccaggacccaagaaagtgcatttctgacaaggtcccaaatgatgctgacactgcaggtccaggggccacactctgagaacaactgcgctagactatgtttacccagtttgatttggttgtggctggaatattcctctgcattttgattctaaagtatttgattagctcattcatccattcatagaacagatgtttattgagcatctattcagtgtgaaacactgtactaggtactagctacctagagaaacataaaaccttgccctctaagagttcacagatctgtacaaaagacacagtaaataagtaattattatatggggtgataagtattgtaataacctgcaaataataagagatttaaaagtatacaaccaactccttgctcrtggcaagtaaaatatttagatgataggaatataaataataatgacctattcatttatttttctttctttgccaagaattgcctgaagggaactgagcttaacctatttaaataataatattaacatctaatgtttgtggagcatttactatgtttcagatactgtaccacatacaaggcatattggttaagagtgctgcggtcagactgctagggatatagtcctgacttgtcattatctgtgcaacctcaggcaagttacttaaccactctgtgcctcagtttcctcatcagaggaaaaggttatagtactagtttctgcttcagcagattactgagaagatgaaatgtgataatgtagtcaaaacatatatagtaattactccaaaacacgttgactcttattaccaacatattttgacctgaggctgaatatcacagaattggcctagagaaattgatatcttccagactaaataaatctccaggattttgtcaagagaatggatgggggctggacctcaatgtggggattagagaattccaaaacaggcctgaaaactccttggagcaccagtcagaggaagcagccctacttggctgtcggagaatcagtgcaccccaatggaatataagaaaggccctgatggatggccaggatttggaccatgaaacttgttttggaggagggagggggattgtcaggactgaggctttacagtctctggttgacacagctgaggaaggcagaaccctcaggctggggtgtgagagtttcaagcttagccttgaccagtcttkccatctagagaaccagggtcactttcaggcccaaatgccacggggctggtgctgtcagcattatcagagcgtttcctagcaatgcccatcagcaaagaggctgtgttttctgaaccttctccaaagaggctgccctctcccctcttcratatgcacccccatccctgagagaagtgatttcctcttgttatttggaaatcagggagagagtttcccaatctttgtctggggctctacagggaccacagtccacattcatgttgagtcaggtctctcttttctgtctcttagacccagcttcacagctgagactgtagctatatgagaaagcagaatctaccagttttgttttaatcctttcctgagctcatcagagataagagtgatagaaactttcttcttacagagaggattagaagttctttgtggcaagatatacctgggaaggggttattaagtgatcatccctgataaagcccctctaatcatctactagttttgctattttagtggtgggaaaaaaaacacaaaaccctaggcacttaactcactcttggggaaatctttctaatcccttcctccctccctccctccttccctccttccctccctccctccctccctcccttcctcctttccttcctgccttccttccttcctttctgtgtgtctttgtgtctttctgtctttcatcctttctgcttgtctcagatttaatcggagccatacattccgcttattcacttatttgtttgttcattcaacaaacacttgctgagcacctactgagagctaagttgggttctgggccagaaacagacaaagcaaacctgcttcttgttcttgagggtgtcaaatattgtagaagtgaacaacataccagcccacaatgattatgttgcagttaagtggtatggtggaattcagtgyagggcataagggagtgactgactctgggaaggttttttagtgaaggtaacattcagtcagggattgagtggaggcttttcaggtggaaaaggtaggaaaggcattataggcagtggggacaacatgagcaatagtgtagacataggaaagaatgtggcatagaattgcaagaagctggatgtggctgtgtgacttggtatacaggtaggcagatgctgtgagagacagatgagctagagaggstaggttgggtcagtcatggtaggggattggcatgggcaaattcccatttcaaggtattaagcaggggagagacagggcaagatgtgttggttagaaatgacaactcttccctgctctgaagaatgaaaccagctgtgcctgggaatcacttgcccsactttacaagatctccctggcaacagaatggctgttgtacaactagccagggaatttgctgtgacagtcttccaaccttatctgacatccagagcagggaaggaattgccaagttagggtatagatatcaaaggaattgaagcaacacaacattggaatagtattacaatatgaaattagaaactattttctctgctggcattgttgtaaataccagcatccatcactcccttctcaaatatattgtaagttaaaacattgctatttttatctctaacccccttgccctctaacccaggcaatacaatatagcttcttgaggagaggcccaagctgggtgtggattccgaatcttcacccagcttcacatgcttattgtgggagcttgggcacatcccctgtgccttctgagcctgggttgtgttgttattgttgcttgttggtttgtgatatggtttggctgtgtccccgcccaaaatctcatcttgagttgtaatccctataatcctcacaatctccatgtgtcaagggagagaccacgtagaggtgattgactcatgggggcagtttcccccatgctgttctcatgatagtgagtgaattctcacaagatctggtggttttataagtgtttggtagttcctcctgcattcattctccatcctccctccttgtgaagaaggtgccttgcttccccttctaccatgattgtaagtttcctgaggcttccccagccatgctgaactgtgagtcagttaaacctctttccttataaattgcctagccttgggcagttctttatagcagtgtgaaaacaaaccaatacagtttgttacatgtacaattgcaatagcacctctcttgcatgtggttgtgaagattaatgtatgctatgcacctggtccaatgtccagcttagagtagagtagatgcctttttttttttttgagatggagtctcgctatgtctcccaggctggagtgcattggcatgatcttggctcactgcaagctccgctgaccaggttcacgccattctcctgcgtcagcctcccaagtagctgggactacaggtgcctgccaccatgcccggctaattttttcgtattttcagtagagatggggtttcaccgtgttagccaggatggtctcgatctcctgaccttgtgatccacccaccttggcctaccaaagtgctgggattacaggtgtgagccaccacgcccagccgagtagatgcttaacaagtggaaaccattattatttttctccccttcgatacatggagccttagggtctaagtgacaggaaaatgttcagataaagatgttttaattatgtcttcttagtacttccagaaagaggtctgcatgggtttaggtcagctctgccttccgacagcttacgtgcattcttgtgttgctctcccatcttcactgctcttcctacattccaccctaatgaacggcagagagagctatgcaaagtggtcaaagtaaaaagggattctttccgatgtttcccagattggagaaacaatgaacatgattactttattatctctgttttgttttaatcttgttgtgccccaaactaatggggatgctcatttggaatgagctttgtgtatctttgggcaaagaggaaaaccaagatgaatttctaggagggcagcaggagagtgaataagagagtacaaatcatcacaaatcaagagatgagtaaagagaagggggttgggaatggcagaattggaacctgagagttagagtccatgagagagaggagaagcaaaatgagaaatatggagtctgagtgggaaggaaccccacatctgtygtctgatacaggcacctactcaagggaggaattcggcatcagtrtccctcacagatggttgcctgacacagtgatttctataaataacaattatatggcactacgggaagtggatgaggctacttacaaatggagctgaccagcctggggactgactgtccccaaggtctgtcaaagaggtgatgggaagatattttgtgcacatctgtagctcagtgtgctatgagaaactgacctcatagggccatcttggagtgactcacccatgtaccttcaggccttcaggtgattaataggcatgtaggactgacgtttcattatcactgcatcaacgctgatgtagacttattgagcatgtcttccattgatgctgtcttgggttctggagatacaaagacttacaagccatggttccttgctttcaacctgtttttrttaaggaataggagtgtttcctgtggccacagaataaacgaaactaactgtcctggggcttcttcaggaaaccagtggggctaaccagacttacatagtgtttgatacacaatcattaattaaaacagagatgttcaatgataaattaattcgccttctgctcagaattcattgaggagggaagaatggaagccaagaaaaatgattatctgaagcttttttcttgagcgtctgcccttgtaggctgtgctgaatatttgagtgagctaagtgtacttgctgtatgtcaacagagatgacattttacaggtgatatatttatttccagagaaggaaacttatataggcttgtgaagcagaagaatgccagcaggtttctaatctcctattagtaaacaacattatcgagaatctcctgtttgtggagtaatattctaggcatttgtagagtgaacacagaaataaagatgcagttctgtctttaagaaacattcagccctaatgggaatggaggaccaatatgtaaaagagacagaacacatataaagaaggtccataaataagtgcaaataaatgcctgagtgcagcacttaatgttctgttttctattataggtatttgtactcacgacttagccttcttatggataccaaagcccttgagaactgttttcctttctcattcatcttgtgcagagtacacactcaaaagtgttgaatgaatatgtatgctactgtgaggtgtgcctaattgctgggggaattctggagtgaagtagaatgacatgtttaggggaaaccttatagcggcttagcagtgttttcaagtatgagaggacttgtaattggtggagtaaggggacaggagggagaagaaagaaggaagagttcacggggactgagcaaatccaaacaatttatgccaccattcagggtcctccatgatctgatccttcaggtcttaccttgccttgcttgctgccaccaaaggcagcccactgtggccttagcattcccacctctttctctctccttggaatgtcttcctctgttgattggccatctgaatccaccttccacttcatgtctgggtgaaagtagagtctcaggaagccttacatgacatctctatccttgctcctatcttcattaaatggcagtgtttgcaggtctgatttcagtggtcttaaccttcagaggaaacgagagacaatcatggtcttcaacctcgggtagctttcaaatgagatcatgaggcaacactaattttttgtttttttttttttgttttttttttttttttgagacagagtctcgctctgtcacccaggctggagtgtagtggtgtgatctcggcttactgcaacctccgtctcctgggttcaagcgattcttctgcctcagcctcctgagtagctgggactacaggcatgcgtcaccacacccagctaatttttgtatttttagtagagacggggtttcaccatcttggccaggctggtcttgaactcctgaccttgtgatccgcttgcctctgcttcccaaagtgctgggattacaggcgtgagccaccgcgcctggcctggggcaacactaattatatacaaaataataagagggagcagggctgtatataattaggtgctaaacagagtagacagaacagaagaactgtgcagagttgattggaggtcagaagtcctgcattctggttctacttccrtacccaataagtggagtaccttttggcagtcacttggcttttgaaccttggttcttctgtaaaatgaggggtttgtgcaagatgctgtgattycttccagctctagaatctgcaagatgataaaggttagagtactcatattagactgagtgggaaatagtgatttgttagtaagaggggagaggggaacatcaggaaaagcaataaatgatggcgaccagaaggaytgattcctgacaaccataggacaaagtggagaatcagagagggactggttgaagagcggttaccttggtattatccagcatgttctttctggaataggatgggcactgcacaaaacgttcacaatagaggatatatgaagcctcctgtactcttttgcgtttctgatactcacctcccctcttgttttcagagccctttctggtgcttgccactctttaaagaatacaaatctctcatcagcaagccctgtagaaggggcaaaggggtgatgyrctttagctcatcaccactgggcacgttctctttaatcytctcttaaattcacctgctttggctgatctgcatacagtgggagtggtgtcagatcaacacactggccttttcccaaagcaaagcgggatcccagcctggatggcccagcacagggtcagctgcctccatcctggccccccagagcatctgcctccccagcaccctgggctgcagttgcagagggccttctttttaatgtttttctaataatcayttttttcaaaccctaaaacaacactttgttattgcatgatagttgcaaaaatataaaaataatttttaagaataactcatttctaccccctcactccccccacaggttatcatcactattattaataacatttttcactgttttgactaaaaaaggttttcttttaaaattcacccatgacccagaactatttaaataaactaattttattttggagaaagaccctaaaacttttattatagagattttcagtcatgcacaaaagtagagagaataaaatattaaaccctatgtaacccacatcagccccagcagttacaagaagaccttaaagtctttagaggatcyggcatctccctgttgggcttctgtgtcagagttcagaaagggagaggggagggacaggataaatatcacatgacatcaatgttggaattactaggatttaagcagagggattttaagcacagcaggaccctgagccctgcccatattggaggtgcccacttttgcagaccctgccacggcagccttcgtagtcctatgtggcaccgctctttgctcttgaattgtcctcccaagagcgtggatgggttttcactgacacacgggtacctgcctgcccagtgccagtggtgaggactgcccacatctggggtgggccatgccagcccttgcagctgaccggccagagctcctgaccctggtctcggtagcatcgtgtggctgcttgtaggttgggtggaggagtgtttctttctgtgctcctcctctttgccaaacactctgctgcattttcccactggcaaaagaaggggaagaataggtggtgaaatgtggttctggactgaggcactgcttcatcctcagtgacaatcactgacattcttggcagcggggagatggtggctgcatcaagtccagaggattctgaatgaccwgaatgtgtgggaagccttgcttactcataacggcccctggctaagycagatgctgcctccagagattgtttgtgtggggagacttagtatgtttattaaatatactcagggctccaagttacagtgaaacgccctgctcctgggcctgacaggctcagcctcctggctgggtggcagcaggtgcctatgtttcacttggagctctaggtcctcattctttcccctgctccccaacctttgcctcttgcctgggkgctgagaagacagctttcatttttctggctgtaagatcctagtggtgactgtcctatctgtcttttgttctgccctagaaggtagtaatagtatgggtaggattgcttttaagagttctggaactaaagcagacatgaagagtcaagggtttgcaagaagttgacccattttggttctagattgtggccccagatctgccgataagttgcttggatcctcagggaagtcgctttgcttccttggggctcagtttcctctcctatggaatgatgagttggatgacttgttctcatcatcctcttccaagagtatgactggatttcctagtctgcaggaaacccgttataggcatttaattgcccagtgatgtgtgggktatgctgtacattgtatccttttcctaaaatgtgggtgtggtcagaggaatcataccttggctttgaggtagaaacaccatccaactggtgtgactcaggggaggggtgttgccagctttgtatggtgggtcaaaaccctgatagaatgccttaaatcaaattccctagaaactgattgtgaaactgagcttcttgtggcagtgttttaatgagggactgctcttaggagttacctaaaggtatgtgagggaagcaggataggtcaagggaaaaactaggcaaagcctcagcctggttccatgggcagcccaaagtgtgaattccaccacagcaattgtcttacccagtggcaaaagggccgggccattgataactcctacattaggtagttatctgttacagccccccatcatcaccagcaggggcaggaataacattccaggtgaagctggtctgtcaggcaagggcaagcatctgaaaagcgtacaggagcaaggcaggtgtgagttattagcagccaacagttacrtagcagctgggggatgagacatgggccagaatgccacagagcctgccacgtccttactggtgacagccgcgcagggaggaaggcaggagtagggtgggagagggctgtcctgggtggctgattcctgtggatggctcagcacatgcaggaaagtgttcagatgggatttccaattaggtcaatctaagtgattgttctaaaagttgggatgatgttacatttggggtgggggatagtgtgcctaggaagggacgtgaggaagaccttaaggttatctagaggctggttgtccagtgatatatattttgacaaaatccggggtacctttatgacttgcatttcagcataacatccacacagagctccagggcgctgctactgcaaggtagtagcagttcattctgagagggcgttccccaccctcttttttcttcttataggtcccccacttcttggcatgtcttcatcttaatctttttctccatctttcttctacctccataattaatcttttcactgcctttctggcttctgctgtctcagcgaaggtagtttcttagactcccgtgttattgttttccctgaaaacttcagcacatccttttctgacttcccggacccatgcaggcccacctgccccagttccctgtgctcccttcatagcactgaccacactccagagttaaagttacatttgtgtgctcacttgcttcatgggtgtttcccccattagatcacaagtttcaaagagctgggactgagactgtcttgctcatcatccttaacacacagaaaattatctgtcacatagtaggtggcccatgaatgtgttgaataaaaaatatggcatttcagctccaagacatggaatccaagtccctcggggtgggacaggagctgtcatacttggtgctggaggaaatgggagcctaggggagggtgtgctggcctgtgaggtgcaggaggccaggtatgtgtctgtgagggaaggtgtgaagtagttgaatcagtccctggcctctttccttccccactcactgctctgtgaattttcctttccctaggagtggtcagcagaggctttggacagatgcttctgcagagatgaatggcctggcttttttgytagcctatgttggctgctccaaccctctcctggcctgagccgaagatctctcctcgagatggagccttgagtccagcagttcttaatcaaaagtaatcttgtcccccagaacatttggcaatttttgattgttgcatctggagaagtactagtggcctctaatgggtagaggmcaggaatgctgctaaggcacacacaggagagcccccaccaaacagaactgtctctccacaggtgctggcagtgctgcagtggargaagccctgcctaggccagccctgatctaaccagcaggtgctgctgacagcctctggagcaggtgttccccagagaccctttgcttctgaaaggaccatggaatcagcatctgccttactcccagccccaacacactcagcctccccactcagtcataggcaattcagcctcccaggttacagctgctctgtgaagagggtgcacagacagggagaatgttttccatggagccctggggaaccctgttagagacctgtctctggggctgggggctgggccctgcctgcatagcttcagctcaggggacccatggggcccctttcctcctgcttgctctatccccatctttctctccaatcctcctcccaccccaccttgcagcatctcccccagtcccctggagattaatgtgataattaccatgtgtgcctgtttacgcagggagtgggtgagctcaccacccccatcagtcaggttcccaaaggaacacattcccacaatgtcaggactggtacccgctgagcactcctgtgcaggtgggctgccgcccccgaactgctttctctgtcatcaccctcgtcgtgcacacgtgtgcatgtgtgtgtcactcaggggatcggcaggtgaggaagatggagagcagccagtgtgccagtctagggaagggctgggtggggagggtgttgggagatgggaggagcatcagtgcyccatgtaagaggacactgaccaaagagaagcactctcctatgatgcctgactgatagtaggtgttgcatgagtggtgtgggatggaggggctggcgtcttctgggcagcattctttgcagggagggccctggtttcccttagctgctccacagtagaggtctsggctgtgaaggttctcctggggccagaatcttgattggagtacttagcatggctgtcccgtgttcctgaaggaagagtctctggggaaaatagagtgcaagtcttacatgaaaggagcttgcgagaactgccactctgtcacagaagytgggggggatgctgtagagagagaatgagtgattctccctctcacaggcaaccctcctctcttgcacctcctgctgagacagacacgtgcacaccacgagagagaaaacagtcacaactctgtggttgaactggcagcttcaccccgacttccacttcacgtgctttctgggtacttgctgccttgagttgtcggttgctgctgcttttttaatctcaaaggacgcttgagtcattgtctctcctacactggacaattttgttttaataatgatgaatcagaaggagattgaagccccaactggcatcagaaagaaccatgccattttgaaaaagggaagcatgcattcctttgctagcctgcttcctgccgaggtgtgtccctttgtcctaccgggtgtgtcactgacccgtggacaaacatgcaaggggagtggaagccagttggccaggaagaatgaaacaggagggagaggagcaaggtgtggagaagggtggggcaagcctattaaaaggtgtgtgaataacctacaggagctgtcaagctgctttctccagaagaaccttttaagctgtcagtcatcttcaagaacccccagggccttgctggtgctggtgtcttcccagctatgcttttctccttctagttcccatcctcctcttttttcatccagcaggccccactgtggtggataatgtttgcggcaattcagagaaatctccacagattgagagggggctatgagaatgaattgtatcagtgtatttttaacaggagaatcttcatattagaattgtggacgttttttgattagtcgaccatctatgcatgccaaaccctttgttaggtgccagatacagaaatgagcagacagttaaggtttctgcctgaatataggttgaagcaacaccaaaacatactcacaaaatgctgaatcaaaagacactgctcgtcattggttttttatagaattgagaaacacattccagattctgacccactgtagttcctacatttcaaaggctatgttcttcgatgtgttactagattttctctgaaaatgagggtttcactatgatcaaaagtgtttatgaaatggtggaataaacaaggtaaataatgttctttttttgtggatcttctcacgggctcagaagaaaatataatctgctgtttcccaaatttctttggttacagaagccccttttccacaaaatacactaacttcttacagatctctagcaatgagaacaatgtaattttggacatcctcattacagcatccctggcaagtagtcacccaagtgaaattgctctgagccaccctcaaactgtagctcaattatttaagaacaaaattatcttaaaagtcacaatttcatcattgctattgctgatacctgctaatgtttgttggcaacaaagtcctatctgggtgctgggtgtagactcagtttttgttgccaaggaatgttggggtgctggggggtttggccactggctaagccatagagtgaataaaccctgttaatctggagctttactggtgaacsatcagagctagccagccttacagaaggactgatttgtaatcacaaataaacacagagctagctatacaaatatcattgcaattcacttttcagctcatagggaaggtccatgtcttaacgatctcagagaaaacggcttcctacctcccttaaaaccctcaacaactcttggcatctagttcctttggatctttctactaatattcaggaacagttttctctgaggtctggcccacatcttccctgattgtatttaactgaccagacctgattgaaccaaagagctccatcttacacactgaaattggcaggtccctgcatctgtcccttcccattcagaaagtgttttcttgtttacttttaacttttattctgcttcaattgcaattatctctctctgaatagtgtaggggcaaaaaaaaaaagacacaagtgtggtgaaaggagattgccttagaagctgttttagtggggtgattcctcaaataccccaaaacagaactagcattcaacccagcaatcccattactgggtttgcttacaacccaaaggaatataaatcattcggttataaaaacacatgcatgcatatgctcattgcagcactattcatgatagcaaagacatggaatcaacctaaatgcccatcaatgacagaatggttaaagaatatgcaatacatatacaccatggaatactatgtagccttaaaaaaaatgagaacatgttctttgcaggaacatggatggagctggaggccattatcctcagcaaaccaacacaggaacagacgaccaaatactgcatgttctcacttataggtgggggmtaaatgatgagaacacatggacatatagagaggaacaacacactggagtcttttggagggtgaagggtgggggaaggaagaggaccaagaaaaaagcagctattgggtactaggcttaatacctgggtgatgaaataatctgtacaacaaacccctctgacatgaatttacctatataacaaacctgcacatgtacccttgaacttaawataaaagttaagctgttgttaatggatgaatcaactatacagtgatagcttccatgactgataagaggctatattctgtggactggaatatttgaatgggagacagaaatgagataatttggaagaaaacaagagaatgtcacagaagtccacaggaagcatggggacaatgaatcaaaatatgttttcagaatttagtagtgagagggggaaaaggtaaattggagggacaagaaatactttgctatagaaattctgagttctggtcttaattttactaatttagcttgtgagttttaggcatggcatttgactttggccttgtttttccagtgaagtagagataaaatatctgttgtaagtttcaaatgggtcttagagtttgtgtgtgagagagtggagtgggggtcgaagggatttcaaagccctgcatatgtgaaatgcaattcagaaagactatttggaaagacttcgaggtgctgtcaggggaggaagagtcaaagggaagactgagaacccttagttgagtggtacagcttttagagagactcccaagctctatttcaaggttctaataagatatcctgctaagaattgcttctttgtttaagtcatgagatataattcttcctcaatccctgaccattcaagggtcttgcatctgattcatgattcgagaatccggaatatggatttgcaggcattttttaattcactgagtgttaacattagagtgcaagtgatcactcttcaaatctagatttattccttgttctggccagagccttgctggggccaagcctgggccagctctgtgctattgtactatgatggaagaaagcaagctgagcgtgggtcaagggctgagcaagacgcagaggaccctaaaatgtcttccaaataaccctgtcaaggcctttgctagcatccatggaatagattgggcacagcctgcctttgtctttttgagaatttgcccaattttgtgtgcagaggcttagaacccacattaccaaatgctataaaaccagtggttgtttgcgtgaccttggaaaagtatctgacctttctgtaytgtcttctcatgtgctaagcaagagtgtgagaatattccaactcagtatattatggtgaggctgatgctgtgttcttcattacgtacatgggagattttgagctaactcacggtaataccaaattgggaatggagtaaggcaatatttaactgtattgcattgtggtttttacatcaccctctgtgcagctgcaagaatgtaagctttacttatggaagatggctttaagtattaaggaaccatttttctttctttcagaccaatgatgccttaggagccacctggaattggctgtacttcatccccctcatcatcattggatccttctttgttctcaacctagtcctgggagtgctttccgggtgagccagatgtttctctcttcttaactcatttgctgactgctaactgtaaactaatgcctcctgactcatggcagattcattcatttaaccttcatttagaagacacttacctagcagttcctctgtgccaaatgctttctagatgctgggaatgcagtagtgaaccatcattctaataatcttgattattctcaggaattaaaaagtcttgatgtcaggcacaacactgaacacagtatgtagtgagagttcatttattcatccatgctttcattcagtaactcagcagtcagagacctatgtcaaacacggtgctggttgttagggaaataaaattgaactagacacaggctgtgcctcaaaagtttcttactctgtagtgttttggggatcaagtctcatatttgtggcttgaattagtttatacaaatctgcaactatttggggtccaataccatggtaagcatcgccaggagcacacaaagtataaggtgtggttcctctccttaggaaacatgttttgccaagaagatgatacacatgaaacagagaataggagttcttttactgacttatacaaggtataatcatttgttttggggaaaggacaaatctatgtaatctgaagtcatcagggatagtttcatcaaggattgagattttgcttggattatgaaatatgtagtaggattacatagactatatgggagtgaacatttcaggaaggggaacatcacaccataagcaaagatgaaaaaatgggacttgtcatggagtgtgaagaaattataatgtaacatcttaggagagctgagacggggatatattttagagattcttatatttttctaagcaaaactgaacttaattttttgtcagagtggcatacgttcttcaaatgaaaatttataaggtggcacttctgtttaaacatggcagattgaactaagttggtcatttcttgaaactccactaacacagaaaataaattttaagaagggcactaggacaaagagaacaagaggaatgacaagagatgaaagatgtcaacaacatttttgaacatagaaaaaattggcaacagacagtgataggaaagctgaagtttaattgtttagggaatgccagtaaaaaagcaaactgattgttcttcggagccctagaaaggctcaggaattggagacaccaggtaggtctgagagctggggtaggcgtggtgctaaaaacaaaaggactgatgcaaagtccttgtaaggaacattagaatccctgccccaccccactataacctccaggcaatgctgacagatatctgcttcacccaactcccatcctagcaaaagttaggagacttaatctctgtagatgtggaatcagagaagcttggaattgtaccatcagatacacctgagggtagtgttgatatgttgtactgaaaacaggagggctaaatgaaagtctacaaactgaatgtgcgtagtccagcccacttctgcttgactcttaaaaacatagcagtctggtaggagttgagaggattcctcttttggggaactgtctgaagagaagggacaaatttatactgatatttgggagagaccagagaaacaggttcctacctcatcacctttggtgagactcactgtattaattacctatggctgctttcaactaattaccatagctccgcggcttaaaactgtgagagaaacttcattttcttatagttctgaagggtacaggcccaaaatctggtagggccattgatatagtttggctgtgtccccacccaaatctcatcttgaattgtagctcccacaattcccaggtgttgtgggagggacctggtgggaggtaattgaatcatggaggtgggtctttcctgtgctgttctcatgattgtcacgagacctgatgattttgtaaaagggagtttccctgtacaagctctcttctcttgtctgctgccaagtgagatgtgcctttcaccttctgccatgattgtgaggcctccccagccacgtggaactgtgagtccatgaaacgtctttcttttgtaaatgcctcagtcttgcgtatgtctttattagcagcacgaaaatggactaatacagctgtgctccctccaagggctctaaaggagaattgattttcttcctcttccagcttctggcagccccaggcattccttggcttatagccacgtcactgtaatctctgcctctgtgatcatattgcctcttyttcaatgtctgtgcagttttataaggccacttgtcattggatttagggtcattctgataagccaggatgatctcttatttgaacatccttaacttaataatctgcaaagattatttttccaaataaagtaacattcacatgttccaggacttaggatgtgaacaaatcttttggggggctcccagtcatcccattacattcaccattctacaagctccaagcttgcatacagagttgccaatgaggcttttgtgccgtgcttttaaatatgaacacacagctagggatcatcagcatttgaggaaaatgmccaacacawaagaacaaaaaacaaaatcatgaattataaaaaggtaattgagggaatatgaacaatgcagggagtagaagacaaatttaaaagctgtatctgctattagagatagaagagaaaccatttcatttacagaataacaggccaataaattaaaaaaaaaaacatttagaggttaagggctcttggaaattaatgtaaaatgtacattcattttacaaagtaatatatatatacttatatatatttacattaaatataaaaatgaaataatgtaaaaatataagaatgtaataaaatataaaggtaatacatatttggaatataaaattgatgaaattacctacaaaacagaacagcaaaataggattgatccagcttttaactataataggagttctataaaaagaacagagacatggaaaggaagaaattaacaaaaatctaagaaatgttcccagagccaaaagactcacattgccagattaaaagatgtgttgaggcagatgcaaggatgttctttccagcattatttcatggtagtggggagttggaggcaacgtggatgtccataactgggagattatataggtaaaatattggatgtataccatggcacagtatgtagcagtatgtactgtggcatcctatgtagcacagagcaacaaatactgtgtacacatgaaacataagatatcttgggcggggcgcgctggctcacgcctgtaatcccagcactttgggaggccgaggcgggcagatcacgaggtcaggagatcgagaccatcctggctaacacagtgaaaccctgtctctactaaaaatacaaaaaattagccgggcgaggtggcgggcgcctgtagtcccagctacgcgagaggctgaggcaggagaatggcgtgaaccccagggggcggagcctgcagtgagccaagatcacgccactgcactccagcctgggcgacagcgagactccatctcaaaaaaaaaaaaaaaaaaaaagaaacataagatatcttaagaacatagattttagtgaaaacaagaatcactgtgatatgataccatttacataaaactacatgcacacaaaatatacagtttgtgaaaatacattcaaatcaaaggcacattttgaatgtattataatttttttaaatttttattttactttaatgataatttttatagcagggtgatataaggtaggtatggaggtaaaagagaacaaatgagtttaattaataatgaaatacacactgaaaactcagcatgactaatggaaagtgagaaccccaaggtgaatcatcatgaaatttcagaatatcagattaaaaaatattctgaaagtgcctggtaattaggaaggagatagaatttatctacaaagaaataggaatcaggatagctttgggcttctcaatggcaacactgaaagttagtaacaaatagataagttcttaaaactttcataaggaaaataattttcaagatagaattctatacctagctcgaataccaattgttttttaggatgggatcacaatatttttgatatccattttgaaaaagttactggtgaatgtgagtcactaaaaataaggaagtaattgaagaaagagaagaaygtgatactcatggaaacaagggattcgatggaggagagaaagaagaggaattgattcccagggcgatgaacggaagtctaggatgacagaagcctagagagtatcaagcagtatcaagatttgagtagggtgacagaggcctctaaaaatgctatctgtaagaaaaaataaaactaatgtattccccaatgtgtgttattattttcaaaagagctcatggttttgccaaaactatatacagtcatgtgccacataatgacatttcastcaatgactgatgtatatgcaacagtggtcccacaggatttagtggagctgaaaaattcctgtggcttagtgatgtcatagtcatcttaacatcatagtgcaatgcattactcacatggttgtggtgacgctggtgtaaaaaaaccctgaattgtccatcatataacagtagaacatatacaattatgtacagtatatagtattcgacagtaaatgactatgttactgatttggcatttactttcaattgttattttacaatttattcctacttatttttaaaaaagttatctgtaaaacagtctgaggcaggttcctcaggaggtattccagaggaaggcattgtcatcataggagatgacagctccctgtgtgttattgctcctgaagaccttccagtgggacaagatatggaggtggaagacagtgatattgatggttctgaccctgtgcmggcctaggctagtgtgtgtgtttgtgtcttcgcttttaacaaaagattttaaaaagtaaaaaagtaaaaagtaagaataaaaaaagcttatagaataaggatgtaaggaaagaaaatatatttgtacagctgtacaatgtgtgttttaagctaagcattattgccaaagagtctaagttaaattttttctaagtttataaggtaaagttacagtaygtgaagattaatttattgaaataaaaatgtttttaataaattcagtgtagcttaagtgtccagtgttgataaagtctacagtgccatacagtaatgtcctaggccttcacattcactcaccactcactttctgactcacccagagcaacttcctgcaagctccattcatggtaagtgctctacggtgtaccattttttaaaatcttttataccatatttttactatcccttttctatgtttagatatatttagatgtacaaatacttaatgatgtgttataatttcctacagtatttagtatagtaacatgctgtataggtttacagcctaggagcaataggttacagcatatagcctaggtatgtagtaggctataccatctaggtctgtgtaagtacacattctggtgttcacacaacaacaacattgcctagcaatgcatttctcagaatgtaccccttttgttaagccatacatgactgtatgaatatatgtatgtatttgtatatacacacatacacaaaaaaacactctaagcatttaattccatgaaatatgaaattgttaccagtaagaaatataagcatagtaagtaggtcctctattcagctcagttgtcaaccaaatttatgttgctgatgcygaattttgatatagccccttacagtgctgtgattaccttaagtggatggaggaggctgaatatgaggaggggaaagggagggggagatttcagtcaaagactgaaatcttaggttccacagtaaggaagtatttaggcaatatctaaaatggaaagataaagacatttcagtttttaagtataatatttagaaatttggaaatgaataccagaagaaacaggtaaaagagttgaaagtggttgcctctggggagtgaaattcaggggttaggagaggtaaagcagagggctgccagtttttcattagaagtctttcaaaattatttgactttttaaattctacatgtgttactttgaaaaaatagaaattaaattttaaagtaaaaatattgcacacacacaaaagtgtaggacgaaaggcgtatataagaatattcatctaacatccgtgggggaaggattggcatggagagagaccagattcagtaggattaagcaggaaacaaccatagtaatccaacgacgtggtactaagagcctgtggtggtaatttgtgaaaaactgaagacatcgtaaagaagaactttaataatgtttattttgagtggagagtcttaagacataagagatttcttctatatttactcattcagtgagtgtttgttggcattctttgttcgtgcccaagcactgctagacgttactgtctccagccagccagtacctacaactccaatgtgcaccttccataactctggcccccagagaagcctgaccacaggctctcctcttgtatttctactgagaggataatgtcatgtttgtgtaatcttatctgatattctttgtcctaagtgtgtatatattttagtttggaaaatttaagacagattcttactatatatttggggagaaaagtagatgtggtgccaacaaaagccactggtgttctggatgaggctccagcataggtttgagttgtgtcttaacagagctggaaatggaacagaacactaccatactggacagtgccttgtgtctgaccacatggactctctctggtttggaatcacatcttttcattctcttacgtctttctctgcatgggaaacagttgtacattggaagaggcatgggctttagcatctgacattcatgggtgagaagcctaaccctgtaagaaaccacttattagcattgcgaatttggataagttactctgagcctgcttcctcctctgyaaaatgggatagcaatagctctctcatatacaaaaccctagcccagggtctggcatggagtagcccttagctcttattagctgcctatatccttcgataatattaacatacattttctcagcctcttaggtccaggtggcatcacctgcttaacggcctgtggatgttcgattgatccagctgtcgggccatgggctcctctgggagatggtctgcacagattagatgtcatggaactgggatggcagatgccttcttagcacttctggagaagcctaggaagtgacagtggcagctgggaacagctgatatgaataaattttgacattttaaggagtgttcacaataggggccttataggctgggactgaaatcattctgacctggtttctttttctcattctgaagctcagcacagtttggggtgggctttattggtgtctgcagggggttcagcagcagccagtcctgtgtacaggaggggccgtgggttctctcttctgcttggttgtctctcacatgcctttggaaagattgtgagctttctccttagagtgggggtttagttgggatttaattcagaagcagcctgggaaatagcttggaaacctagggagcaggtttcttgtgacctgcaggcagctgaatgttatgtaccaaggctgttcccagagcagagagagacagaaattaaagggggaacacacatggctcctaggttgggcaagtgagggagagagtccatgtgagagggggcaggccacatccactggtgctcagggacccctggatgccaagtgtggaaatgactgaggcacctgcctctggggcacaggcattggtgggaggaaggctgtgaggcatgtttgtcggctcagatttaaagaggaagtatggatggaagcattgtagcatttttacttgtctcaaaggaaatgggatttgatgaaaaccattagcttaggcatgaagagaagcagagcttcctgtctccatggaaacaaagcagggctgcataagcacatcctgaaatgccatcaggggctacagggcagcggctaacacaaacagaaatgaccatgagccatcccactgtctccatccattgttgcctgggcttctggacagggaaaggtaaatatggggaagcagttgagctgtctcaaaaccagagcagggacagtcagaccagagactgcttccatatacgtgtggggagcaatgtgagctctcttgtgtaaagcatgccatagttttcaaagcacctttgcttttgtgatcatatttgttctttgcaatgactccatgcagtatgtggacagtatctttatttggaaatgagaagagggaggtttagttaatctccaactagttactggcagaggtggggccagaggttacaatttctcaacttctagttagtgcttattttagtgtacactacgtagcttctattcagggatactgacacctgaggtggcatacccagagatatgccgccagtggtaagcctggaatatcatcttgaccatatagatttggtgcaagttttaatgtgtatgtgcattgatgtacacactaattcacacacactgatgttcacgtatacaatgtgacccggtatgtgtacagggcagaagatgccaagacccactgtcaaggtcctgctgccctaagactaatgggaagtagtgaagtgtccatagtagaggaggaattcttctggttgcatctcatgaatgcatagagtggctcccacgacaagccaaactacagctgtctgccttgctagcaactcatgtgcaagctgattctgtgcaattcagcaagtgtttattgagtgtctgctatgcaaaagatacctggctagacatttagaatacaaagatgggtaaaatgaggagattgtagactaattatggaaatatttcaaaaatacatgtaatgggactctaagttcaaatagtccagaaggctagtccctccccaaagctaatttttttttgagattcatatatgcaggtcactaatgttgggttcctactatcttgcaaggcattgttgaggataaaaagatgaataagacctaggtcttggccacaatgggcatattaacaactataacttcagtgttaaaccttgcatctcctgttgggtgtgccattgcatcttaggaggtggttcctgagtgtttcccatgcctgacctgagacaggaatggctgctggtcttaagaaggaaattattcatgcccagctcagtgttccagatgagatctctgaggggagttggtgggtattagtttgacgtatatctgctcctcccaaggctggctgacattgaaggtgactggctaacataagggagagtaattctgctgggattctaacactggaatcaaccagtagaaagtcaatgactgactcacgcaagagttactaagtacttgttgtatgtgactcactgctaggggctagggataccaggtcaaacaaggacagagagctgctacccctcaacgggtttgagtctaggaagagatagcaacaggggagcatttaaattagaaggggcaaggatcaggtaaggccaactgaggcaggtgacagtggtgtgtgcctttgaagagccagcgatagtttgcgagcacaagggagaagcacattctagcacagaggcacaggcagaggctcatcgagaagggcttcttgggctaagctggtaagtttaagcttgattccagaagcttgtgggaggttttagattgttagataaggagatggctagatttgcatttgaagatgatcaccctggagaaggtacatagagaagcaagactggaagcaaacagagaggagcagcagttcaggggagaagcagagaagcagcggggctgaagtacagcggtggggacggaaaggacaggacagctccaggaggtgttgggggccaggtgtcggatctgcaggactcgggactgtgtgggtatgtctgagtgggtttggtgtggaaatcagagggaagtcttctggattgcttttaggtttctgaattgagactgtaggtggctgggggagaacacaggccaaagggtaggtcttaagggaaagagggcaggttttggacctgttgagtatgagaaagcgtaacacacttcatgacttttggccagttcacaggagtagagtagggtttgttttaagttgtttttcttgtaagctataattttttgagactgtgctacccatcaagcattgtgccaatcacatgacacatattgtctcatttaatcctcacagtgaccatatgaggaagtactaacttccttttataaatagagatactgtgggatgcttggtaatttgccaaagtaaacaaagctcatgagcagtagattcagaatttggactgagatctactaggcacaaacacctatgcttttaagcagatcctccagatagtttaaatgtcctttatggaaggaaattatctgtcatctagtacagcagaacttgatgaaaatgaacaggtcctccatgacggccatggcacatgtaacttcccagtcctgtggacagaaatttcctgtatgataccctgctatgatgaccagagtggggtgttcataattcctacactgatgagaaggacttttcctgggtgagttgtgtgaccatgggggtcacataaaaagcttatgggagcttgctgagagaatctgcatttccccaagacactgcttagtgtatcagttgtgaaaattgtatcttagggtgagataaaaattatttgaggaagacaagactctaagtgtcgtttgtgcctgcctccttgttacagtggaggaaactcggctggagagtgaaatgacttgctcagtttgtagacagctatttagtgttagaccttggctagaagctagctgccctggctccctgtctggggtgctttttcctccatgccctatgtatagcctagtagtaaaatacagactctagacagtctagctgggtttgagttctgttcctatcacttgccagctatgacaatgatgttaggtaaattatttcacttttctataccttcagttacccaattgtgaataaggatattggtgtttgtcatataagattaccggggaaatgaaatcagataatacatgttaagtgtttaatacctgggtgatagtaattacttaataaatgttagctgttagtagcagatttctttctcaagagcctggtttacactcagtaggtggggctgggaaagagccattcttacctaccaagtactcccattgagtcaattagcatgagctcagatgttttcagataccactggtagagctgaccatccatggcaccctacagggaacagcaaagacagactgtgcccttgggccccacatgaggccatcagcttagacactccaccatttgaagttccttggagtacctgggcctttctattctctgctcatgtggtctggagtaagcctctaattttctttgttaaattcctgctcatccctctcagcttgttttaactttggcttctttcacaagatctttccaggtctataccccccaatctcattttacaattagtattaaaatctttctcccacatgttcccatagcactatatgcctgtttgttatagaatctgtcactcatagtaatatcatggaattgttatataatttaatactactaaagataagatgtaatatttattgaaaccttgtcatctgcccgataccatggtaaatgctttatatacattatttcaattaatttttgtaacagccttatgaggcaggtactgctgttaaccccattttataattgaggaaatggagactgagagtggctaagagtcttgcctaagggtgcacagtctaatgagaggcagagctctcctcccttctcctggatgcactatcttcctgtgctttggagtcacagatgtctctgtcacccattaagttttgtttcttctgctgaggatgtctttccatgtatttggatcgctcctgatatcttagtgccttgtttttgtgttcaagaaatgattgatgaattgaagggaaaccgagtaacatcaggaccctcttagggaatgccatgcccccctatgacctcctggaggatagtattgcagagaactgaggaagaggctggcatcttaaaagtcaggakcataatcactggtactggagatcctcgaaaaacctgcagagaagctgtttgctttctggaatgttgatcccagcttacaagcattacagacaagtaattatgataggttggacatttttacacttggccattgctaatatttttttctttgagttaattccttataccatttgcccattttcccataaattggcatatttatctttttcatatgaacttagattatttgcatagtaaggatattaaccttttatatcatatgtggtgcatgttttcagaataatcacttctaaaggattgttaaagctgttatcctataggcaattgtgggcaaataaggctgttggaagcagaaaaagacaaaacagttattcttttttattttagagcatttggtttataaagcatttcatgtgtttgattcccacaataatcctaagaagtatattagtattttacaaacaaggagattgcagctcgaagtgggcaagtgacatgccctaaatgacaaatgtaagtgtgattttaggactcccagtccagtgctcttgttccacaaaggagtgcttcccctatggagtgggcatttgcaatgggacctttgctgctcagcttctactcacaacagagatgtgatttacacacatgccccagcacaacaacaaagtgctcttttgagttgattaattcaacagatagtgccaaacactgttctctagatgctggggattcaaaaatccctgcctccatggagcttatatttttctgttgcacatgtaatctatattttatgtaatattacccccattttaggactttattattaggaagaagtacaatcagcaccaacaccctgaaattgccctgtattgataacgctatgggctgtgaaatgtgaatgtgaaatgtaatgcagctgcttttggggggaaaaaggctctgattttcttgtattaattaaaattctgtctcctttcaaaaattaatctctagtgtctcttgctgttatctaccttgagaagcagaggcagtgtcaggataggtggttctgggggctcagccaaggtgagagcatccttggctgcagaggtatggcgggggtggagaggtgaagtcatagctgggagaagccaagaatcctatccagaaaggttgcatgtgagaggcagggtgaaggtgttgagggaaaaggaatagagaaatcagtaagtagaactatcaacataaataatcaaaacaaggtactgttttacaagcatttatcctttttaaagcgaactgttgacaattagattgggacttcattaggtgcctttttggatatgaagacaataaccaaatataaaaatgcctccattctctgttcaagttttcacacatgaaatttctggttgaccaagttcttaggtaactgaaacatccttgtagctcctcagccatgctctaacttagtataggtaaatcttctaacactctgatacctgtatacctatatacctatacacacacacacacacacacacacatatacatctatacatatgtacatatctgtgtatatatacacccatatatgcatacatacacacacattttcacacatgtatatgatgttttctattcatgtgcaaactgcaattcatatactccaggatttgtcccttcatttagtacttaaggaacccagtagatgattgtgccattctctgaatttgccttgcagagtgactacatttaaacttatttcaagaatgttccattttaaaatctagttttatttgttttttagaggaggagataacttctacttagtaaaatataacatgaagtaatgtttaaaaagatggctttttagataggtgaaataagttctggtgttctattgcacagtaggtgatgatggttaacagtaaggcattatatattacaaagtagcttgaagagaggcttttaattgttctcaccacaaagaaatgatacatgcatgaagtgatggatatgctaaataccctgatttaatcattaaacaacatatttatgtatcgaaacatcagattgtaccccataaatatgtacaattacaatgtgccaattaaaaaataaaaacaaatgaaaaaaatttaaaaagatggctttgctaagagacagacctggatttaatgttccagtctgctactaagctccgaagtgtacatattcacttagatatcccttaggtgtcttaagcttaggatgccccaaacagaattcattstttaacttcttttcctcatcactaaacacactctctattctttctatattctctggttttcttttactctttctgtgattcttttatcacatttgttatccaagatagaaacctgagttaatcctggtatcttctcctcacttattctctgggcctaattgctcatcaagacctactgattaagtttcataaaactatgtcctggactatagcaattgtctttttaaatgttctccctgctgtaatgcagcctgctattcatgagaaaacagtctttacaaaccagacatttaattatagaatttgtataccttagttatttataatgggatcccattgcctaaacgatagaatcacttatgtattcacttaaccagttttcaatagatgttgagcttctgtgtgccaggcagtattctagatgttaggaatacagcagggaacaaaacaaaaatccctgccctcataaaagttgctttccagtatggggagagtctaaggacatatattctgatttaggtaaatgaaaagacaaaccctgctcttgaaaaggaatacttcaaattacaaagatgtctgctttctccactttagtctttaatgtgatattgataaatgtaaacaatgtttttactaaattatattaaaatttatctgaaaatgtaaatgtataagagtagccaagacatttccttaaagaacaatgaggaacaggaactttttatatagggagtaaaatatattctaaagctacaataattgaaatgatgtgatataatataggaatacaggaaccaaatatatatatatatacacacacacacacgacatatattgtgtatgtgtgtgtatatatatgaatttacagtatatataagtgtaaagtgtcatttcaaatcattgaaaacraatcattcagtgaattgtgtgactggctagttacttggcaggacaaaaattgagttggagccccatcttatatcttatatcaaaataaattgcaggtggagctagtacatgcattttaaaaattaaatcataaaaggattcaaagaaaacacagacaatttaaaaacttcaagggagaagacctttctaagcattatgcaaatcaataagccataaaggaaataattgatatgtttgaatttgtaaaaataaaaatacactgaccactataatttattaataacttccaaaaacaaatgagttagttttaaattttagattgattatatagaggattcaggaaggtgataaaaagatgattgataagtaataagattgtaataaagctctagttccagacagaaaatgaggatttcaagcactgatggctgaaatgtaaggtgaaaaccagctgaagattttaagtggtaaaatagtcaggagatgatgaatgactggctgtaagcagtagggaagatcacctagtatatgatcccaagattcagttgcaaatgttttggagaactttggttccatttactgacatgaataatagaagaagaaaaaagctcttattctgagagaaaggtttgtttaattttagrcttagaaagtttgaagttcaagaggcctggacaagtagataggatcatccaatatctgtgtcttaagaaaagagggaggaaagatatgatacactatcagaacacaatagagaaaatggtacaaatacataaggttatccatggaggggaggtagagaagaaaaaacagccacagatagaggtttctagaaacaccatttaagagaatattaagattttcaaaaagacataccagaaacatcacatcatagaggatgaagaagtacagggtttcaaaaaggaatgagaagaccccaagtgctgaatgagtcatagagatccaatacacagttgactaaaaaatagctgttgaagctggcaatgtggaggacgtgtctgtcttttttttttttaactttttttttgaaataattatagaatcaacaggaagttgtaaaaaattacagggaggtcctatgtattcttctcccagtttcccccagtggtaacatcttgcataactgtagcacaataccaaaaccagaaaattgacactggtgcaatccatagagcttcagatttcaccagtttcacatacactcatttgtgtgtgtagttccatgtaattttatcacgtgtaaatttgcataaccactgccacaatcaagatacagaactgtcctatcaccataagaccccttgtgctaccctttatagccacatctactatcctctacccttgccaacacattcttctaattttgtcatttcaagaatgttaaataaatggaatcataggatagaaaactttttgaaattgacctttcttcacttagcataattgccttgaagtctatccaggttttccatgtatcagttgttcattcctttttatttctgaatagtattccatggtatggatataccacggtttgtttccatgcactccttggaggacatgtgaatttttttcagtttgggttactacaagtaaggctgctatgaagaacatttgtgtacaggtttttgtgtgaacataaattttcctttctctgggaaaaaatgctcaagagtgcagtcgctgggccatatggtaagtgcatgtttagttttataagaaactgcctacctgtcttccagagtggctgttccattttacattcttgctagcaatgcatgagacttctggtttttccatattcttacctgtgggcttagaaaattaaataatatacaatgaacattaataagtatcttattaattaacaaatttatctcgaagttataagacaataatgtagacccaggctgggcatggtgactcatgcctgtaatcccagcactttgagaggttgaggcaggaggattgcttgagcccaggagtttgagactagcctgggcaacaacgcgagactcagtctcttttaaaaaaaaaaattagctgggtgtggtggcatgtgcctgtagtcccagctattcaggaggctgaagcaggaggatcacttgaacccaggaggtcgaggctgcagtgagctgtgtttgtgccactacattccagcctgggcaacaaagtgagaccctgtctcaaaaaaaattataataaggtagaccaataattattaaatcatgtttttaaaattatggaccagtaagttctcaggaaaaaaataaacaacaaaactaacattggttgggtagaaaagttgaatacagagttaataacttttaattttagcagttaaagactttaaaacaaatagattaatcacaaaaactcaactgctagcttcactcaccatcaattcattaaagaaaaggtccaaattaatgttctttgttttgcaagacctctcaaagctttgctgcaacctacttttctagcctcaattcaacgattcctctgccttagcctggccacacggctcactgttccyggatttcccaggtaatcacttctttggctagaaataaccaacccccacagccacttccacccactgctgtatttgactggggaactctgactcatccttccaggtcaagtttcttcatctgggttcccattgcactatatatactcctctattagagcactcgttacgttattttatagttatttgtggaggtctttgtccctttcacaggattacgaagaagggcatcatggtgagttcactttcttttccccagcatttagcaagcataattaacaagcacacagtaagctcccagtaaatggcctcaagtgaacaaatcaaaggccaacttcctgtttgtgatgtctgtattcatcagaaattttcctgagattttgagcattgttttcagtgtgcataattcccctgaaacccaagtttaatattagctgaagagcagagcacaaggcacttgtagtaggactccaagaagtgtgccactccaagaacgtctccattacatcgagaaagagggaatatttgttatcagcatgatggacatgatcccagtgtaattgttgctgttgtgaaggccttttgaatggttttccctctccccatgataatttatctcctacattcacttcactatagctttgataccaaaatcttgggcttttccagattagaaaaaaatatgtttttgtttaaacttgtctctttttctggtctatagaacctcataataattggctttgccacatggaaatttgtaataacattagagccccacatcattctgaggttatagtccatagtcgaggccctataattagacatgttttctgtgcacttgcagacacgtatacactgaggtggctgaaataatacctcccaatttccccggctgataatcagagtctttacaatttggttatatactgggtgcttggcatttctagctgttaagttgagaagctgttagagttgtagttgaattaaaagttattttccccttggtgtcaagtgtatcactacattctcaacacttaattatcgttgtgtcccaaaatattcttcatttagcaaaatattgaaattactctttcctgttgaagaagctaactctactatgcaagagagcactgagatgccgtgttccacagagaacccaggaaatgaatggcatttgagggcatttggggcaactggaggagccccaaaacctgttaaaggggccacatattcttacctatattagactcaacttgatagctaatctttttagcagctgacacgtcctcaggctgaagctgaccagaccaaaagaggcctccccaccctcggcagagttgactgaaatggcattaaagtaggacatgacttcccttccccatgcccccaccccactaccttttgtgctgttcacagagaagtttctcctccatcctcttgtccctgtgttttcacattgtatgttctatttagatcaaggtacccagtgaccaaatataatatgaggaagggatgatctaattatgagcaattaataccttagtgagcaagagctgaaggaggaaggtacagactaattttttaaagtaaaaggtggtaagggggagaaatacttctttgatcacttactaaaatatctaatcacaaacatttattcatttattattattgttattattgagacacggtcttgctctgtcacccatgctggagtgcagcggtgcagtcatagctcactgtagcctcgacctcccaggtttaagggattctcccacctcaaccttcccagtagctgggactacaggtgcatatcaccacacctggctaattttttgtagaggtgggatctcactttgttgcccaggctggtctcaaactcctcagctcaagcaatcttcctgccttggcctcccaaagtgctgggattacaggcgtgatctactgcgtccagccaccaaacatttgttaagcaccaatatgtcaggcactctgagtttgatagtgaacaagaagatgcagtcccttgctcttatgaactttatttttctcatggctgagacagaaaacaagcaagcaaataacacaaataatgggaaatgttatgaagaaaatgagcaggctttggatagcaactttgattcctgtcttagaaagaaaaaacaatcagacttgagagaattgctgccagacttctacagcctgcattgatctgaccccgtgtgattctatggatatgcttccctcacctgacataacggctcccacactatttccctacaggagaaatgatgcttgtgtttctctagtggccagtgtcagttactctgaagatgtgatttaccaaccaactgggctaaacaaacaaacaaacaaacaaaaaccggagcaataggaccttgaatgcataattaacttgtgtggaaggcttcattcttcactcaggggtgttaaaaaggatgcctttgtgagctaaaagcagaactaccatttgacccagcattcccattactgggtatatacctagaggaatataaatcattctactgtaaagacacatgcatgtgaatgttcaccgcagcactatttacaatagcaaagacatggaatcaacttaaatgctcatcagtgacagattggataaagaaaatgtggtacatatactcatggaatattatgcagccataaaaaagaacaagattatgtcatttacaataacatggatgaagctggaggccgttatccttagcaaactaacgcaggaagagaaaaccaaatacctcaagttctcagttataagtgggagctaaatgatgagaattcatgagcacaaagaggagaacaacagacagtggggtctacttgagtgtggagggtgggaggagggagaggagcaaaaaacataactattgggtactaagtttaatacctgggtgatgaaataatctgtacaacaaatgcctgtgacatgagttaacctgtacatgtaccccaaacctaaaataaagtaacttttgaaaaaaaggatgtctttgcattaactagtggggaaagttgccctagtggattaagtaacttaatatttcttccaaaggtaatgatctggaaaccaagactgtgcttttattgatatcttcaccttctaaattccctctgtaaacacctatgaataggagggaagaaaggacctaaagtggtcagagggaacctcgaggccaaggccaagttgtatcccagactgtctggctccagagaggaaggtcttccttcagtcattcatttctggccccctttcctctgcactaccctcagaaacagtagcagatacctattgcaaggttgcgctgtgctggtcatgttcacagacaatgcaaacattttccctgctttctaggcatttcttatccatatagtctttcaaacctggtcaaggttttctcctggcaaaatttgagaagttggtggcatttgtatttgagatcatgcacctttgctgtcccttagtttaatgttccccttttctcttccctgtccttcggtcagggaggagttatttgttggacttaactagctcacgtatggggttttggcctgggttccctgaaagacgaccccaagaaaagaattggctgcaaaagggagcaagtgagaaaattgaggcagagaaggggaaaaagccaaagagttatgtgttaattgagagggttgtcagtatgaactgctgaggcttaatccactgggaaccctagaaggaaccatgtagaacgtacctcagccctgctccaccaagcaactgggaaactgggacatagatacatgtatctgtatgtttatgtatgtatgtatatgagtatgtgtgtgtgtgtgtgtgtgtatttttcccccatccatcaatccctgtccatccttgagtgatgacactttggggctgccctgtttgtggacttaacagtgcctggagaaattccgtaggtggagaagcaggaagatgtaagcactcaaagtgggcactgtcacatacctgtgtgagtgtttaagtcctgtccactgcagctgcagaacccagaggtggcccgaggggatatggggtggcatccagagcatatgctcttgctccacattcaaggagtagatcattcattcaacatttgtggagcacctactatgtgccaggaacagcttttccaaggtgagtgagttagaagaagcagagtgacaacagaattcaggactagagtgagccggagagcagatggtccactgcccagaaagaggacatcccttatagggccagcggatggaagccatgggctgggcaggacattcctgtcccaacccacatggcagctagagtcctggaaattacagtcgacatgaccccacccctctcctgaaacacagtttcctcctcccaaccccacccagcagtgcacaccccaacacccgctctgccagctctcgttcgttgcctctttctcctcaatataaccaccattttattttatcccagctcccagcgtgcatttgtcctgcacagccttgctgcccttcaccctgctcctcagtgtagagtaccatgttcccgttattattgttcagttccccagccacacagctaatcctgttagggccaatttaggcaatacaagagtctggagcttttatgacctaagcagttggggctctccttatgctaccaatgataaatgatagaataagtaagcagagggctgggcgcggtggctcatgcctataatcctagcaccttgagaggccaaggcgggcggatcacgaggtcaggagatcgagaccatcctggctaacacggtaaaaccccgtctctactaaaaatacaaaaaaaaaaaaaaaaaaaattagccaggcatggcagcgtgcgcctctagtcccagctgctggggaggctgaggcagcagaatggcgtgaacctgggaggcggagcttgcagtgagccgagatcgcgccactgtgcactccagtgtgggtgacagagcaagactccatctcaaaaaaaaaaaaaaaaaaaaaaaaagaataagcagagtctcaattaaaatactcattgatcatgtctgatgtcacagagtttaatcttaaattcagtagacccataaattaaaaatactggatctcagtagccagagggtcattctgtcttagagcccctggacacagtccccctaatayggaccaggcctcatctgaatgttccatgccccctcagctgcgaattcccatgttttctgggccagttatctgacctcttcctgcgagggcagtgcagcaggggtgtgggctctcagggggacagagggactctgccacaggcttgacctgaccatctctctcaagtctctctctacaccccagcacagagagagcagaggtctgcagagtgccacccctctagcagctctgtggaccaaacaagcatttcacctgcaggtgccagctcagcgtgccagggcatgagtgtcccccaggtggcagggtgactgcctttcttaggtggcttatgttcagtgtggaagttcaggctctctcattcctgtttcgattccttttccctctctgtctcacctggtctttgatagcaaaggttagtgttataattaaacaatcaatttagcaaattttctttggggatttcctttccttttgttttgccaactgtaattcctccagtctccagagagatcccctgtgaagtgcatctgaggtgttttcactttccctcatccacagttgttgttgttttcagggactaacaaatgacaaataagacacagcatgttcgtggtttatataagcaggaaggaatatatctgcttctctctgcaggaagagaggaggaggaaaagaggaggaggcacagctgatggctgctacccaaggccttgctccgaaacatcatgggtgaytgggagtctaagaatattaattggagacagtgggaacaggggtaatttcacgtacccagtagggacatgctgtgctaagagcgtgtgagaaaatagcgtgtgagaaaaaatttacctgatggtgctgctataggtcttattttcttccatgttttgtttcttatgcaaaacgtatatgtgttaagagaaggggatggggaaggagagttcatggaggagagaagaggaggagaaataaactttgaaaattctagttgccatgacaacataatgagctccaaaagtggcatctctgaaccagttttgcatgggaaggcagagaagctcaaaagggaaagaattaaaataataaaaataataaaacagtgatcatgaagcaaaggatacatctgaagaggctgtkagcccttcttgtcaccctctgtgtgttgggagtgtcaaagctgcttgctcctggctgacctgggcagagcctgcgggattgccgtcaggggttggaatgcctttgcagcctcccgggctctggacaatgcgcagctaagggattttgacaaaaaagacctcatgcattgtgtgtgaagtgcattgtgcttgagaacccattgcaagccaggctgtcttcctgctccgtttctcctccctttcctccctcccacccgccctttcttatagctcagctttacycttttcaatgaatttcactgtagcccaagcgacagtgtgtgctgtgtcactcttaccaccatggtatagaatgtaaaatccccattattgggcactcrttagaactataaggctcttctccccagcaaagtgtcccagagctgtgcgaggcttatacaaaagaaggaagcattgagaagtgcagaatgtgaaagccaagaaggatttgtaggtaatgatgtttttgcccaccatactcaaattggaaatgcacccacagcatcttagaattatttattattaaaagtgtattttaatgaagatatcccttggtatcccttgtcctggttcaagtcgtgttcatgttttcctcattataatggccaggacgttgcactacatatgtttccataatataatcggtgtttaacagcatctgagccaatccatcagttaaggcacttgttctgagaactggttgaatgtggggatcctgctgcccccttgtgcttgtttgatattgttgcccacgagactatctagggtgtacattatgatgtctctaccaccaagctctgtgtctggcacacagtaattaatatatgttgaatgaatgagtgcttagttccagctgaagcatgaagccctccttagtatatatgtgctccggctagactccaacgaatagctgtttggcaatacatgtcaagttgagtggatgatgtataagtgaactaatatcccctatggaggacagcaattctcagtgaaataagcaaatcattgtgtgagttctgtgtatcagcaaagattaaatctattaagtttttagcttctttcagatgttaaccacttaagtagttaatatttgcataatgcttcctatagtttagaaccattagtcagtgaggggaacctccttttctctgttatatttcttggtggaagaacttcctccagaaaacactttttaggcctttgtcatcatcctttgctcattcctcctgaactgtaatagatggatttagaagaactggctgtgctcctctcagcttcttcctcctctttagaactggccggccctccaggaacgtatcttctctactcccttttgcttgtagcttctgggacagtgccctgtaatagggtaggactgggcttctgtggttgttcctatgactggatggttcaaaattctggggtatacactcaggatagatctagaagatagatgatagatctaaagtcatgttctccaacttgctttatcagaaatgaaactgattattttttgtctttatttatctaactccagtatgtcccgtgtctcagctggtttcataatcaggaggggaataaaaggaaaattgtatactgatccccacagcactgctatacatgattagaaagtcttttccccctttaaacatgtaattttaaatgatacaatacaatctcagatgtgatttttgtcaccttcaagacatccagcaattctagcaccttagatatttatatcgcaggtcagttggaaaagagtagtcacaaaacacaaattatgttcatagtacacttggctagtgtgcaatttcctgatcaccaaacacaggagaattcaaaagaagtatgaaacctggtcctttgtcttgggggcttatttcctcccacagaaagctgaaacctgccacatcttttcatatgggtgatccctgaaataggcattctgggctggagataccactgtggtttctatcatgtaagagcagttttgtagaagaggtgagatttgaacagggctttgaaaggtagctggaacttatataagcccaggggtgtcatagagtgggttttgggggagaagttttaggaatarcaggatgatccccaactttgaggcaggccctaatttatttgtgggataaaaasgatattgaatatgagagtggtgggaacatcattggtttagttaggtctggttagatcatggaggacctcacagcagagggaattaaggcaggagagttactgtgggtgctggatggagggggcaggatgaccatgcgggacatagtatttggggaagattagcttgcaggcctgttctgtggatgaggacacttgcttgtctgggttctctgctgcctcttcaactttaatcttctaggaactctgagtggccccagcatgagggctctagtggtgcccctctgccagccactctgaactgtggcagacttgcccagcacagaagttaggataggctgtctctaaaagaggactgagagagtgtttattctacccagaccatggctttgagattggatatcaggatgcatgttatttttttaaaagagcttttttgttgttatcttctagataaatgagaaatcagaaacaaagtcaccattcacctgaaaaggcaccactgtctgggagcagtagcaatgggctatatataataacaataatgataataaaacaggtactgtttataaagtgttaaccgcctgttagaacttttcttattgtattgctgcacatctatctaacatgtatgtatctaacaaggacatactgaactaacaaggacacactgaatactggtattaggatttgaaaaggctggggtaaatacagacatacaaaaacaaccctgatttgaaggttttggaaggacctcttaggaaaagagggaggcaatttagcattgttttggattacggggctcaaatcctcattcttcatttaattagctgtgtcaccttgggcacattttctaacctttctcagacttagtttctccacctggaaagtggggatcataatatttcatggagtttttgttgattaaatgatgtaatgaatacaaagaacttagcacagtgcctggcacataagagatgttcagtaacacataactattaagaacctcttaaactagcctcctgtgaaacatgaattttctattattcatttttatctttgagttaaggctttttaagagcctctagataactacaaatatgatatctggtgaaagttccacattttcttcctcatggtctttcacacctttgcatgacgcacttactggcacctaaggatgacagagtcccaggagagaggtactcagacaggacagagtcattttaatagatagggagtagagttgtaaacgatgaagaaatctggaaaagaatagccggaaagttaacaaaatgtattggataactacaatgtgctaggttttgtatattatctcttccttacaacaattcagtatgacaggctgtgtttctccatattacccatggtggaatgtgaactgcaggagccttgcatacttccccaaggatccccagttagtaaattggggactaggatttttcacttgggtctctcttaatccaaagctcacgtgctttgtcctacactctgctgcccctcggaaaatgcacagagcaaaggtcctattagaagaaggcaaactcgggccagrgctcctgggcagccagggggcagataaggacataatgccagggagctccatgtaaacacgtgaaagagggaaatgggccacaaggtatcctttcacaaacggttacttccagtgtccttagagctggcttggtctcaggaggacagagaggccacactcacaaggcatattacccatcaggatggcactgcagtgatgggattctgagatctttgtcctcctcctgtcagtggctgggctaacagcaggccaggctggacagtggcctgggaacatagggcaggcaggcaacctgttacttgccatagaagtgtgcagaattgacaaatccatgttcagaagggcatcaaagtccgggtgaggctgatcttctaaagttaagtccacctgtaattccagtgctttgggaggctgagcggggagaatcacttgagcagactgggcaacattgtggaacctcattttgacaacaaactttaaaaataaaaaatattagcagagcatggtggtgtgtacctatagtcctagctactcgggaggctgagacaggcaggttgcttgagcccaggagttcaaggctgcagtggttgcatcactgaagtccagcctgcatgacagagtgagaccttgtctcaaaaaaaaaaaaaaaaaaaaaaaaaaaaagagtccccaatctcagcagctagacagagagcaagagtcaagacccaggagaaaccagtgggtggaagggaagcagtgaatgaggggaatcaaaatgggcatttgggagatgtcactagaggtattccctgggcagagaatgggctgttagtgtggttcctatgtccttcttgtgacagtggctaggcactttcaaggagccaggtctgacgtgctatgatgcatgagcctccaaccattagggtgaaggatgtgatctggggtgagagcacaagccaatgatgtgacaaccacatgggcctgagtgagtgaaaactgccacagtgagcagcgtgtaggctgccaacccacagggccgggaaagtcaagaactgtgtgttccacccgcacatgttctctcatgcacatgccgaccagcccagcccaccctgcttctcacacgccctgcctccggaaacgaagagccaaaaagggaaaacctcccgagagtgctttttacatcttgccagacatcggtccacgcagcagcacacttcaccacaccccatccctgtcctcagttatcctctgtgttcccagtcagtggtctctcagccttgaagctctttcacctccttggggcgcttgaaaacgttggccagttccttgagaccttccttctcccctagatttctcatttctcacttcctatgtgtctgaccactccctcccagcatcagtaggagaaaccttcagccctgttgccataggtgctaggtcagagttgcttcccaggtgtcacacagggactcaggctgaggaayactccattgtctgccaatgctaccttttcaacaagtacccgtgcagtcgccctggaagaagggaaaggctgcagagggagcactgtcagttaaatgctttagggcggtgtgtgacagttctactgacgtttcattaggaaatgagtcacgtggccgtgcctcccctcaagggtgaagaacagttgaggagaactggatgtgttctttttctctgggttctgggtggttctccacagggagctgttctgagcgtgattgcctaccactgctctaagccttctgtgtccttgtgaccctcagatccatgtccccaacttctgcctctcctgtgctgcaaagccgtattttcaactgtgtggtagattcaaatgaagtacttcaagcttagcatcccacaaaccaaattaatttcccctaccaaaaacccacttggccatcttggggggcctctggaattcctggagcatccttatctggtctgcaaattcccttttattctgtgaaatgtctgttgctctccccatcctcctgtttatttccagtatccttgatcctgtcacacccaggtttctgccatagcctaccaaatggtgtcccttcctcctctttagtttttggcaaaaacatagctattttcctaaaaatagacctaatcatgttactcccttatgtaaaaaccttagactatttcctacaacccacagaatgaagtaaatcacatcaagtcattgggggaatggggttgtatttgaacagaaccagacaaggatctgaatgctggtctaccacctaccagctgtgagtaagttatttaacttcattgactctgtttttcaatctataaaagggagataatgatacctacctcacagggttgcctttattttttgctgtgttctgtgcctatcatctggttggctgggggctttgggcaagtcattttcttcctctacaaccarggatggggaagcagcttctctctgacctcatcacttcctactctcttgcctacttctcttcagccacactttctataactgtgaaaggggaaagagaagctctggaggtccttaccctggcaatgcaatatttgcccttaaatgtatttgccagaactggtcatgtggccacatccaatgttgggggccaagaaggctgggagccaaaagtattatgtgagcagcgttaatgactatccgattaacgatgaccccatagtgggtatagacccttgccctttggagtgcctcttgcctggtcaaggtctgacactgggaccccgtgtgaccatagttcagttgactttgtcagatttttcttagcttccttccaaagaggatgggatacacaatacttttaagtacatttaggacttgatgataaaaactgaccctccaagatgctctaactagaaggaatgctgactatcttcttgtcagttttgcttatcacaggtgaggaaaccggaggaccaagaagggtgagacattcccgccaagctggttgctggcatctcagactcagtatggccacctctgaactctcattgtccctcccagcaaatcccaccctccagcctatatttcctcaatggctggttgtattagtctgttctcacattgctataaaaaaatacccgagactgggtagtttatgtagaaaagaggtttaattggcatatggttccgcagactgtgcagtaagcatgattctggtatctgctgaacttctggggaggcctcaagaaacttacaattgtggcagaagttaaagcaggagctggcacgtcttacatggcaggagcagtaggaagagagtgagtgagtggggaggtgctacacacttttaaacaaccagatctcatgagaacttactatcacaagagcagcaccgaggggatgctgctaaatcattcatgagaagtacctccatgatccggtcaccttccaccaggccccacctccagtgttggggattacagcttgacatgagatttgggcgggaacacagatccaaaccatatcactggtgttgccattgatctctacttgtcctttaacatgcagtgtcctcttccatgaataccttccccagttccttccatagaattggagcccctcccctccctatgttatccatgtcccatttatggcatatgacgttttatattggtttacttgtctggctccttggtagataagattgacttgagtacagcaagggcatcttatgcatcttatgcatctttgcattttccagtctagcaagtggcactttatgcaatggcactggatagaattcttgtctgaattattggaaaagaaccagttcccacaggttcaacaacaggcagtggaagagttggaacttctgatttttgttctcagtcacttactactgaattgcatttagcttacagtttttcagtctcctgcagcattgtgttccatgctcttatgcttgggtttaagagacttttttaagatcagattttatttctttcttcttttattttaggttcaaggaggtacgtgtgcaagtttgttacataggtaaattgcatgtcactgaggtttggtgtacaaatgatttcatcacccagatagtgaccatagtacccaatagggagtttatcattcctcactctcctctgatcttcatcctcaagttggccctgatatctattgttaacctatttctgtccatgtgtactcaatgtttagttccctcttataaatgagaacatgcagtatttggttttctgtttctgcatgaagtcacttaggataatgtcctccaactgcaacatgttgctgcaaaggacatgatttcattcttttttgtgtctgcatactattccatggtgtatatgcaccacaatttctttatgcagtccactgttgatgggcatctaggttgatttcatgtctttcctgttgtaaatagtgctgcaatgaacatatgtatgcctgtgtttttatcgtagaacaatttatattcctttgggtatatatacagattgctccttcaggccaggytctaggggaaatatgacaatgacttgatcaggtttgctaggtcaaatggtagttctgttttaaattctttgagaaatctccaaactgctttccacagtggctgaactgatttacattctcatcaacagtgtatacgcgttcccttttctctgcaactttgtcaaatctcttattttttgacttttaataatggccattatgactggtgtgagatggtatctcattgtggttttgatttgcgtttctctaatgattagtgatgttgaacattttttcatatgctttgttggccatgtgtatgtcttcttttgaggagtgcttgttcatgtcttttgtccatttttaaagggcttgtttggttttcactgttgatttaagtttcttatagattctggatattagatctttgttggatacatagattgcaaatattttctcccactctgtaggttgtctgtttattcttttgttagtttcttttgctgtgcagaagctctttcatttaattaggtcctacttgtcaatttttgtttttgttgcaattgcttttagagtctacatcatgaaatctttgccaaggccaatgtccagaatggtatttcctaggttttctcctagggttttcatagttttaagtttttcatttaagtctttaatccattttgagttgttttttgtgtatggtgaaaggaaggggtccagtttcaatcttttgcatatggctaaccagctatcccagcaccgtttattgaatatggagtctttccctattgcttcttattgtcaactttctctcttgtcttcatttggtttgctgatttgctttgtttcatgtttggtgataatgccatattcccattcaagatggatgttcttcctaaataaaggattttttaaatcctttttttttttttttgccttgttagtgacatgctacagaaaataaacagggtaattctgatttgtgattggacagcctttgaattaaaggagtacatatggctttggggggcttaatatattgtaaagactgagttactcttgagattctctgtaagtttttcaaactgtaaagtggctgacatttgaaagtattatatgtaacatccagcatcatgtctgctgcatagtatatactaattaggagaatttgatgaacaaatggagaagttttcctcccaggagcatgcttacaaaggaaacatttttttttttttttttgccttgcctaggtagcacatagcccacctttaagtttttttttttttttttttgagacggaattaagtttttaaatgatttttatatgtgttatttcatgtcctcataacaagttgttgtgcaaccatatatattatamctctcaagtcaagtattatgttatgaatgccttgtacaagtgttgagggaaccgagttggaatgtgaataactaacccagtgtggtctatcttctgccagtaacagtttcattgcacaatcttccttactggaggtcagtcaccttaccccactgacttggcccctcttggagtatctcctttttacttttggaaggttctcagaactttctcaataatatttcaaattgccatgttttggccaggtgttttcagttgtgtaaatcttaaacccatttctggaagatgttctcagtcctggtctcacctattcaataaacttaaagtttctgctatgagttaagtgctctgttaattttggtggggaaagcacaaacagacctrttgttaaggcacactctcaaactttgtctggaagaccttttggaatacttcacctatatctcatagttttattatttctggtttctcaatacttactcatttgtaccccacttgtttcctatgttgtatataaaatgaccctgtcctttatattttttatctcctgcatcctagttctctaagttttacttcctgaaagcaatcaaatgcaactaacattgggtttcatttgagttagacctgtagagtgcttgggctagaaaggctctcagggagcactttgcagttaaaatgaagccacccccacccgcccccactctctgcctccccagggtagtcttgaccaagacctagagacagtgaggggtagattagggccagaatccaggcccctgactcctagtcagtaccctatgtctacctatccttgtccggtgaaccttttgatatttgatttccatccttgttatccctttttctttatttgatgctaagctattgtcatcattcctcattagatccaattacagaggcttggaggccagtaagaaccaagttttttttttttttttttttttttttttgagatggagtttcactcttgttgcccaggctggagtgcaatgatgcgatcttggctcactgcaacctctacttcctgggttcaagcgattctcctgcctcagcctcccgagtagctgggattacaggcatgcgccaccatgcctggctaattttgtgtttttagtagagatggggtttctccatgtttggtcaggctggtctcgaactcctgacctcaggtgatctgcctgcagcagcctcccaaagtgctgggattacaggtgtgagccactgcgcctggccagagccaagttttttaagggatggcttcaygtctgagttttggcctttcacactgacttgctatggctggtagcaaggtgatgaggctcttttaatcttcatagatatccagataatacagcttggatcactgatagtaggaattacaaggccctcctaatccagtgaggacatggtgttcagaggccaagacatggtggggatgcttgcagcaccttcatgtgaagagtttccctgcatggaggtgtttggaaaacaggcttgtgggtgaggggcaaagagagttctaaaaagactgcattgaccttttggatttttctgtagctcacctcaaagacaggcagagatcctgggtgacatgtggtgccaatttttattgtattcctactggctctgtagatattgtcttttgttatgtccttggcaagagaaatgtgattgatgtgattgggaacatgagactggtggggtgggggtggttctcaagctccccataattcacagatttcaagagaggagcacagaaggacttcatttgaagggaggaatgaaccatctaacctccagtggcagatgggagccgagaccctggagtcattggggcagcagttgcctgagcaaggggaataacagcagtttcccaccaaaagtcttctattgggattttcatgttttctgtcctgccttttaatgttttttaatgaacaataggatctatgactctttatgccttggggagtcactcaggacaagtttcatacccccacttggagttgggattattatttactgatttagacagcttggggggctgtcaccacacttcttctgtcttgtccagttcacccctcagctggctaagtctgagaaggtgttacacgcacagctcaggaagaaggcatgcctaagtttctaactaagtgaatgcaaggcagctgggtctgagagccccagaggctcacctctgcacatggtgagggaaaaataaagatggcttctgagtgattttatgacttttgaaagaaggggcattgggacaaataaaaggatacagccaatggacacgcagttctttggactggaagaaaaattataacctgtttgcttttagggtcattgtattcatctacaatagtatatggtttgttacagattccagggcattttccrtatatatattttattttttttcctactataactttaaaagacattatttcccccattatttcaattaataaacaaaggcttattgatgatttaactagaatcacatagaatatgccagagtcagaacttgaaaccacctttattccttctggctcagtgttttttctcttattattcaatataactcaattccctcataaccatgaagcattgtgttttygtgacttatggttcattgacttccaaacatcattttgtctgaaatatttcatatacacaaaagaatatatatatattacatatggtttgttccatatatgtgggacaaatgaaaatgaaatgagtatctgggcactaacaataaagcttaagtgatagaacattactgatgccagggaaacccaattgcctttcctgcaactctcgccctcccactcaagggtagtatttattatccctttgcttatcatttagttttaccacttgtgtatatttccctatgcaatatatcgctaaatgttatatgaattgtaaaatacagtgtatgtttttatagaggttggttcattcacttcactttcgctgctgwgcagaattctacacagcagaagtgtaagtgtattgcaagttatcccctctccacttctagaattttgctaatgcaagtgacattgctatgaagattctggaaattttctggggctataggacatttgcatgcttaactctgcaagataatgcccaattgctcttttcccctatcctttttaagttataattgacaaaatttttacatatttacaaggtacaaagtgatgttttgatatatgtatatattgtgaaatgtttaaatcaagctaattagtctatcacctcaaatacttatcatttatttgtggtaagaacatttgctatctactctcagtaattgtcaaatatacaatacattgatattaattagtcaccatsctatataatagacctccagaatttatcctgtttaactgcaatttttaccatttggctaacatctctccatttccccttcccactccagcacctggtaaccagcaggtgctgctggtctactccttgcttctatgagttctacttttttagattccacatataaatgagataatgcaatatttgtcttcttgtgcttagcttattctatttagcataatgtctttgaggttcacttatgttgtcatgaatgacagaattttgatttttttaactttaagttctgagatacatgtgcagaatgtgtaggtttgttacataggtatacacatgacatggtggtttgctgcgcccatcaacccatcatctacattaggtatttctcctaatgctatccctcccctacccgccccctgattccttgacaggccccggtgtgtgatgttcccctccctgtatccatgtgttctcattgttcaactcccacttaggagtgagaacatgcagtgtttggttttctgttcttgtgttagtttgctgagaatgatggtttccagcttcatccatgtccctgcaaaggacatgaactcatccttttttgtggccacatagtattccacgatgtatatgtgccacattttctttatccagtctatcattgatgggcatttgagttggttccaagtctttgctattgtgaatagtgctgcagtaaacatgtgtgcatatatctttatagtagaatgatttataatcctttgggtatatacccagtaatgagattgctgggtcaaatggtatttctggttctagatccttgaggaattgccacactgtcttccacaagaattgaactaattgacagttccaccaacactgtaaaagcattcctgttcctccacatcctctccagcacctgttgtttcctgactttaataattgccattctaactggcatgagatggtatctaattgtggttttgatttgtatttatctaatgactagtgatgatgagctttttttcatatgtttcttggtcatataaatgtcttcttttgagaagtgtctgttcatatcctttggtcatttttttatggggttgttttttttcttgtaaatttgtttaagttctttgtagattctggatattagccctttgtcaaatggatagattgccaaagttttctcctattctgtaagttgcctgttcactctgatgatagtttcttttgctgtgcaggaactctttagtttgattagatcacgttggtcaattttggcttttgttgccattgcttttggtgttttagtcgtgaagtctttgctcatgcctgtgtcctgaatggtattgccyaggttttcttatggggtttttatggtttggggtcttacgtttaagtctttcatccatcttgagttaatttttgtataaggtgtaaggaaggggtccagtttcagttttctgcatatgactagccagttttcccaacatcatttattaaatagggaatcctttccccattgcttgtttttgtcagatttgtcaaagatcagatggttgtagatgtgtggcattatttctgaggcctctgttctgttccattggtctatatatctgttttggtaccagtaccatgctgttttggttactgtagccttatagtatagtttgaagtcaggtagcatgatgcctctagctttgttctttttgtttagaattgtcttggctataagggctcttttttggttccatatgtaatttaaagtagttttttccaattctgtgaagaaagtcaatggtagcttgatggggatagcattgaatctgtaaattattttgggcagtatggccattttcatgatactgattcttcccatccaagagcatggaatatttttccatttgtttgtgtcctctcttatttccttgagcagtggtttgtagttctccttgaagaggtccttcacatcccttgtaagttgtattcctaggtattttattatttttgtagtaattgtgaatgggaggtcactcatgatttggctctctgtctattattggtgtataggaatgcttgtgatttttgcacattgattttgtatcctgagactttgttctagttttttttaatcaagtattttggattttctacatagacgacttctttaaatttcttaggcttctttaaagactttatcttggtgttatggagtttactctaatggtgctagttatgggtttccttttagctatcctgcttttatatgcattgtgctcactgcatctatgtatctgaatatttcattcttgaaaaatcaaatattatcttttcaaatattttctctcatcatttgtctcttctcattttatgaaactctgacttgacttatttaagatcttcaacctaacatttctattagcctcactttcagttttctcatctctttatttctatgcactgcattaaaaatatatatgtgtatatatatatttatttagttctttgattttatttatcagagttttgtagttttccttatgtagatattgtacatatttggtcagatttttacttatttaatttttttaggtactacattttacatacattttctgttctgctatctgctctgtcctgtaacctatctttgaaatttaaattttaaagaaaaaacaacacaaatgatcaaaatctggaatgaaaagggtggcatcactatagatcctacagaaatcagataattaaggttatattatgaataatgttgtgccagtaaattcaataacttggataaaatggcaagtttcttgaaaaccaaaataccaaaacattgccaaaaaaccatatgatcatcttaatagatacagaaaaagcctttgataaaatccaacattgctttataataaaaaccctcaacaaactagacatcaaagaaacatacctcaaaataataagagccagctgtgacaaactcacagccaacatcatactgaatgggcaaaagctggaagcattcctcttgagaactgatacaagacaaggatgcccactctcaccacttctactgaacatactrctggaagtcctacctggaataatcaggtaagagaaagaaatgaaaggtattcaaataggaaaagaagtcaaactatctctctttgctaacaataacaattctacatctagaaaactctaaagacttcacgaaaagtttcctggaactgatgaacaacttcagtgaagtttcaggatacaaaatcmatataaaattcagtagcatttctatacatcagtagtgttcaaactgagagccaaatcragaacacaatcccctttacaatggccacaaaaaataaatacctagsaatacatctgccaaggagatgaaagatctctaccaacaagaaaaactataaaacactgctgaaagaaatcatagatgacacaaaaaactggaaaaatattttatgctcatgaattggaagagtcagtattgttaaaatggccatactgcccaaagcaacactatttcaatcaaactacaaatgtcacttttcacagaattagaaaaaactattctaaaatttacatggagctaaaaaagggcccaaatagccaaagcaatcctaagtagcaggaacaaagccagtgacatcacactacctgatttcaaactatattataagactacagtaacccaaacagcatggtcttggtacagaaacagaaacatagaccaatgaaacagaatagggaacccaggcataaggctgcaaacctacagccatctgatcttcaacaaagttgacagaattaagcaatggggaaaggaatccctgctcaataaacaatgctgggatagctggttagctagatgcagaaaaatgaaactggacccttacctctcaatatatgcaaacattaagatgaattaaaaatttgaatataagacctcaaactatgagaatccaagaaatacacctaggaaacaccattttggacatcagccttgagaaggatttatgactaagtcctcaaaagcaattgcaataaaaaacaattgacaagtgggacctaattaaactaaagagctctgtatggcaaaagaagttatcaacagagtaaacagacaacctacagaatgagaatgcaaaatatttgcaaactatgcatccaacaaaggtctaatatccagaatctctaggaacataaacaattcaacaagcaaaaaacaaacaaccccattaaaaaatgggcaaaggacatgaaaagcactttttaaaagatacacaagcaaccaacaaatgtgaaaaaaatgctcaacattgctaattattggagaaatacgaatcaaaaccgcaatgagataccatctcacaccagtcagaatggctatctaaagcaaaaaaaaaaaaaaaaaaaaaacaacagatgctagcaaggctgcagagagaagggaatgcttatactctgttggtggtaatgtaaattagttcagcccctgtggaaagcagtttggagatttctcaaagaatttaaaacaaaactagcattcgacccagcaatcccattactgggtatataattccaaagaaaataaattgttctacccaaatgacacatgcacttatatgttcattgcagcactatttacaacagcaaagacatggagtcaatctagatgcccatcaatggtggattggataaagaaaatgtggtacatatacaccatggaatactatatatccataaaaaggaatgacatcatctcctttggagcaacatgaatgcagctggaggccattaacttaagtgaattaatgcaggaacagaaaaccaaatatcaaatgttctcacttataagtgggagctaaataattgggcactcatggacataaagatggcaacaatagacactgggtactactggaggtggtagagggttgaaaaactgttgggcactatagtcactacctgggcaasaggatcattcatatcccacacttcagcatcacacaatatactcatgtaacaaatctgcacatgtaccctctgaatctaaaataaaagttgaaataaagaaaattaccaaaactaagagaagaaatttaaaatctaaataaacacagatctgttaaaggaatttaattcatattctaaaacttcccacaaagaaaactgtaggccacattgttttaccagtcaattctaccaaacgttaaggaagaaataatgctgatccttcacaaacccctttaggatatgaggcaaggggaaaaacacttctcaactcatttgatgtgatcagcataaccccattacttaaacctgacaaatatgtaatgagaaaataacaatgtccattgtgaatgtaaatgcaaatttccttgaaaatattattaaatctggcaaaatataaaggataatatgtcattaccacgtgatgtttaattcgtgaatgcaatgttgatttagcatttgaaaatcagtcaagttaatgtactacattagcagtaaaagagggagaaagcatacagcaccttaatatgtgcaaaaataacttaaaacttactagtcctttataataaagacttgcagtaaattaataatagaaaagaactttctcagtctgatgaaatggcattgctattgtttgaatgtgttttccaaagtttatgtgttataatccccagtgcaacagagttgagaggtgggacccttaagaggtgattaggtcatgacagctctgccctcgtgaatggattaatgccattatwgtgggagtgggttcttgataaaaggatgaattcatcccactttcccatgctctgttgcataggctttgccattacacccttctgccatgagatgatgcagcaagaaggcccttgcaagatacaacccgttgatcttggacttctcagccaccagaacaatgagccatgttaattttggtttattgtaaattacccagtctcaagtattctgttatagtggcacaaaatagcttgggacaggcatctataaaaaacctacagccagcatcatacttaatgaaatattaatccctcttccctgtaatctggaaatgggcaaggactttcacttttaccacttgtctttaatgttgttatgtaaatctgagccatattaataaggaaaggaaagaaaataaagggtacataaattggaaaggaaaaaataaaaaccaattttttcacagataacatgattatgtattttgaaaatctaacagtagactctaaactacaagagctaattaagtgaattcagccaggtcacaggatacaaggtcaacatacaaaaattaattgggttatatatgcttgcaatgaccaagttaaatttaaatttaaattaactaaaaatggatgttaaatatttaaggaataacaaaaaaatcaaatatctagaaataaatctgacaaaagatgtcaagacctttctactgaaaactacagaacattgctgaagtaaattagtcttttgaaaaatggagagacatggtatctttatggattgaaaaacttaatattattaagatatccattatctctaaatcaatatggagattaaataaaatccccatcaaaattctagcaggttaatttgaagaactagacagatgattcaaaacttgatatggaaaggcaaaggctttagagaacccagaacaattctaaaaagagaacaaaattgtaggacttattacactacttgattttaagatccactgtaaagctactgtaatcaagacaatatggtattgctgtcaacagacaaatagaccactggaacagattagagagcccctcatgtatattggtggttgatttgtggcaaagatgcaagttcaatttagagggggaaaggaaagtcttttaataaattttgctatatccactgtatattcatatwaaaaaagtgaatctacagctgggtgtggtggctcatgcctgtaatcccactttgggaggctgaggtgggcgaatcacttgaggtcaggagttcgagaccagccaacatggcgaaaccccatctctacaaaaaatacaaaaataacccaggtgtggtggtgtctgcctgtagtcccagctactcgggaggctgagacatgacaattgcttgaatccaggaggcggaggttgcagtgagttgagattgcgccactgcactccagcttgggcatcagagctagaccctgtctctaataaataaattaataaataagaatctagaccttcctctctctgtgtagattaaaattaatttgagaatatctttgcraattcaggcgagacaaatgtttcttggacagaatacaatataaaaagcataaacaatgaaatcaaaacaattaataagttgggctttgtcaaaataaacaatttctgtttatcaaaagatgccattaagaaaatgaatataaacaagacacagactaggagacaatatttacgtaacatatatctttttttttttttgaccttggagatttccatcacttttttgtaagcttaggaatgcattaattatcatgcttgtcaatctagcacttgggtgttttgtgtaaaagttatttcagaacactggtgttttattctgccagagtagaagtcagttctttgacttttcagattctctgcaaaatataacatttttctgagcagcattaggtagaaatatactatagtatcatgtgattaccttatttcacacaaacagaattatataaccaaattctctatagttaccccttcagaagtaaagcctatacttactagtttcccagggaggagtcgttattgcaaaggagtagattaaacctgtggggaaaaaatgttggcctggtgtatctttttaggcatcagccttcctgtaagtggagctgtgaccaggtgtatgtatgcacatgtgtatgcatgtacattttcatgactgcagatgtagacacgtgtatgcacagataatgtttgcagataagatgtattttcagataagaatggagtaatattttaacttgggttcattgtaatgtttggatataagatatctaaaaaaagatcagtgtttattggtagagcgtgattacttgcaaaagaatttgactattttatttatgctagtgacaactagtgtttttcataggaatccatttctagtaattactgtttgataatataagggtaatgtgaatttcctgcttcctgcacataataagaatgtgaatttaatgccttctttatagcctcatttctccactccatagagcaggatgaggaagagatactctgtagtggagttcaggggcttttctgacctcgggtcctatcctttcatctgagtacatcctcagagacaagaggcagaagagaatacagaaggggaaaaataggatgaaaaagaataacaaaagcaggggaggaaacacacaggaagaaagaagaggaaaatacactgaaaagctgtggtgaaatgttgctgatgtaatcctaagggcctcaggtggcacaggtcccctggcttctatttgcctctctagacctatctgtggtcagaagaaccttgttctgtcagtacttagatgtatgatcttgaacagattcttaaacatcctttggcttcatttaaaaagtgagctagtatcaggtattttgtagttttgtgaaaatcaaagcagatagtgcttacaaacttcagcagagcatctggtacatcataaacacaaaataagtggtcattagtatgatgatatcaataccacatcttccagctgcaaaaaatggttttgctccagacagtgcttttcaaactatccgtgtcgaagaattgcttctaaacattaccagtctactgtgtgtttatacttttgtaaaatgcatttgtttataaaaagaattacctgaaaactgaaatgaaaaatataaacagatataaaatacagccatcaatttttattcttacatttggtagacatcaaatatctgtaaaattattgtagaagttactagtgcttttaatttctgaatttatcttatggactggaaatagtttgcagataggcattggtccatggttcacactttgaccgatacttcatacactgctctgtgaagagcagatctactgttgcctataaatacataagggtggactttgctaaggcaagggacttaggagtatttagaagtctatgctggggtgggggttatggtccaagctggaagcttccaccctcgtgcatgtctctgatggctccaaactctggagagtctgctttgaaggaaatcttcacataaaaggtcctatgtaaaaatgtcttctcctgaaggtggtagagttatttagaatctatgaggygaacagctagagttcagaagttgtctaacagtctacacgtrttcagtaacatagactttatcaaaagatgcactctcctcctctctaaacctcaccagtattccttcccttccagtgttgatttgtattatccttgatgcaaatgtctgatttgagttaatatttcaaggtcacaaagtaataagagttgtcaactgacagtactttgtactttaagagagcagctccttaggaatttcagagtccactcttatctgttgaagatctaccatactaggcgccatgactggtgccttggttcacatgggcttgctgatgcagcagctcagtgaagttgcagtttttatcaatgccatttattaggaaattgaacttcagaaagcttcaataacttgcctgtggtctgattcaaagataggtgtaatgagtcccaatacagtttttatttttacaataccacaggtttaatcgtctttcatggcattttgtcactgtcattgtatatgtattgtacgaatcctcatggaaaagtgcatagcctaccacagccctaggcactggagtccatgacaggccagccatctagtaagaaaatgtctttgcttgtatgtcaccagcttttgtttcatttatctctaatagataaggatattttcaataaggtaacaattaattgcattttaatgaagaacttaggttaactgtaagacaggcttaaagaagttggtgatttattaaatatcctcaatttaagaaagacttctaagtaagggatgataacggtcaacttaaatgatactgagactacagagggacaaagtctcaattgcagcagaaaatatttaagctgaatatagtgaagaatttcctgccatgatgttgctttacagctttggaatagtcttgaaagttcatatagagtgtcaaagaataggtgtacagcttgttttcagaaggtcctggtagagaattcttagattgactacattaccagtagatatgatctgcagtggttgtgactcatagaggtaacctccagaagaaagaatatgtacttctgaacgttctgatgcctttatccattcatgcaacaaatattgcttgaattccttctaggcaccaggcattgttctgaggatatgatggtgaacatggcagaagagatccttttattgtgtagcttatattcttgagcaaagacaaaaaaccaaatagctgaacaaggtagcttttagggacagatgttattaatgaaataaacaggttaatgtggtagagtgcagcaggtaatggggccattaattttaattttgtgatcaggaaagttctcccatcccacgccagtggtcgggaagagagacagagcagatctatggagggtctcataggccacaataaagggtttgtattttaacaatgagaagccagcagaaagtcttaaacagaaggatagcatgatgtattttgaattcacaagtcaccctgttttcctgctatgaaggaaatagggggattgggacaaagatggaaatgtgaagtcagtaagggaggctactgcgctcttgcagccaactgaaggcaagaagcatccaggcaggagacagcagtagcctggactagggtgacagcagtgggtttggagaaaaggggtaagactgccaggaattgcttatggattgggctgaggttgggatgagaaaggaagaagggaaaatgacccctaacttgggtggttttgtttactgaggtgggagagactagaggaggagaagtttggggagaaatcacttggccatgttacatccgagatgcctatttgacatccaagtagctgatgtcaagttgacagttacataactgggtttcaagctcagtggtgaatttgggctggagacaaaaattcggtagctttcagcatagagatgatgttggaagtctccatgggcctgtgcaacgtcacctggagggagaatgttttagaagagaggacctatgcctgggccctggggcactccaatgtctagaggaggagtgaaggagattgagaagaatcaaacaaaagagtgggtgtcatggaagcccaagagaagaggcctctcctggaaggataagctgaagtctaaagatccactgagccccaaacccctgttgagtccacagaccctggacccacacagcttcaggactgacctggaattgagctaacctcagttgttttaggtcaaggcacagggtgtgtgccccctccactccattctctcctgttgttcccaaatctgaactgcttcttgtctggtggctgcccgtagtgtgtggtgcacttattcatgatgtaaacagttgccagacagcctgtctgtgctgggacttcaggcataaccatgaacaagagcaatctacacagtttctgcccttgcagagcttacagcatcatagggtcaccaacgagaaatgagacaattccaagaaatggaaatagttgaggtacagctgcttctagtacagactgtgtgatatgggtaagtcaagttgctgttctaagcctggattttcctgcctgaaaaatagaactaagtctgagagactttctaagataccctgaagatgtgaattaatgactgtgtgaatcaaaactcctatacatcccatcccattttaattgcatccctggaaaggacagcgagtggaaaggccaggctagtccttctgtgtattgagtcacgtttggtgcgttagcccacgcygagcctctaaacttccttccgctcacttcgagtctctcctcaggagctccccctgstccattttccctcatattttggctcttctttcccatctccaccatcccatttctgtgagctttgggccttctccttggttccacttgaccgtcccaaagcatataaaaggacttgttttcataaggaagaaccttttggtgatgaaccatgacattttgccttcctgagaggaatctttgatgtttaaattatctggggatgtttaacaaaggaatgtgggaaatgcaaaactttttacaarggggaaagatgcccacacagggtgaagtgtacaaagcttcaacctggtaataaactctcaatttcttccttgaacacagctgcacctctcctcagacacctccaaagcttttggggagggagctggttgctgtgccttctcagaggagtgcgaaatgtgtctctgagaagaacacagccatttgttctgttaggatgcttctttcagactgtaattagagtgctgtgkggggtgtagatggaggagaaagaagaatatgaaatgctcttacttccctgtggctcattcttcctgcaccacggggctttgaacccactgaaatattgtgactgaaacatacastgttatatgcagagacagagagaaagcagcatgtacacctctgagttcatgccttgatagtatctgtgtgctacaatgaggtggcgcagactggcggagaattaaacagagtaggtctgaattctgctgtgtaactctttgtctttcaacactcttgaaagcctttatttttccaaactgcgaaacagagatgaaagtgtggtcccctagcccttttcttaaaaggttttaaggaccaccatgtgagaactcataacttttcaatattcatagtacatgctattctgtgatcatcccacttatgggagggattcatgaagcagttataatgaaatagtgtagcatccaagaatatttgtgggttttttggttttgttttaaactttatttgcagcaatatcaacaacaatttattgatgatgttttactgaattatcagttaacatctttctagcatgtgccagcagaggggaaggagggtggcagagaaagagcatctaggatggttctgtttcattcacagcaganaatccttgaagcagctggcacatattgtgtggatgacagagaatttggtgctattgagcttaatgatctttaatataaacatgtcaggatatccagctgacttatatacacagctgaattcctgatcctccctcttcccaaacctgctccattatcttttccatcctggtttgtttaactccattcttctggttgctgtagcttaaaactttggggtcatcttggatgcatgtctctcttacactcctcgtccaccagccagcaagtcctcctagctgtgtcttcacagtctatccagagccccactgtttctcatgagctatactttaccactctcgccaaggccaccatcatctggatacaacctggaagatctccctgcttccacmcttaatccccttcagtctcttttcaacaggacaaccagagacattctttgcaaacttaagttgtgggactcctctgctgcaactgaccaatcgtttcccaatsacaccaagtaaaactcaaatctttatagggtatctatggccctacatgatggccctccacttccccactgcctgctaccactctgaccttttttccatgtattcagtccactctagtcacattggctcttttctgttcttcaaaagctcctgcaagatgcttctgccccacagctttgccctggtcatcacctctgcctggaatcctcctccccggatgtctgcatggctcacttcctcacatctctcatgtcattcctcaagccacctcagtgaggccctccctggccactcaaccaaatattccagctccccgacacccaatacttactatacttctctgctttatttttccctgaggaattatcagtttataacattctgtttattatgcttatttatcttgtttattgtttttctcctgcagtataatgtaagctctgttgaggacaaagatttgcttctttttttgagaagggggtcttattctctggcccaggctggtcttgaactcttgacctcaagccatcctccttcctctgcctctcaagtatctgagattacaggtgcataccagcatgcccaattatacttgctgctatatcctcatattctaaaacagtacctaccatgtagtaggcactcaataaattgtattttggaggtggaatgaatatataaaataaaggccttgataataggttatctgtattatgatacattctcagaaaagtcagtaatataacagctacttggarcacctactataccttgcacattctatcatttaatcctcacaacaaccttttgagataggtatgatcattattcctaattttatgaatgaggaaactaagatttagtttaagaacttgccccagatcacaccacgatggagctaggattcaaacccaggtctgtacaacttcagagcttttaatcattatactttaacattctggattccaccaacttcaaggttaaaaaccgaaacaggaaacatattccagttccttcattatctcccttacattaaktgtcatgcttttcttcccctgtgtctactcaaacaaataaatgagatctcaatattgagaagagaaagaaaaaagaccagtcattccctgagctcctaaaagaataatcttctttgagttctcataactgaaatgtcatgaagctgtggaatagcactggctttggaacgtgatgctctaggtctgccgccaccgccctaatccttggaaatggcaagtcatctgacctctctctatgccttagtttccctgcttatggaaagccggtcttggacaggtgatctgtcaggttcccctcgcctgatatcctggtctgtgagactcctggtctgtcttccattgccgtggacataaggtggtggagtaggagtgggatatagcacttcatgtaatgccatttatttgccttaaccactttagggaaggatttctgctcataggaggagccttctgaaagctccagattctaaggaagaatgaccccatatgatgtcgtcgagcatttgcatcacccatcctgcttattagagtcaataatggataggatttagagggctagcttctgttttggcctttattgacaacctaagtctccttaaatcctttctggaacaagtcaagggataaagcataaayaactttaatactgctgaactctatgaccttcagkaaggtgtttaccttctctggggctgtgtttgcttctctgaaaaatgggagaaatggttccccaggctcgtaagaacactgaaaatatagaaacattgaagaggctcaccctaaccccaacccattttccaatggcactgaaatgaaaccactgccaacacagaattgccaatcttgcttccaatttctctgttagtttcagaacatttagggttgaagaggtttttcttgatgtctaacycaaattcctccttcctaaagcaaagactttacaggaaccttggcaaggtttccctatgggtagcaaagctctctgaaacatggactctgaagattaataggaatatgaccatgtggccatttgtgtgcttggcagagtgtgtgtacgtatgctgcttgtgccaggatgagtgtgtgtttccatgccaatgtgtgtgatgaagcatgcaagtgtgtacagtagtgtggataaacagatctttgagtcacacaggccagcccatcctggcactttgtcttccttttggttgtcatgacagcagcgaggggctgtgcatcagtaaacaaagctccctgcatggagccgggaggagaggtctggagcgagaggctaaaacatgagtcaagcagtcctccaaccgaggctttcttaccccagccgacctaccagaacatcttcatcgctagacaagcatcgagataccagtccaggtgccctgtgactgactctggggtcacataacatgggcagacatttcaggctggagctaggctttcatcaacctcacttctaatccccaagagttagcaacagcataatcaagtctagaaatgtgaatgaccgaagaccctcctagtatcagcctatgggctaaaaccagttacttcattaaggcagaaattagccactttgtgatttgtctgtagcagtggctccttataggttcatacattcataaaatgctaattttaataataacctaaaatgatttcaaagaagtctctgtcttctctcccctcatccctccaggcacacatgataaatgttttgggcattctaccttgtatgagattatgtaattcttccacttcatcttaatgattaattatatagaattagctgtgtatgaatagttgagttttacaatttatatttctcatgtaaactgctgcagaaaaaaagcagtcacaaatacaaatgtagtaaccaggataaaagaaaactgtgctcaaccatgcagggcaaagagatccaccttgttcttagtttccatgactgaaatttagaaacccaaaccttgcatacatatgtagcatctagagtagaggctcatccatgcttaactccaattcaccttacttccctgtatgcaagagcngtatgtgaggggacctacaggttatcctccctcagaggagccaggtttggggctggaggagcaayctaaaattaaggatgacagaattgggtaaggagaagtatcgggaatgaaacacgacttggatttgtgtcactgtacaatctcttatgggaatctantcaggactctcagagtcaaccagatctatccctgcctctggttatgagcctagggtttatgtgggtcctaatgtcaactcttactgatgaagaaattgagacagcaaggtgactgtccagtttgtaagcagcagaggatacctagatccccagctctgaaaatagaatggtggtgtttctgctgcatcacatggggatttgtttttgttccccttgtttggaattctgaaatctagatgcatcccttcttgatttctgttgcatctctcggtgtagaaaccctggatagaacaaatgaaaaggagccaattacctatcctcttaccttaggccacaggctgttgccaaggggccttagggaatatgaacactcttcttctataggccagattcccccttttacattttctatgccttgctccaagggaactggataaattaagatattcatagtgccctgctatgagctgcctttcagtgggggaattcagcagtcatctggtaaactaaataaccgtaatatgcatcatcatccgaatcaccccaggatcctctgtgaagaggacagggtactcagatcctcagaggagagagggaccagttaaaggagtatgctttgtttcgcaggtctggccacatatatacccatgagcctgatgggcatgttaaatctaaggtttatgaagctgaatcttatttgctcctgttctctccagaatgcaatatgtgtatgaataaatggacacaaaatcaagcagtatatcactagcttgactaacgctatgaattttattctaggtctttaataacccaacacagagcaatggatttttatgctactgtctcaatgaaaaggatagtcccttaaagaaaaacaaaacccatctgttttaatatccttattttcctcaaccttgggctgaaatgaaatccctcttgtagattttaaatgttgacttctagatagcagggaagacagctaaggcattgtggaaacagcacataacctggaagaagacattagtttgaattttgtctctgcctcttgctaattggattatcttgggcaagtaatctttttgaatctcgcagggcttttgaaactataaatgaaataatttacatgaaaatgatttgtaaatttaacaagtttaaatgtgttacatgaacattagctgttcttgatattttatttctataatctatggaatctatcataccagacactgggttaagcttcgctgacccttgttggaatgtgatacttgacctcatgaaggctttacttgacctcatgaagcctgcagactagtcagggagacaggccatgggtactaacaattacagcagcgagggcagaggggctgtaagagttaggaaagacacaggtgctggacttgctacccaggttcccaatgaaagaacaaaacagaaaaggctgcttgataaagcatcataaagaaggtcccccacatcctccattaaggtgctggagctgcttaggaggtactcccagtggtgcacattcgttgctttacttcttttagccaagaggcttggccaaattggttgggctctgggactgtgagttccagctaggatgccaggtgggagggtgggaggaaagggagcctacaatggcgaagaagagcagggaacccagcgagtgagacctggatccaggaaacttccaaacacaaggaggcatgtggaaacagcgcttaacctggaaccggaagaggttagataaagggaggttagacgggggtttgttggcctatcctaccagaaatcaagctacatcgtcattctgggggccttataragatgacataccccattcttcatagtctaatttacactgattatagtggagtcaaatgaagagaaactggtggcagtgtgcaggagttgctcctagttcacctgctccctttgagtcagtgcagagatggagtactcctccttttaagcctctgggagtcagggaagaactatgacttctcctagttagcctggatatttgtcattaaaaaaaatctactgaacatatactatgtggtaggcctattctagtctaggaagatagaaagttgagtaaggcacagaatgtttttgcaaaaagctcacatagaaggagagacatacagctgaccatagtaaaggtctgactgcaagatgagctctaaagggatggggaagaggtagactggaggccagaaggttggggtgcagtgatggtgggacccaaagagaagaggcaacatttcagcctggccttgaagaaggattttgactcaggcagataagcattgtgcactagccttgaacgcccatcctgccttttcagtaagtgtgggaaatgtgctgtagttgaagtgtggctgtggtgggctgtaggcaggcagggggtggatagggatggcaggaggagataaggcttgaagagaaaggtttggctacaactgtgtaagactttgaacgtcacgcttgaaggcttcatcctcttcattgagcagagggtgatggaagccatagaagaggggctaatagagtagaaagagatgaaatttagaagatctgagagttgtggttcctctgaggggctatgtgtccttggacacttgccctctcaaagggccacttaagtcactttagattcagttttctgagctggaaaatggatatgttggtcataatgcttatcctagatgctcaaggatgatcatgttcctccggtcgtagcctgcttcaattctcctctttcaaggtcttgctcaaaatatcaccttcttattaaacctccctggattcccccagggttgagaaatcaagacacagacctatgaaaaggtaaagtaacatataaaaatgccatttggctaggcaaatatgtggtgcatgaaggacttgggctcttacaagagaaaggcctgggttctaatcttggctctgtttcttacttaaactccatcaagttgcataacttttaagttaaggatgaaaatacctattctaccttcttctcagaatggttgtaaagattaaatgagcaaaatatatgaaggtgcttggtaaattaagatgtgctctacacatgttacttgccatggttagtactggaggtttggaagtggtaagatccagtgaatgaccttttaaaaagataacgttgatagtgtgagatgggtgaaaggaggagaaagagacaggaggttgagagaccagccgggtgctattgcagtggtccaggcagggaaggatgagatcatggatcaagatagtgaggatggagaggcagggtgaattcaagtgcttttatgaaggtagaaccaacaggacaatggtactaactggacaggagggattgaaagaagcaaaaatccaaaggtaagaattttggtggatggtgatgtcatgaaccaagccagccccttgttactttcaaatttctgaaattcagaaagtagaaaggaggcatcccagggctygaattcagttatcctggccctcactggccctggtcrctcttcattttgactctttccttcccttcccccatagcacctttagtagaacccaatgaacctgaagccaagcacaggagaatttgtccttccrgtgtgcctttccctacaccttctgcctgattgtaagcaggtggctgtacccaaggacaccagctctattttggcaggagggccaggtgtgacacgaacaggtgtctgttggcattatggtagactggcgtcttccctttccctgcactgtagctggggcccatcccccagcccctcattcatttcttctttcctagacatgacagagaaactggcaggacttacagtgggtgctggactccctcagattcagtctgcagctctatttttttttaaacgtcttgctctgttgcccaggctggagtgcagtggcatgatcacagctcactgtaacctcgaattcctgggctcaaacagtccttccacctcagcttcccaaagtgctgggattacaggcatgagccactgtgcctggcctgcagctctttatggggatcacatttaataagtagaacagcttcccaggtagtaggagaacacctgagccatggctgggaggcactgcactggtaagggcatcctagcctggaagggtgtttggtgatgagagaggcattgctagaggtggcttctggaggaacctgttagcaaactgtgatttatttatccccattctttcacccaataaatttgatcctcctcttctctatcagggagcccttagtcctcttctcttctctttctcccatggagctgtagccttctcattcctgttgtcacacggagtggcattggccccctgagcccatcttgggctctatcttcttcctgaccctgaccttcacctgagtgttccctctgcctcatgatctcccctccaccccacccccaccaccttcccactggctttatgggagtcaggtgtccttctcacgtcccttcctttcttatttaactgacatcagtcaccttcgaatagcattttagcctttgaagtcatcaggctcattgatcttcagtggcagcttttattgagcactagagtacaggacagcagaggcaacacagcattgtggttagggttcaaatcccagcaaggcatttcacctcaagaaaccttggcttccccatctgttaaatgggaattttaatagtattaatacttcataggatggtcgtgaggatgaaatgagttaatgggtgtaaaaaccttgatacagggccaacacatcataattggtcaatatacgttaatcactattgttatcaaaaggagaaagagtagctgtgcccttcagagggttaagggtttttgttgtagctgaagaggtggaacatggcattttgaaacctagtttctcacatggctaagaacatacctttcaaaacagagcaagcaatcagttggtcctgactggaatgcagctagtctgggaaggcttcctttgtgaggctgaatgaggtgtgtttctgtgtaacattgtaaggaggtcatatttgcagcctgggtcaggggaaagggtacatgggcttaatagaggtacttgctcagatgctctctctctgttgcttgattcactctttcccytagtcatggccctgtccaaacccagtgaatcttatccttcttrtccacagggaatttgccaaagagagagagagagtggagaaccgaagggctttcatgaagctgcggcgccagcagcagattgagcgtgagctgaatggctaccgtgcctggatagacaaagcaggtaggcctggggggctgcaggaggctggtgagtgggctgcagagacatcagggccggcccctcactcccaatgctcccattcaaggggcagcctagacaagacaagagagacactctggatgcttggttggctcttaaggttccctgctcatccgactttcttcctctggggtctaactgtcctgtctatcaaactgtcccaacaccttaaggcaggcatcttagcaaggtgaactgagtaaaagtaacataacccaatcctggagctgagactgggctgatggcgttttgtaataccgttcctggtgctcacagcagtccattcattcagcaaatatttattgagtgcctactttgtgccagaccctgttctaagcacttgggatatggcagtgagccaaacagtcaaccagctcaccaaagctcttctcttgtaaagctctctagttggctaaggcarcgataaacaaaataataaatgagtaacttataagacaatgataaggtggtaaatatgatgggaaaactgatcaagttaggggtatgggatatagaatgtgccacagttttaaataggaggtcagggtgggcccattggtgtgtagacttgaagaaatgaaggagtgagccagaagaagttctgggagaggagtatttcagcgccaagtacctaacatgggagtgagctggggtgcccaaggagcagaagggggaaggaatagggaggaggaacaggagacagagtgacagctgtcatgggggaagtgggcagcaatcgtgtttgaccttatggggccttgtaagggctatgggcttcactctgagtgacacaagaaccatgggagggttttgagcagaggactgacgtgctggccgcattgagaataraccatagaaggataaggctggaagcagagggactagtagtgccgccatctagggaggagataatggtgagaacaggtgttttcctaagccttgagctgtcatcagttcttaccctgtgactcaacattaggaatagttctcagctgcctgtgagaataggtccaaacctatcatgatttcattaacccacagagccaccagattcaagtttggctgtggctcagatgcttatgaagggcatcaatcacccccatatttgtcaataaaagggacgggtttgctttctttattattttaaaggttggtttgcattagtattatatatcttcattttcttccagaggaacaagtgatttcttaaataaaaactacacgtatgacagtatcttttctctattcctaatagaaaacatagcacaaaagygaggtcacagaggaaaaatttggagtwtgatttagtgcttagttgcttgagccttattcttctgtaggagctttggaatgacactataacacttactgtgactgccaacacacaaaaaccctctctaagctctgcagtcaacttttggtgacctccaagggttgagagggtacctgtatgattgcgatctgcactcccttgtagcctctggaaacatgagcaatgtgtgttgactatacttgcatttcgccctttctcctccaaggctgttgtgtagggatgaagtggacacaaatatcccctaccgcttcccagaatggtaactcaggcttaccatgggaggtcaagcagatttgcctctaggccaggaaggcagcttgatggtcccagctgtccttggctttctcggcggaggagccatctgacagaccactaagagagctggcagcagacccaggaaggagcccgcccagccttggccaccccacacaggtcaggtggcagggtatgctgctcgctggggctctgcttttcaaatacttgcagaattccaagscttccctttcttccagttggcaaagccagctctctcctccttctaagaaaaaagacgcactgcgacgtcaaagtgtgcttcctggcccttccctttacaaatggagcgccagtgaatcagagacagatgggttacatttccctggaaagacactcaagttctaaagcgaacttggcaaaaggcatggggtgaggaggaagggggatggcttcagcaaatccagagcccttgagtgcttcccagagatctcggcagcaccacacaccttccatctgtcctggggggtccccagatctgctcaccccaaagcccagacactgtgcacagcaaaagtgacttgactgtctggctragataattaaagttgctatgaggtattttaacaagttcctaatttttaaatgatgccctccaaacacgtgctataaaatgacttaaaaaccctttatgtctgcaggaaggagtgccccaccaataacacttaacctgttaatttagcgttttgccagaggctatacttaaaaaagaaagcaaacatttatgactttgtaataatggccatccggtgagtaccatcccagccttaaaatgttcccctccctaggaaatacattatgtactctcagttttatctgtagctggaattacggtaatgactttaacctctcctactgtccttttacttgttaaaagtgtttaaattaaaccattgtttagtagggtctgaagctagctttcccccagcagctgggatcttagggaatgtttaacgaggcctctggctccctggcctatggrttgagctcaaactcatcccgttactcctcatagggcatgcaggatcccaccagacttgggagagaagggctattttgttgatgcacttggagggatgctagtgaggtttggtctaaaagtcttagtagaaaatattccccttcagatgatgacacctcagtagagtatgggactgctcctggggacaccaagtgggaagagtacaggggactgtctggtgtcattttagaactccaacaagcaaatatattatttcatcatcaaccagtccttcagttctctaacaccaactaggtgttcaacaatcagttaaattctaacacgaaatactacctcaaattagcatagaccccacaggttaaaggctcggttccacaggactgcccccactttagatggcagccaaaagtgggatctccaggcaaccaacatatctgcctggctgactacaaatctggggttcccacaaccatcaccccactccccactggttcagtaatttgttagaatgactcacagaactttggcaaaaccatackgtattataaaggatacaactcaggaacagcccaatggaagaggtatatagggcagggtatggtggtggggagcacagagcttcatgtcctctctgggaacaccaccctcccagctcactgatgtgtttaccaacccagatgcctcctgaaccccaacatgctgaaccccaacatttagcatgcccatcattacataggcatgctygattaaaccatcggccattggcaattaaactaatctctagtgcccctcctccctagaagtgggagtagggggaggctgaaagttctagcctccagtcctgtggctgtttgttctggctacaagctacctcctctaacctatccagggcccctctctcctccatgagtcatttcattagcatatgaaagactgccaggaaccagagacaaaaaccaaatactttttaaattttatcttagggacaaattcatgattggcccaagcctctttggctcaggctctggtcaaccaacaaaggatggaagccatggggacaggaggaaacccacaagcccccctcctgtctccaaggacctttgggcatcttcctctgactcctcctcagagacatagaataaagcccaaaacatgggctcagctcctgaatgagggtgtagatgttataacccatggccactggcaagagaagctaaggaagctgttgctgctagaagttcaaggagttaggaaagacaggaagctgggtggaattaaaaacagaaatggaaatttttcattcctatcaaggattttagcttcttcctctcttctcacaggtatcctcctgaacaggagtatcagacacagagccgattgttaccccaaacaccccctccccgaggcttcctttctgttctcaggagctctctgtgcaccctctgtgacacttgctttctttctgatgctggtgcctgtgacaggctctgaactctgctctctctctgttgccctgagctgaagttgtccctgagggattttmatcttgcagaataatttggcatttacagataatttaccaaaccatttgtttccatatagaggaagtcatgctcgctgaagaaaataaaaatgctggaacatcmgccttagaaggtaaggaaatgttctgatgccttattccagttgcatttgcccctcttaggcgatggcaatctctgttattcaaaaggrgagaaagaaatgaaagatggtgttctgggattggaaatgagagtctttctgtcataaaatccctcatgctttaaaatgaagggaattgagtcacagatttaaatgccttttaaagtgatgaaaatgaaacccaagagttgctttgttccagggcatgtgattgatactgagcaaggaaaaggcsatcctacaaccaatgctatctaaagggaccttctcttaaaatgtgtggggatcaccttgagaccactttcattaccagkaagtggcattgtagatgawgagccaggacagatggatacggagtgcctgtttacctcctgcatttagataggctctagcatggcttccagagctcttgtgttgcaggaaggtgctggtgagcacagcatttgcggtccggtagacatccgtgatttctgttaccctggctcaggtattaaaggcagatagatgcctgtgttacaggggcctcacacaaggcatcttgcctgcattcctcaaaattttgtccagaatggtctgggtgtacttgtggcctctcactggtcttccctttccctgatgcagtgcttcgaagggcaaccatcaagaggagccggacagaggccatgactcgagactccagtgatgagcactgtgttgatatctcctctgtgggtgagtggatccagttagatcttttactgctctgaatctcccacgaaaaggaagatcctgtcttttgagaagcaccacaaggagggaaagaatccaaagggtccagaatttaggaatgtaattaaggaaaagggtggaaatcgaatctagattacaatgatttatttaaaaaaaaaaaaaaaaggacctggggatgctatttattcacaygaaacatgggatttagggctaagaatccaacccaagtttttcaggtgtggcagatgtattccatttgcagaagtatccaccctctcctgggagtgatgatgagaacccactatgggacattgttcaaaggatcctgaggacctgttgcttccagggacacggatgtgagatcttgaagccatttgcttaacaacagtagcccccacctacttccatcatgtgaaatttaaactaattctgattggcaattatttaacattatgtgttccatctcaggtgctcctagagattctggctgatggcaggtttttcctccccagaaaaagggaaaggtcttgttccatcctcaaaagcagaagagacttacaaagctcattgctgttttgtgccaccagtggtagaaatatcaccagtgtagcagaagaattccagtgcttgaagctattttaaaaggaaagggcagaaagaagcccaatctgttaaaaacataaacacgatcctattaagattcaagacactggtgtcctgtctggggaatctttccatttcttaggactgagagtgcccagagaggaaaaacagggtcactgcctatagaaactactgagcccgtaagatggggattccccacacctgcaatgtggcagtcaccttgccctgggactagagcagcccatcttgcccttcgaatgctccctggcccrgaccacaggatattttgcagtctcattcttccttacytctccctcttaggcacacctctggcccgagccagtatcaaaagtkcaaaggtagacggggtctcttatttccggcacaaggaaaggcttctgcgcatctccattcgccacatggttaaatcccaggtgttttactggattgtgctgagccttgtggcactcaacactgcctgtgtggccattgtccatcacaaccagccccagtggctcacccacctcctctgtaagtaaagcctctctctaaagcctcctctgctggtccccatgtggggcagcttgatgtgtgtgtgaacgcaagacagcaaagcaccctgctaggaaaggttctacctcttcacgctgtgagggaggccacatcgtcctcaagggggctggagtatctcatgactgtttccagctttcattctttaggtaaacagatcattgttgatgaatcaacaagatagcataacgttatacctttgggtaccataaagcyttcacttcctttcttaaggaggctcaatgatcaggagttttgatcattgaaatccygggcaggaagttctcagggcaatggagacctcaaatagaccagaagaagagcttataggtcagctccagattagactgccactgggtgtgagtgagggtcaggggcctgtccctgccaggcatgtagggaggaatccagctctttgatcaaagccatagtaagtcctctctttccccctgagggccctctaccatataaagaccagtgacaggcctacctattgaaagagagcaatgctgatctcttgagtgcacctgggactcggcctgggtcagagggtactcggacatcattaggctctgtccagccctggcctgatgtggccaccgaatgtcctgacgtgtgttgttgtgagatcctctgtaggtgggtgtgttagctgagaagtgcatgagcccaccccacatgtggaaccaatgctctacttttaatacttccagactatgcagaatttctgtttctgggactcttcctcttggagatgtccctgaagatgtatggcatggggcctcgcctttattttcactcttcattcaactgctttgattttggggtaagtcctcggaagcctgcctctgctcctgcttcgtgttgatatgccctggttttagataagcagcttgctccttactcagcatgaggcactgaaatcagaatatgtaaaagcggaatagataagattagctaaagggaattcagaagcgagtgaatccttcccatgcagggtttgtttgtttttctgagctctttgattttcaatatttttattaaaatgtaacacatacattatagagggtacacttaagtgtatagctccgtgagagtttacaaagctacccatagccagagttttgaaccacttattatcttgggggaagcctgaaaaggacaaaggacttgattttagaggtggttccataggaaagagaagcttatatatttgtttttctacttcagtttaaaattgggataattatctagatagaccctcattcaaamacacacacacacacacacacacacacacacacacacacacacacacacacacacccttatattagcaagtcctcacagagaatatctcagtcagctgtttactttctacatagcatggatatctaaatgtatacattgtgctaacacttcaaggtgctttcacgtatcttttatttttgtcccctgccgcttacaggagtcctatgaactacattacatttcaggagttagccttcccatttacacaagaataaatagaagctaccgtgcccaagttcatatacccagttagcagcagaactgggtcgcagaactttgggctcctgaaccacttctctttctgtcaatcccactactttttctgccaaagcttcagttaggtgctaaagattttgaacacttgctaatctacattttaacttggaacatatggttctgagtacgggcaattttcaggcataacagctagtgagagatcactttaacctcagtttctttgtgtccgtacctttcggcattgctgtcaggattaatagttgttgtttctcctagcacaatatctagaacatagtggacattcaataaatatataattaaaataaaagaaatagaaatgttcatctgaaattgctgcatcttgcagcaatcagatcctacatcaccatgaactgtcacattgcgggatgcaagacctccatgactgaaagatatttattatatcaaggaccaaaacrttcttgttagcactaaattttaggatgatgagagaatgtagaccttctctgagatttctgtattgagaagcaacttgtactaatcagtttccttggtttgagtaccactcctttgtcagagcagcagaagcagcaactggctgttgtagttttcaccaaggacaggagtcagtaagccaatctacagtgtgaaggattaaagttaggaaggggattggagagcaatgggagagaggtggcagcttcccacataggtagttctactgaaggtagggctggtgggagaggagagtttttatttccccatcccccactgagagctgttgatggtgtgctgggcgctagaatgccccctcttctcctcttcctcctcctctcactgtgrctggcattgcctctctaggtcacagtgggcagtatctttgaagtggtctgggcaatcttcagacctggtacgtcttttggaatcagtgtcttgcgagccctccggcttctaagaatatttaaaataaccaagtaagtgatcagaatttggacttttcccaatgtctttgagagtagaaccttttttctgccttatattttcttccatcttctctttcccccttagggggaaagtatcccttccctgccccaccccttttctattctttagctcttcctttttctccaaagattaaaccaaaaatatctatggtgccacattcccaaggggagcaataggtttctgccctctttacttcctacaaatatacaaatgcagcttatttcatagactaccaggcatatgctgagctgggcttggtgggtgacttggtatgcagtgttcacagctgtcacattgtctgggttttgtaggtattgggcttccctacggaatttggtggtctccttgatgagctcaatgaagtctatcatcagtttgcttttcctcctcttcctcttcatcgttgtctttgctctcctaggaatgcagttatttggaggcaggtaagtgcccagaagctttccatccaaaggaggctcaaaacccagtcgtagcctgtgttgggctagggtcattaactcaatcaccatgttactatcctgtctgcctttgcccatggcctgaattaaccactgagtgagttcatatgtggagtaaacgtctctgcttttattcctttcatgctgtacagggttctcattccggggacccatctctttggtgctgtccctgaaatgtgcagcgtgggcacattcttcaaagtgcatagtttatcagtagtagtcactgttacagtctttgtaagttatgtggaatggggaaaaagtagggaagaggggggttgtagaagaaaggagaaaagaagtgatgaaagctgtgatcttggggaatggaaaacttggtatgtgagattttcatttcattattttctctaattttgtttttcaggtttaactttaatgatgggactccttcggcaaattttgataccttccctgcagccatcatgactgtgttccaggtatgaggccagctgacggttcacaagtgctgcatggggtcccttggactgcacactgcaagacaaggatgagtttcaggataattctgcttttcctttccaggctcctcccaggggattgaggcactctttctagttgagcggtcattactacaataatccctagaacttctgtggctttgttcttaccaatagtaagagagctctgttgggaccatctcactgtccttctctcacacctgtgagtttgcaggagacactgagtctgaggcattcagccaagaatcacatctatggttttctgaaatctaggggcatcttctaacccatttaatgaggtatccattaaatggtgtttatttaacaaggtctcttttccatccctactccccccaaaactcaaccgtttaaatcatggggaaaactcaaaatcaatagtgtcttaggcctaaagaaaaatactgtttggccagaatctgaggttggaccacaacccgtttcctgaactgcagcccacaaggctctttccaatcatgctgctgttccagaccctgtatctgggcagctctgaggacagttaggtaatgaccagaccacctgatctgtgtcatttccacaaggaccttgcaaaactggaggtgggagacactctgtagttggaggaacagaatctttccctttgatgctctccttccattttcaatgcctaaaattcttttccatacgaaaaaaaagtttaggattatttatggaaatgactttttttttttttaactccctggcaagattgtcaagcaagggggtagatgcaaaagacccaggcccagaatttgcccttggcattggccccattttctcctccagcccaggtttctgatgygcctgtcatttgctttttgtagatcctgacgggtgaggactggaatgaggtgatgtacaatgggatccgctcccagggtggggtcagctcaggcatgtggtctgccatctacttcattgtgctcaccttgtttggcaactgtatcctttttaagatgcacctcctcaagctgcctgccttcctggaccagcatttgaggaggcattggtggtggtggtgctagagcttgggttggtgggacaggggcgtggacattgtttggtgtactaaagtaaataaggatcctgatctgaaggactttatgtactagttgggtaaagaatacaaacgtaaacaagatagagtattatccaaatctgtagtgtatgcaaagaataacataggaggctgttacattgaatggttggaggtactatgagctggggaacattagacaaagcagagatcactgtaggctgaaagaggcacattataccactaatgaattaattacatgctaatgtngaacagagcctgccacatagtaagatcccaaaaaattagtgttaggattaatgctattactgctaattatagcaaatatgtattgtatttgggctatacgtgagaccttaaactaagtgcttcataggcactatttcatctaatccttacaagacagagaaaaaaatatctcgagtaaaataactactaaattgtaaagggaaactaaagtccagttccatctaactccagtgccctatccaatcacaagatctagaacaggaaatttaggttttaatcccagcaactctgtgtatcagctgtgtggccttgggaaagttacttaatgactccaagcttctattttttacaactgaaaggagaataataatatttatctcctttgttcgtggtgaatactaaatgagataatttatttgcatgtgatttataattacaaacttctatacaactgttagatgcttttggggagttgggttggccgtgaattgggattagtagaacagaaaggcagaaccatgggacgcaggtgtatttttgcattttccatagtttcatagagaagacatgctgttttacgttttctrccctgaaaacatctagaggttgggacagactagaagctcaatatgagaaactcatgaaaagaacactaggcagtaagtcacagacatggaagctccatgtgtcccaatggcaccatcattttcctgatattctgggggtagtcagagctgggctttgatgctagaacagttctatgttccacaacacataggctttgaagagagttggaaattgagacttcaggcactagagtatggcataggaatagatttcatagtgaatcatgtctgctgtgtcacattttgttaaatgaaatgtggaacccttcaggaccctcacaagaagaatgggagaagttagcatctcattattgggagatgctcagtaacaggggctctggaatctcattctttttgtcgttaaggacagaatggtgtgacgcccattggtctaggtaggattcaattccagcctcccagaatggggagatgagctcccatactgagctccctacacatctcgttcagtgattctcttagttgttattgctatgggtagaggccacagctgtctaaagaccttttgaatgtggctgaacaaactcaaagtgctttttctgttcccttactcatcaacaattaatgcagaagacttctgtaaccaaatgcgtgggtttttttactcaccaacaagcaagcaatccggcagtggatactaattggtgtcctctaattcaattctgacgctatctacctggagatagcatcagatcccacaggtcgatggctcaatccccaagactgcccctgccttacgatgacgattgcatgcctcaggttactttacctgtgttttgaaggctataattcggggttcccacaacccccttcctgggtttggttaatttgctagaatggctcacagaactcaggaaaacacatttactggtttattataaaggatattacaaaggatgcagttgaagaggggcagagggaaaggcatggggatgggcacagaacattcatatcctctccgggagtgccagtctccaggaacctccacatgttcagctatccagaagctctccgaaccctgtccttttggattgttatggagtcttcattacwtaggcatgattgattaagccattggtcattggtgatcaacttaaccttcagcccctcacccctccccaggggttgtgggggtagggctgaaagttccaactctctaatcatgccttggtttggtgaccagcccccatccagaagctacctaggggctaccagataacactttggagtttctaaggatttaaagagttgtatgccaggaaacacagttaaagaccaaataataatttttcacagtatcgtaattttcctcaccccatctggcccccagatggtttgattcaagtatttctttatcctgggtaaagagatgatatgcagaaggagggaagaaatatcctctttctcctttcaacagagttgtacaacatctccctctctgttctcacagcccctgcttaagtgactcttcagggtagcttctgttcctgttaatgtcccaggcaggaaagattatcaggtggcctctcagccttgctgaagacttttgcttttcttatttgcccatccttaattcatcaccccagacacgctactgaatgtgttcttggctatcgctgtggataatctcgccaacgcccaggaactgaccaaggtaagcattgttttctggggatctgatgtttctctagtgccattgggtaccctttggcctttggaactctctcccaaagtctacattgtctgactcaggcctgccaggaaggccctttctggaaacttctggacagttggagagccacayacccatgacggaaggctggttcacttttattgagtttggtgagcctcaacctagcccagggggcctcaaggaacacagaaaataacatcttaatttctatgagccctcaaaggagtcctttccaggatcatcatggagagtcaagaaaattctaaagccctggttttaagttccacctctgctactgcaacctgcggctgtgtgacctgaatcacatgacttaacccttttgggttttggtgggagagagatcagggccatcacagttcctgggctatggctgttgggatattccagtaggcaaaggtcattttggggaaatttcaatgaagccagatactaaatttctcacagaactgttcccttcttttctctgattaatttccccagtgtggggaggtaatattaacagcagtgggatggtctacagagatgagtaaaaacccttctcttcacagagggtgccaatttggttttgggcagaggtgcatagcatcctgctgacatttctgagcttcttccatgcattctctgatgatctttctacatccttgagggtcttcttatctgcatatatggtaggaaaaatatcagctttagtagctgagaaactgggtctgagtcccacacctgccattggctgtgttggctttgcttggactcctgatctctattagcattggtttcttcatgcatgagacaggaatgccatatctgcattgtgtaccttacaggattactgtgaggatcaagtaaaataacgtctgtgaaaaccatagcatgctctgaagatgtatgtgctcttattagctctagtcattttacctgagctggttttccttgggttcatcacatagaggggacacttgcaggaatgctgctgaagggatgagatcttggcctaagcacccacttagctgtgcaaagaagacactacaatggggcactcagcctcagcactttacttggcggggtccttgcctggaaggcccctgctccatcacttccagacactgtaggacatctgggaagtgtcagctcctgccactgacctccacagccatagccagctccactgagggctaggggttggggtagacttctcctggttctcatgagcaacctgtggatggctccaggatggagacagggattgctggccacgctatagctgtgagactactgactcccaaggggcctggcctctggccatcagaagtctctgagccaacctaacatctcgctgtcttgtttatcctcttcckgtgtcttcctcacttcacttggtattcagaactcctccttaggagagcagccaagggaagctactctccttcctggggatcccaggcaaagccatctctgctttgtgtctaggatgaacaggaggaagaagaggccttcaaccagaaacatgcactgcagaaggccaaggaggtcagcccgatgtctgcacccaacatgccttcgatcgagtgagtcagctgcccccttcactgatccctgagctcctgtgctaacagccaattcatcaactcacagaactattggttataggagtgtacctactacatgctgggaactgttcctgagaatacagcagtgagccagacagagtctgttttcatggaagtgttatttcagtgagtgagatagataataaacatgcacatcatttcagatagtgacaggtgctataagtaaatgaaacagggtcctatggtggagaagtacaggagctgggtgggagcagcttatgtcaagccagaagggattctctgaaggggagctgtttaagccaagacctaagtgtgtagatgacagtcatgtgacattttgaaggaagagtgttccccagcaaggttcagtgtgactggtgtgtaattaatgaggggaaatagagaaagggccagggagggggcaggggccaactcggaggtccttaaagtccaggtggaagagtttagcttttattctagctgaaatcacaagaggacttcaagtggaaggatgaataggatatgatttacacttttaaaaaggtcactctgttctatggagcataatggactgtaggggccagagtggaggcagggaaagagtctgctctcagagtaaagtaggtgagaggtaatgggggtttagactagggtgggggaagtsaaggagatgagtaatcccattcagtcggtagtttggagagagagccaataggatgagctcatggattaaatgtggcaggggtgaggatgaataaaagggaagaaacaaaaatcgatcccaggttttaaggttttgtggactaagcaacgggttggggagtggtggtagttactgtatccctggaaactgttggaaatctaaagttcattttgagatacttctaaggcatccaagtattgaactggctattggttacctgcatctggagctcagaaaagtcagaattaaaacaatgattggggaaggttgttcgcatttagatggcatttaagtcattagtatgggtcagatgacccagagacccagctgctgaggacagaggctgacagcgctcctcctgcttaagaggagaaatcagctaaggagaccaagggagtgcagccgggaggcaagagaaagaacaggaggtatagtgtgctggaaacctgtgaaggaaaactgcaggaaggaggagtgggtgccggtgctacatactgtagaaaaatcacatacaatgaggaacagaaaagggaccactgcatatggcaaaatgaaagctgttagtgaccttacaagagccattttcgtggccaggttggaacagaacccagttgaagtggactagggagagaacaggatgtgataaaggagagtggtgagtccactgcttcagggatctagcctggacctgtggtagagctacaggtagtcggcctgggccctgcgtggcctggtctctgcgtggtgacacagaggggtgttggagaagaggctgggaagtgaccatagaaccacataactcctgttgttgcatcggggcctgcatgaggactgtgtgagtggtgagtggtgctggggcatctgtgggagggtccgagacccccaagggggtagaagtctatcctggcaatgaccctgtcattgttacttgaagctagtaagggaagagcccttggttggctagagttccagtgaagggctcccaggcagcctcttccttgccttgtggggtgtgccagggttgtgtgttgaagcrggggacctccctcctgcacggccatcatgttgcctttgcctttcgtaacaaatgcctggcccctggatccctcttctgtgagtgaaagagaaaaattcccttccaaatcgttaaaggttgatagggaaatgccaaagattgatagggaatattcctctctggaatattctctgggccttgagtaatttctactccaccttccctgaactcatgagtttgggttaaaaacacatacacacaggtatccaaaaatgtggatgggtaggactggctgtcacttaggagtgggtggttctatttactgagatgaggaagcctgggggagaagtgggtttagagagatgtgagttgggacaacgcttggcccagagtagaaactcactatttctggaatgaaagaatgaatgaaatgtgggtaggcacaggcagggccgtgggaattgagcagagtgtgcatcagggcacagtgaggtggaaggacgtgctgcaaacatccaagaccagcagagacccgggctttggtgctgtacatgtgctgtgaggttggcgttgctggtgtgagccacctccgggtgtgtgtgccccgctcagctgtgtacactctgctcaggtatgtaccctgcacagatgtgtgtgccctgcaaagacgtgtgcaccctgctcgtgtgcgtactctgcccaggtgtatgtgccctgcacaggtgtgtctacattgcttaggtgtgtgtgtcctacataggtgtgtgtcctctgcccaggtgtgtgtgccctacacaggtgtgtgtgctctgcacaggtatgtgtacaatgctcaggtgtgtgtgcattttgctcgggtgtgtgtgccctgctcagctatgtgtgccctgcacagatgtgtgaacatcgctcaggtgtatgtaccctgctcacgtgtgtgtacactgctcaggtgtgtgtgcattttgctcgggtgtgtgtgccctgctcagctgtgtgtgccctgcacagatgtgtgaacatygctcaggtgtrtgtrccctgctcasrtgtgtgtacactgctcaggtgtgtgtgcattttgctcgggtgtgtgtgccctgctcagctgtgtgtgccctgcwcagatgtgtgaacattgctcaggtgtgtgtgccctgctcaggtgtgtgtacactgctcrggtgtgtgtgcattttgctcgggtgtgtgtgccctgctcagctgtgtgtgccctgcacagatgtgtgaacattgctcaggtgtgtgtgcactgctcaggtgtgtgtgcattttgctcgggtgtgtgtgccctgctcagctgtgtgtgccctgcacagatgtgtgtacactgctcaggtgtatgtgccctgctaaggtgtgtgtgctctgcacaggtgtgtgtgccctgcaccagtgtgcgtacattgcttaggtgtgtgtgctctgctcagttgtatatgccttgctcaggtgttcatgccctgcttgggtgttaaggcgaaactgctgatttccgactacactttaagtgcaaacatggctatccatgaagaaacacagaagaagcactgttaaaaagcaaagtgcctgagtgctagttatatttgtstcactaatataccctgtgacctcagagagaaaaccactccratctcagaacctctatttcctcatctttgaaatgagaagaatgccacctgcccttcctatcccacaagggctattgtgaggcgtacacaaggtctcattcatatgagttggagacatgtggatgcttctctgtatgattttaggtatgaatgtaagtttgaatctgtgcatatgtgagtagagagaatgctcatgcttgtgtgtgtgagagaatccttccacgtacgtacactcttacacacatgcttctggatagctggtatttgaatatttgagaatttgcaaatagatggtgtgatgtgcttttcctagcagatgtgcatgctgcctgtctaaagcgtacgcttctacttctgtatctacccatgcttcttggctctcccgcccccacctgtgccttgttgcattgcaggtcactgatgctgagggttgtattcagttgaggagctcacaggcttctccacaatgatgtctgcatcagtgggtgctcctgggtggccacacacatgtgcactgtgcatcttccagacacccagagtgggcctcagaccaactgcctctgctccctcagtcccacccttgtgtggggctcttctgcagacatgtgaaagatggcagttgagggggattaatttgcctagcatgttctccgtgggtgggcatcagctttatcaggaaaggatcagcatttgccaacatcccaggtccaagcagggcccactgggctggactgagttcatcaggccagtaactggggcaggctcactgcaaggatagcccagatgtgttgtcctctagctgagcattgaacctgtgctgacagcttatttaccaggcatcctgtctgtttttgcgggaacagttcatacgttgccattctaaccttgtgtttgtaaggacacaacatgcatatggaagagagttttctctgtacaaggctaagaaggtcaatactctgctctgcccaggtgaacatagaacagggtctatggccagggcctctgcgttgctcaaaggcagaggtcactgctcacatcctggagtacatggatggtggcctacggaaagatggtgctgcctctgaccatggaccacttsgtagccttgacatcgtgcatggcagagcacttgctccgctgcatgttttgtgaagctgggtcaggttctgctatgggagtcatgagctggggagccacacccaatgaatgtgctatgctagccctagaaatgactcgggggaggggaagaaaactactcagcaacatctacaggatttccaaaataggaatctgaaggatgtgtaggtggaagtttgcgtgcctgtgaggcatggtgtttgagcatctggagctgtggatcatgtgaaatggcataacctgtgtgcctctgcatgtgtgcttcaaaaactagatccatgtatttgcacatagcaaggaatcgaaagtcactccattggagaatcgaatgtggggagtctacagaaggcaagcaggcacatggagacctgatggccacacagaggactccctgtctccctctggaaatctgctggtggctgtggggcttgaggttcctagaggttggggtgaactgaacctgtccatttttcttccccagaagagacagaaggagaagacaccacatgtcgatgtgggagccacgcagcagccacctgtatgtgtgtaccagtttgcgtgtttgtgagtggttaygtgtgggcgtgggacaatgtgtcattgtccttgccatagacaaagtggcactgggtgtgcatgtcagtgtgtggcttggtgtgygtgtgtgtgttccgttcacatgatctgtggatatgccctctgcacctctcaacatttgcttatatcagcgtgtgtctacctttgtgaactgtgtgtttttcgctcttcagtctggcctgtgagtgggtatatgttgtgttagtgttggtgggtatacctctcacgtaggtagttgtgtacagctatgtgtgggcctcagcgaggatgcgtgtgggtacatgcgcgtgtccccttcacagtttgtaggtgtgcgcccacaggcacaggctcagggaggaggtaacttcccctccgcccagcgagccctctcccatgtgctctcctgcacttgtcatgttcatgatttccygctgccccatgaatgctcctctaggcccctgggctgaaatgctcgatcgcagttttgagtatgagctgctggtggtctctgcacttagccttctctggcttttattagctattgtggaagagactcctagcactcttacttttgagggtgatatcaagactttttgtaataagtctgcctggcactcttcttacccttcaatggtatctgaccatttcagccctcattatcccgggctgtaacctgagagggaagggagatgagggggagaggaggaggaaagacctttgaccttgaatcaagggccgttgagtgtgtwcaagcagatgccccgaaagcaaggagagcaggggagtgaagacgtggtaagcctgtggatggctgccccagcaggccctggggacttggaactcctcccagggttgatgcctacccagccctcagctactacaaagcagggattggagcagaaagtacctgggctgggaggcacctgcctgatgagctcctcacgtgtggcccgcctgctcctcgcatctttctgtgcttcctgtctgcaggtcctgggcactcccatttgccccyaccatgtgtcctgccctctcacatggcccctgtggccaccctccctgcctgcagcttctgggctctgaccgcggccctgccctttccccttggcaggagggagcggaggcgccggcaccacatgtccgtgtgggagcagcgtaccagccagctgaggaagcacatgcagatgtccagccaggaggccctcaacagagaggaggcgccgaccatgaacccgctcaaccccctcaacccgctcagctccctcaacccgctcaatgcccaccccagcctttatcggcgacccagggccattgagggcctggccctgggcctggccctggagaagttcgaggaggagcgcatcagccgtggggggtccctcaagggggawggaggggaccgatccagtgccctggacaaccagaggacccctttgtccctgggccagcgggagccaccatggctggccaggccctgtcatggaaactgtgacccgactcagcaggaggcagggggaggagaggctgtggtgacctttgaggaccgggccaggcacaggcagagccaacggcgcagccggcatcgccgcgtcaggacagaaggcaaggagtcctcttcagcctcccggagcaggtctgccagccaggaacgcagtctggatgaagccatgcccactgaaggggagaaggaccatgagctcaggggcaaccatggtgccaaggagccaacgatccaagaagagagagcccaggatttaaggaggtgagtgagtcacagggctcccagatggatggcacacaggctgctgttaggtgttcctcaatataagcctttctgagctccagtttcttctcctattataaaatggaaatgatgctgacacacactttgtgaggtatgaataaatataacaggcagtgggctctgtccccccaaaaacgagggcctgttggaagtgggtcgtggatagaaggatgggaataaggcagtggccatggcttgtgggtcttagcacctctctgcctgtctggttggggtggaaggcagtggtggccttgtaccttccaggctgcctgagcttccccgccttccccttgtgccaggcacacctgccatttggggacagcgtctgagcaccagctctctcttcctctctcttcacaggaccaacagtctgatggtgtccagaggctccgggctggcaggaggccttgatgaggctgacacccccctagtcctgccccatcctgagctggaagtggggaagcacgtggtgctgacggagcaggagccagaaggcagcagtgagcaggccctgctggggaatgtgcagctagacatgggccgggtcatcagccagagcgagcctgacctctcctgcatcacggccaacacggacaaggccaccaccgagagcaccagcgtcaccgtcgccatccccgacgtggaccccttggtggactcaaccgtggtgcacagtgagagcacagtccctgttcccctccacccccaactcctatcccatctggggctggggccatgacaataaagccacatggaaagcaccaccaggaggagtaaatcatccttcaagaagtaaaaatgagtggcggttttctcccagtgtgcagaacaaaaataagctagcgttctcttcatcttaaatttttcccataaaatttccccaggcttgttcctgtgaccaccctcaagtcttcagagtgatcacttgtgactttgtgcccagttagatattcagctgtttgctttggtgcatgaatatttgatggtgttgtctggggtctcccaggtgctctgctgccctggcaagttagggagcctctgatggagtggaccatggctctgckcactgagtgatcttggaaaaatctctgcatctcttgaggcctcagtttgtcatctgtaaagtgagagcattgtactagatgatctctgaggcctttccctgtactaacattttatatgattctattgctcttatcaactctttttctcctaggagcttttagccacaagttctccccatcacagttcccttaggcaacaaatgttaatcaatggtgtcctaaagggaaacacagccaaaaaaaaaagcacttccccacccctgccctgaccctacatcccatccctgtattcatcctaccccttatccttgccctgaccccataccccatccctgccctgaccccacagctcatccctgcattatgaattccacaccttatccttgccctgaccccataccccatccctgccctgaccccacacctcatccctgcattatgaattctacaccctatccttgccctgaccccacaccccatccctgcgctgaccccacacctcatccctgcattatgaattccacaccctacccttgccctgaccccatacccgatccctgccctgaccccacacctcatccctgcattatgaattccacaccctatccttgccctgaccccataccccatccctgccctgaccccacacctcatccctgcattatgaattccacaccctatccttgccctgaccccacaccccatccctgcgctgaccccacacctcatccctgcattatgaattccacaccctatccttgccctgaccccataccccatccctgctctggcctcatgatctctgtgcattaatcccacctgctgccccgtgatcactgaattgtgaccacaggattccagccttgctgttttcctctactttttctgtatttactctttcacatgaaaatcttttccctccctgtttttctttcttccatggctccctctccatttccgcatcttctctatagtcaacgtgccactgctacttcagaaagtgcaatctcccatgtccagtgcatgcttcagttgacttgggcatgtctcaggatcccagacccacagctcttttggtgtttgtttgctttaatacataagaagtgttttgggccttcttttatgagaaagaacataaagctttactctccctctgttgtaattccagagctagtctttggtcttggtcataggtaaaagcatgtgataggaaggcttttggatacttcttatgacttactctttaggaggcctgggcatgggccaggaccaccgaggtccactgctgacacagggttccagggtggagtcattcaatgagcagggagcagtgggcgagggtgactggggccctttccccactgtgacagcttcagcctcctgccagtttaacctacaccgtgtcttgagtatggaaacagagcagcagctgagagctcccctcgacctctggctccttcgtcctcccaatccttggatgcagtcatggacctatactcacatgaatattgcattctcatttctacattaaccatggccgagaaaagcacagccagaaagcctgctgcaaacagaatcatgatttcttgaaatcttccattgcagggtgattcaatgaaaggctataggattttgaattgggaacccatactagctgtatgaccttaggaatggtacttaaattgctagaactttagttttcccatctgtatcatgggagtaataatacatgccactgagggtatacccctcagtgggaaaattcagtaagtgagcatgtacaaagaatccagagtttagatataaaatctaaaccttgtgaattttataacagaaacatcatgttgtttatcagactgtaaaagttcaaccttaaaagtggaaacatgatcatggtcatttatatgacataaaaggttatttctcataacatttggggagggtaaaaataagaagagaagaggagtttaactcagtgtcaggtagtaaatacccccagtgcctgcagggcaccttgttagggacatccctggagccctttctcctcctctcctttcatccccaactaaacacaaatggtgccattttcacatgcctcatgatttctgaagatttcaacrtgttcctcttgcagttagcaacaagacggatggggaagccagtcccttgaaggaggcagagatcagagaggatgaggaggaggtggagaagaagaagcagaagaaggagaagcgtgagacaggcaaagccatggtgccccacagctcaatgttcatcttcagcaccaccaacccgtaagccaccctcgcgttgctccctctttagtgctagggtaaacggccaggtgtgaggcagggcagggtgaaggggagaggaaggatgggggcccagccatcttcttaagccttcctggtggagcatggccagacattgagcatctggggtgccccctaagtgaggtgggttggtaagttagtcagcctctgaactctgtgcccatagctgwaagagtaacatcgacaggagaacatgagaaatgtcattggaaaggaactctttaccagtctttggtcagtaggtagtgtggagggaggaaggaaatctacttgagattttgccaccaaatattccagaagtggatagagccaagaatgtggagcctagaatgaccagatcacctgttggagttgagaattttggtcacactgctctacatgtggagttttgaaatggtctgctctgagcatgctactcagagcagaggcagggacatgaagtgggggtgacagagcggagtctggaaggttagattcaggaaagatggaatttgggaagagcgttccagcagggctctgggaagggagcaacctgagttaaggcatgtgagccatccatggctagaatgcagaatatagaatacagttrctttaaccagaataacctggggctcatgaaaactcattactgctttcgtcaggaattttagaatcaagatctctttttatgttttttggttctttgtaatttccttgggatgtcccagtttcctttcagtgggagagtagacatcgagatacagcagagggtgctatgcagctgccctgagttggtaggctgatgctggctgctccccatggctcagacgtgtctgtggataatgtatcttggcttgcgtgctgcagcctctaaccaatctgattaccttcctccactggggctttaaatcaagggtggtggctgagaaattaaattgctctccctggcggcttcctttgrcaagggcctggctgtctggaaggggccaatatgtgtatgtgggagtgaggagtaagggcatgggcgtggtggggagtgggccagctcagccatgcccactgcccgcaggatccggagggcctgccactacatygtgaacctgcgctactttgagatgtgcatcctcctggtgattgcagccagcagcatcgccctggcggcagaggaccccgtcctgaccaactcggagcgcaacaaagtgggtacacaggggccatgtgccagcctctgtagtgctctggtgctcaccccatcccagcactggaggtgaaccgagatgrtagcaaggtttctggggaatgagcaagggttggaaattgtccactcctgttcctcagggcgaagtatgaaccattcccagacaagccccttcttagcccaacatactacaaggctctgccccaaaccggccagggctctgcagggctctgcagccacccatgggcttggatgtgggtctaatatagggtcatggatggtgtgtgtgaagctggcagctgcagctccaccacagggggccaaggcctctcctggggtcccacgggtatgtgtcaggagacatgagggacgcgaggaggacaggagctgacaaggatttcaggtcccgagcctgaactaagggacaggtatgtgggcaattcagacccaaaatgctaagttctggccaacgagagggagcagccaaggagtggccactgggtcacatggctccagcagggcccatgcccctccttctggcatttctctctcagtccagctagtggctctaattccaagcctttgttctgagggtgcagtgggtgagggccagggtgggcrtgcacgagtgcatgtgtcctggcaggtgggagctcatgtagtagcctgttggccacacatggtcatttccttccaccatatgtgtctttcaggtcctgaggtattttgactatgtgttcacgggcgtgttcacctttgagatggttataaaggtaaaaacttctagagaaaacctgggctcttgggtttagatgggtcacctgtctgctccttaggctagagcccttcctcagtgttaccacctaccagccaatggcagccctcagtagagcttctgccgccccttctctggcctcagaatcctgaagaaatctgtctcagcaagacacggctgcgtggatgtgtttgtactgctgcaggcctgtggacatggcccaagtaggaggcaggcaacagatgtgcagacagggttggggcctgcactcccctccccagtgcttgtcttggctgagcctgggtgtgtgccaaggcaaagggctaggtagagatgagtcttcctgggcttcatctagtcccagccaccacaacactccatagtctgtcttgttcccagcctcatccatccaggattttacccatctgtgcatatgtggcaatgcccagtgctctgagccataaatgaaaggaggaatgtgtcagggttctgtgacaaccaaggagtctagtgaaccctgggtgactatgagatgggggcctcaggactcagttatgtggagaaagcctgctggacctaacctctcattctccaggtcctagcatagggttggttgtggagacagtggcagtgggggcactgccatgatgaacagagctcaggtcaagtgttgcccacactttcttggctcactgtggctgttcatatccttctgcagatgatagaccaaggcttgatcctgcaggatgggtcctacttccgagacttgtggaacatcctggactttgtggtggtcgttggcgcattggtggcctttgctctggcgtaagtgactcttttcatatttgattcccttccttcccctcttcctggagactccagttgatttgaagccctttccagaaatgcaacatgcagggtgatgccaaagaatgcccccgctggaaatctgctccccagtcgccccsagcagagctcctgagcgccttgcagctccagctcacgtgacctgagtggcagaacgggggaagcaggagtagggagcgtcaggagggagaagtcagaggccctaggaattcctttcctagagatgagtaagcatgggcaggcactcacagtgtggacagtgtttccatgcattcagcaatggacccaggaacagcttatgggccctttctttcttgagtgtgtcaatcaaggaagcagcttgaaagaaagatgcagagggtagagcaaagttgaggatcacggaatcctaggcatggtgaggttttctattcatagcaggtgtaaacgagagctcttccagggatgccagaaccatgcttttgcacaaacctaataatatgtgtaatctccaaaaggaaaggctttccaaactttccttgataacatacctaggaaaacagtcttaaaccattcaggcaacaaaatcatgttcataatatttgtgggatttttttcccccctgcacatggatccagctctagccagttttcaatcacattctgacatttcctgtggaatctagccaaggaaagggctcttctagccctcctgggattaactaggaaatgggatgctttcagggcctttttcctaacccggtgtatagagtgtcccagtaggatgaatgacagcctcagggctctgtctgtaccttgttcrccctgagcagcttcagcctcttccaggaggcacaacagaattctcagagccatccctcaagtctctctgagtacaagtggaagcctcatctttaggctaagcaaggctagctacactgtgtagtgaggcaggagagctttcaggagcttctgtcattgatggcagctgcaaaaggaacacagtatcttcatacgtttacccttctgagtggttttccctccaagggtttgcccttccaagtgtttagaaagagatcacccttggaagggtttgcccttctaaatgtttagaaacacagggaagctgacagtgcttctccccaagcttctcttcaagcactgtcagctgctgtctcttatcctttctggcagaaaaacaggtgggataaaaattaccagatgtttctcaagtggcctggtgggggtggggatagtggagggctctctctctcttaaggagaggtacaagatacactcccagctgtgctaggagtgtaggatctcccagaccctggaactggactgtgtccactgcttcctcagccatgagagacccttcaaaagaaaaccacattgagcatagtttgtgactctaaaatgggctggtgatcaaggtaattccagtgtcccttgtccccttgtgcacatgttaattccattgtgtgcagtcacctttgtcccccacaaaaagaaagctttctgtcacatgtggctggactgttcttgaggaaattttacagaagcatggggtattttctcaagcatctgggccctgtctggattctcatggtgcaatgaaaggaaaggcagctctggctccaaaagagggacttccagctcctcttccgtcttcttggaaagaaggattaaagtctgcctttgccctaaggagacccaccttttttgttagagataaatattatccttaggtttttaaaaggtcaagttccctttcattttactaattcatttgcatagattattcactgtatcattcttcttattttgatctctaaaaatcatgtgtctctctttgaagtataaaggacaaagagatagaagcatataggaaagaacccaycccatctttaggaagaacagagcccactggcataacaggacagagtggcaagaaaggttgggctgtggaaccagacgggctcttgtttgaatcccagcccctctactttccagctttgtgtccttgagccacacagcaaaatattaaccctcctaacctcagttctcatctctgaaatgcagataaaataatgtgtgtaaagtgcttaggacggggcctgatgtagtgtgaacagtcaatacatgttgattcccctcctcatccttccattctcttatcacatcatgaaatccaaatataggagsaagtacatattgatgcacaatgtatacagatagatgtgtgcaggctggcccaagacctagttgttttatacagacacaccccccttgcctatgcccgtgtgcctggtaaccaggctggtgtgttggtgccagtgtgggaggaggtgtgttttagagggagctcctgcatgcctgcccattgtccacagtccagacatctctcctgagacccagagcagtgatgatgtgcagtagagctgtcatctgtcttgttctttctttgtgccctttgaaacatggcggtggtggctttggcgctggtggcaggggaagccttaacrgccccggagctgaagcctctctgttggtcctcagaccaggtacagtgcaggggcccccaggaaccccctcgttctggggtccacacttatgtgatgtattgagagttatgatccatcacttgcttttagtcatgttacttcttgaactctctcttcattttctctgaaacatagatgatacttgctcacccttctccatccattttctcttttgccttcaacttcccaagcttgccatgcccattccctctcccctttctccgctcatggagcaggttcccactccccctcctttggccttcgtcacatttgctgagggaggtccaggtaatgctttctctcactcatgcacccatgctttctaactctgccctgttcctttcctcattaatcgtaccagagaattcagctctcccatcactttgatggggttagccagagtcccacctgccagcagagagagggcctggcctggggcagagagtgaaagaagtcactgagcctatattcctcatggtcaggggctcaggccagcagaaagccaaatgtggggttgtctgcaggcttgtcaagtatctctctccttgtgtttacaactttcgttatcatatcccatatatttgccccataatgtccaccattcaaataaccttawtcctgtcccagtctctttctgcccttcttgaaattgaaccatgacttagtgaggaggcttctgtgaagcctattgcttaataaacttgagctatggtggttgccatggtagcatctttctgtggctcctcagaaaccagggctgacatggcattccttccaccacccagccagagccttctcagaccctggcccaactcccaggagcaaagcccctcaccgagtsgggggagtgacctctagctgaattctcaaacaaagctgtggtgtcccctgagccctcctgccgaggcgtgtgcctgccaccatgtatgttttctacaagcatatatgttgtttatgcagtggctgaagagaagactgttctccacagctgcatacatcaagttaagggaacgtttataatgtaaasctggaaaattccattagggaactttattgacttttgaggaggaagggaaggggattttttcattkgtttatttttcttcttggatttattttaagtgtgggcagagcagtggataaaaaaaataaatggaaagatacccacattgcaacttttctgttctttccaattcacttttacgttataaggcatttataagaacactcaggtctccttccttaagcccaccgtccctgcagggaggtgggcagagttttggcaaaggttgggttcagggcttcgttattccrctgccctgacaacacccgctttctgggccacatggagacagagtgtttgctgactataaatgtccagagctgtgccttctgtactytgaggtctcaagaaaagtctggtgagtggctggatctatgaaaccttcctcttttatctttttctttccaatgaagagggattcttttgtgtgatttcatgtgaaaggaccagaaaccgctttgtctagtttccacacaccctgttgccatcgctgctgcttcccagactcctgcatggaaggcaaagatggttacagccttggcatttctggggatctgcacatgaggcacattcccctgctttgggggaccctgctccccaaccaaagtcagctgccttgtagggaggtcacrtaaccactacacagattacattcatgaacctcacagaaccctcatrtttcatgtgtttcatgtctagtgaagtgacttgggcaaacaggtgggcagggacagcatctctggagaaatgtaggagaggaccaggacacctgtgcgtgtgtgtctttctgtgtgtgacacctgcactccaacccaggactctcaccctctccatttccactgcyctrcagcacgttacttgactagctcgattcacatgagcaggtgagcgctcctggattggattctaagtagtcatctcacagcttataattgatcgtcagcacagatggtttaatagaaaaataactagcaattctgctcccatctcctcccccacctcrgaatttaccatggcccgtgcatcagtcagttacacaggctctctggcggctgacgccaaagcttcccattgccatttgctgttgtagcagggcatggggtgaggtcaggactccctggcactcaggagatttggctcacagccgcacttggcctttcattattcagtccttagccagaaacgaaaaacatgagtcaatctgcctcttgatgccagaaggaactggagttcccacattagcttttattacattcttttcattgaagtatgtcactttcctgacacttgacactctgccctagtcactgagatggataaggtccattgaatgcattcagcagtagctgtagcagcagagttatatacacaggcatggacaattttagatttggaaggatcctaaggagccacataatatgttcctctgggagctgggcgtggtggctcatgcctgtaaccccaacgagtcgggaggctgaggtgggaggattgtttaaggctgggagtttgagaatatggtcctctggttccggatttgcttgtgggattttgtgttttagaaggtgagaatgtgcacatgtaagaaagaggtggctattcagcaccaaaatgctcgtacacactcacgctcagcacagcatagaaacaacagacaaacatttcaccctaaacctggctgtttctttctcctattcttcactacctgcctgtgtctgaggcagtcccctcaaacctccagcgttgcctatgggtcttctttcttgacagaacttccctcttttcaaactgaaaggggagtcttccaaaggaagcagtgactgcacattaatcttggaggcaaaaaaagtggacgaagtcctgcttcatgcaaagaagacccatttaccactgagccagacaggycatccagtgcccctgttctgtggaagagaacgaaggattaaaattaaatttagccgtcaagtagcccattaactgtggatttaggaggccagctgaaaaggaattggaaatttccaactgtaagcagataggaggattttgtttcctgacactccagtttaaaagtcacctcaagaatgactacatctgatttttgtgcccagacaaggacactaaggatgatcaatrcccatggacttttgaggtgcctactactatatcatagctgccttgaaaatggagtttgggagggagtaaggagggacagagtggcagccacatggagggagtgagtgtctgaaaggagataagtcctcagtctacctactcttggcattaagtctcagcatgcatattttttagtgaacgctggaaaatgtgttgtctgctgcatgtgacattggtactgctgaggaactgcctgtagaatattcactttgagacctttatcttatggaggcaatgggtgtgaacacccaagtattttttttttttttaattaacagcatgaaattgggagatggttggttgtaaatgggatctcagcccgtggccacagacccaagcaaaatgaaatgatccaatcagggaacactgccccatccacacggtaaccaacaaccaactagacccagatataaaatgcaccctgtgagccttcacaaccatgggaagagcccagtactgctggattagtggaaactcctcatagtgccctccagatttaaaagtagattttagagtaacttgagtcggaagacttcataatgggacttggggaccatcaacacagatcatgccagccaccttcctaatccacatgcacaggggcacagcctagcatttcaaattagtcttcagtgggacaagtgtattgggtggacttccaccagctccaaggccttcttagaaagatcagcagatgaggtgtctttgggtatgtttagaataagacaaaagagacaactaaatccactgttcaccagattgaataataaaactgctaggagacagttagatgctctgctctctcctgctgcttctcagtgtttggacaaaaacacctgccagttggagtatggtgctgtgtatagcaaaggagaaagcttgcaaaaggctctcrggagtgtgtgtgaggagctcgttgaggtccatgtgcaagrgggaaaggattatgcaccacttagcatagagctagtgctctggtcacatgacaaagaaagatggcagaataacaatggattgagggttcgagggtgaccccaagaaatgctgaggcatggaccacgaggaaaaataaaccccaaatggtagccgctaagcagtgacaacgtcaaagtggtaaatttaaaattttcacagaagcagatgaacatatccttatctgcagatcctagagagacaggcactgccagtgcaaaaggggaaacttccccatggggtctttagaatttttaaagtgctttcacactctttattttatttatcaccgaacagtcctgttttacagttgagaagtggattgcctgaggtttgactagtctgactcatttgactagtaaatagcaaagccagttcttgagcaaccttggtgttctgatttgaagttcagtgttgtctccattatgttaagcgcccttctacacatcatgttctagttagctccaagcaattaacccctgtaagctaagagcagtggcttggtatagatctctcctcaacctacagatccttctgtctctacctggtgacagacaagacctatgggtagatggagaaggtcatccctgaacttgtccatcttgttgtttcatctgtaactttttttttcctaggaaccctcatagaccctaaactgattacagggaggggagtgtgatagcttagtatttgagatcaggaagtacttggtcttttactgtttccttctttggttaaaacgctccagtggttcccatttgaaaggcactctaacatcacaaataagagcatagatttcagagtcaggcacatttaggcctgaatcccagcactattattaaccgccttaactttgaacctctgcttcttcatctgtaaatggggattcaaaataatattttggtcctataagcattaaataaggtaaaatgtatttaatgtctgctatagtgccaaggacttagtaattgtataataaatgatagttattatttcctaccaaataatagtccagacacattagtgagacactcgaggctcctcacagcatgacccctccatctacctttcactcctgcgagcctggccattccctgaggcaagagattccttcagatccctgagctattccccgctcatggggtagggcagaaggccatggcacttaaaggacagaagggttctttagaacctgatgtccctgctctgccctcatgggaggagaatcagttcctggcagaaatcaacttgagagcatgtcctttgagaagagggggctgggaggtgaagagcgggattacattgaatgatgagtaattacacatgaaagatctggagggcagcttgacaattgagctggaaaattctcgtcttttactgatgaaacaagaaaaatctgtcatttttttttttttttttttactggagagcagccaggaacttaccaaataaatagaaaataaatggtaaaatrtgtggcccaattgagtcccaattaaagtgagaccagtgcatcctagtgtgtggaattgtccttagattttaacattagagtcaatttttgaacctgatagaaattttattaatgaggcagtgtaaaaatatctgattataatttagtatcagagactagcaaagtgttatcaaacagttacatttaaatgatttgtaaaatgcacgtgaattatttcctaaacaatgtgcctcaattaaggtacttgaagagctcatccttttagtttggtgaaatgtcttccttgcaatcttgttggctttgataatggcttaaatcactcttgtatgtatggatttgggagcagtactttggcctagtccatgtgtaaattatattttaactaatgrggactaaagtgttgaggcgtttcttgactccagggctttgttattcagtactcttttcatttcaaatggcaattttaaaatcagttaaatcttgcccctgttaacaaaactgaggatgaaagcatatttttctgcagctattccaattcatagcttttcaatggctcctctgcagtaagagacctgatgaaagatgcgtagagcaatgactaattttatttttttttattttacttttggcctgtgtctgattgctatccttggctcagacctgtgggagttaggatgtgacaaatagcccccccagtggtttggcagccacgttcagctgttaagattagagtgtaccattaaggaaccctgttttccaaaacaagagacaatggtgagtttgcattataacatgccttatatggtatatgtggtaatacaatgaattataccatgatgctttactaggattctggggggaaattaattcaagagagcaaattatatcctttatccaggtgtgtgggaggagcaggaaatattgggccctcccgcagaagaygcatgtctatgagcatgacctctgagaaccttttcagatgctacaggatagaaaggtctccgagataaggacttgagctaagcagaaggcagaagcttggggtgtgtgatcctagatcacctgcccatatattgatctcccaccctattcttacatcttagagatatgaaagattatcccttagttcttccttaagacaaatgtagcctggggaaagggaaacctttgtggttattttggtaaattttttaattgatttcatttttmctatggcagcttgcagttatacttttattaatgtgcttgtttacttgaggtctatcttccctactagactaggtaagtttcaaaaggttggcaacctcatttgttcacaactgtatatccagtatgcagaacagtgcctgacatatattaaggactccacagatgcttggtatatggatgaataaagatgtgtttggctgacctaccatatgccctgtcttatatgtgagaagatgctggggaagatatttctgtcctctgaacatttagaggttatcacattaaggatttaaggtttataaggccttgggtctaattcccaagtcatgattcatttggcatttatagtgaaaattaatttaattttgaatatgggatcatttgttgagtaaaataaccattagaagtctttgcttgtgacatacagtagtggaacataggtttgccatacgttggcaaaaaataagaaaggaaagaaaaaaagtaaccttcatcacaatgtccaactaagaaccaaagcctgaattatgagcacttcttcttagcagcaggccaggatagggaatcatgagatgcaggttcacctatgtttctaaactcactcagtgaatgatcttaggcaaggcacttcctcctggggcctcagtttcctgtgcagttgggtggatttcagggatctcttccagctcagaaattcactgtgctgtttgacagaaccttgaactaaaacctgctgatgcagagccttagtggttaagagcaagagctttgatcatcatacatgcttgggttcatgtcccagctctgccagctgatgtcgggcactcaacctctctgaatctcttctgtgaaatggggatagtgattcctatgtgctaaagttaggaggtttaaataaagatttgcactaaaattgcttagcacagagtctggcccagaataaataaatattcaaaaaatttagaagttgtcattatttctatcttgaagatatttatgccctgacttattttaaatgcctcaccagtagaactgggatgatttttcaccttcaagctgcacagtatgctcacaatggactggcggtcatttaatttatcaaaaggcaaactttggtgtgacatcatgatcttgacagacaaatgcctccctcccttatttcaagttggtttaatggtgttgctcctctgagcttctaagagacatcagtgagtctctctctgagtggttgcgtgtccctctttagatgaaaccctttataagcataactgtgccagtgtgtgagagaatttctggcccagagtgggcatagttcctgcagcctggtttcttataaattcactggaaacagagtttgtctgaagactgcataggaaatgaaagtaaacgcctgcacttagaaaactgcagttaaaccagactccatggaaataacacacaatacccagaagtctatgtagaattgtcccttgtgctggcagagggccttcgcccctgcaggctgggacagtggcaatggagcaaatggtgtgctggcccttcctttcacaaaggtgtggacactctaagtgccaaggctgtgggtggggtcccctgggcctgtgctgctctgattccctatcattgtagggttctcttttctccctgaagtgttctgactgtctttcttctctctaccccaaccccatttttttgttttgttttattttgattttctactgctctctgattggatcctccataggaacgctttggggtaaatatgttcgattatctttgaagtaaacgatacaaggaatgagttggaggagygagaaagtatggttgggaggggaggggctcacgcactgagaaaagagtggtcagtttttatttatatccaagggatcaaaattaggagtcaccaagccttcttgggaaatggtcattcttattggtttggatatgtattcggctcatatgttgcctcttttaggtatgtagacagatgagcctaatgcagtgaaatcgtttgtaaaacatgccaaagtctctggatgctaaagaccacatcagtgcaaggcttttggattatttatattcagatctgggattgaataaaagtgacttgtaggtcatggcctataatcattaagagagtcttaaaataaacattctgggcaaagtcagcattccttcaattcgattaaatatcttttggcctcgttttctgtgaaagaatggatggacttttatctccctgtcaggggggtggggtaggggggtaggtatcgcaggaaggtcagggggaaagcagccggaagccttgcagttcccacctgatgttctggaccccatttcctcagattgttggtgtaagagtaatctgggtcaacatgaagaaagagacagagcctgactccactatttagagtcttgttttccaccatttgtgtgttttataaatgacaactatttgaattgaatgcaaatatctcaggggatsaacagagaagaaagagaaatgcaaatgtatttgttcattttattcctaaaaataaaaagagaaacatactgtcactattaggagtaaacatttccaagaggctgactagggaggatcaatagctgtagggccaggataaaggtaggctgggcctgcagtttgggcctcctccagttgagtggctctctgcagcctgtgctaggtgcacaccatctgcaatggaagggactgcgggaacagccagccacacagaggtactggggtgtgagccaaggtcctagctagaagcctgcatgacatgctttctctggaacacgtggcccagtgagagtgtcatgtctgccaccctgcctcaccttgctgtctcctgaactaatgaactgtgcagcggtgacaaacccagattaagtctagtgccctgatgagacttgctctcaactgtgggttcatcaattcagcgaatatcatttgagaacctatcatttgacaagcactggattaggcacagtagggatctgaagtgggctactgctcacgttccctagttgatgtgtcttccgttttcattgtgccagtgtggtaatcagcagcattagactggtagttagggaaggaagtgtttattaacatatgtgcatggatgcctctgtgtgcctgtatgttcctctgtgtgtgtatatatgagtgtgtacgtgcatgtggatgtgtgttcatgcgtgcacactgggaagtgatttgagaatattcctgaagcatttttcgcaggatgtccctggagtcaaatctgactcagtttctggcttcttgcctccatctctcccatacrtctctccccttttagcctgttgttactaatgccatartttgaatgtcatttttatttctcccccattccatatgattccctgggggyctctcccctgcagaaccaacaaaggacgggacatcaagaccatcaagtctctgcgggtgctccgagttctaaggccactgaaaaccatcaagcgcttgcccaagctcaaggtagtgtttacagagtttgttcccatcaaatccccttctcccatcttctctctttagccatggctggcctgcctttggagaatttgttctgggaatattcctttttctcacacggatatcgaagttcttttcatctgcckgagctaaaggtcttagtttcaaaggaaaataaccaacatcccaagaaatctataagaaagctttttcttttaagttcagacccagatggtgtcttctctccggtgtgatatgtcatccmagagggaatcctgtgtggctttgtcctggggcctcctatgtctatgtccccagtgcagacccagaacaccagaatggaagcaacgggatccctctgtgtgttctggtctgcatattttttaaggccgagtatcctgggacattttctttttcttataactcaagaggagaagaggctcttctagccctacccttcataattttgaggcacagataggtcagtaacttgtccaaggacatgcagtccatttttggcagaggcagagaagaaatgggaagtgagctgacatgaattaagttcttcctattgccaggacctttaytaggtatcttacccagatttctccttgtctaatatgctccctcctcaactcccctggggttccaccttccacgagtctccctgcctctcaggaaagcttcctgcactctatcacacaattctgctagactgttgaacccacctgccccaccccgcatactttgctgttagtggaagctgaggctccatgggaggaaagttctttctctctgaattcctgtgaatgacagcaaggcactgccagggagaggaccagagctcctggtttccagccccaaagtctttctgctgctcaggccacatagccagtcaagccccatcttcaggggctacaccagaatacttcccagcaagcagactcaattccctaacttcagcatcacatggaatcatgcagtgcttctcaaggtgtgggtcataggccacctgcatcaggatcacctgggtacttcttaaaatccagattgctgacaaccgcaacacaacagagccagactccctgtgggaggggcttggagtgcgcctcctaaacgggcttcccaggtgactcttagaatatagtgtagtttgagaacccctgtcaatattaaaaagaacccacttgagtgcgaggctcagctctaggacttagaagctatatgacccagggcaaattacttattctttgactttctttcacatgggaaatgaggacacattgtaactcatacatctgtggtgtggagaaaatgaactgacgtgagtggtccctgttagaaaactcaacagttcctctggaatgcctgggcctgctctcccaagcctgccacrgaggacacagcttggggagggctcttgtgcacttggctctcccttgcttctcaattcccacttcctattgaattctcatcacctctgatactctttgcccacgcctaccccagacctccttcaggcctcatagcactgcttccctttcagccatttagctctgcagagaggaggcaaaactaactaggtttgtgaaacagaagaaaagtcacttctgagaggccccgatgtgactgaaacctggctacctttcagagcccagggccctggcccaccgcgtgggttcccagagagagacacccatgctcccaaggaagtggcctggccgactgctgtcctccctggctaccccgccttcccccctggaggaagcacttctcacaatgtcagctgtttcttaccaccttcctgcccataaatgctcattgggttctgcctcacacacagagcgtggccaggctgccttgggccctgacccttatcagtattgtcagtgatcctgcagggcaggattcagtgggcctcaaggagagtgcagacaagcttgatgagattcgttaataggccagagaaagcaccctgcaacctggcttaattctgttaaattagaaagggctagttcctcgctctgcagctccataacctgagagagacgtaggtggctctgatgattccacaagggwrycwrtcacttacattccctgcagtgttgaactaattaaaccagcagtgcttcacccagtgctgcaaagaagcaactgcacaaatgcagcaccaccgtggggctagattgtcctgtgagctaaacctaaaaacctagaaaataacctgaaaatgccctgcaatgtattgaattcccatgtaactcctcacagcttagggcctagagtggaggtctctggaggtctgttgccttttaactgaagtgtaagtccctagttctatctacccagcctcgccatctctaagagaaggtgtctattggtctttcccacattacttctattggtcttcatcccaaatgcagccaccttcactagagaacatttacatgaagtgctgaatataatcataaatgtatgaacttgcctatgaaatattagtgaaatgaacaaagatgatagtgtattattacctgatccttttagaaaggtaaggagaaaacaatacataatcagtatataaatcgaatctaagaacgtcaccaaataaagcacaagctatttaaagactaaaattggctaaatgatctcaaatattccttccagctatacacttctatgcttcacactaagtggagtacccgtaccaggatcacacagaggaccgcattccttgcttgatatcatctgatttctactgcgttgggtctacattcagtttcagaacatgtgttcccatcccaggtggtaggtccttgcagtcataaccagcttagaagccrgcccttaatctcatgagcaccacctcacctcttagcaggaaattctctcctgggacaacttcttggtggggctgggtagtggtggtatggcccagctcggctctaggcaagtatgcagaccatcacagggttcacacagcagggctgtttgctctgtccacaggccgtcttcgactgcgtagtgacctccttgaagaatgtcttcaacatactcattgtgtacaagctcttcatgttcatctttgctgtcatcgcagttcagctcttcaagggaaagttcttttattgcacggacagttccaaggacacagagaaggagtgcatgtaagtgccaccagcgcattccacttgattttgctgaagcatgtcctgatgatcccactccaccaccacaggtccaccctccctcctttctatcttacccatctctgctcttctttcagcaaaaagacaaaatggaatcaataaactttttactgagtgcctcttttgtgtcagacacgaaaacttgagtgtaaaatatctcgtaccatgacattttacactcgagttttcatttcaaacccctataaccagctattgaaataagttttatttgcttattatacaagtggaagctaagactcagaaagtttaagcaagttgctcaaggttacacagccagtagtgaaagggttaggatttactcctgtatctgttgggcaccaaatcccatttttgctccatggtaaaaataccttcctttaatagaattccttttgccttacacatgtatggtgatcattattacccccacattattgcggcctgtagaatgtgctgactcttctgtagaatgagctatagtgaggaggctctctttcatttctgctctggttttagaggcaactatgtagatcaygagaaaaacaagatggaggtgaagggccgggaatggaagcgccatgaattccactacgacaacattatctgggccctgctgaccctcttcaccgtctccacaggggaaggatggcctcagtgagtgattgagttgtcatgcttgtctgtggctgtgataggacccctggttgccttgagaagctgactcaagatgaacaaggctcacgctttgttattgtatcagggaaagtaaggggttttgagaaggtgacacaggcagaaaagaggaagaatgaaaattcttcaggcaaaaatagagaagtgggtgagcaaatcaggaaaatatttgaaactcttaatgttttagccaattattgaggagtcaagtggagccatctgacttctatggaacaaatgagttttgaacagccctgtacccataaggagaattcctgagagctgttatagacagatttatcctccaggggggcccagcacctgaaagcctgaggattgagggttaagaatgagttggcaaaacccaaaggcacctcctgtgatcatgaggaagaccacagaatgcaggtcttatgctgcccgtagttgaaagctaatttctcagagacttagcaatgactaagacaccactctctagtggcaacaggttctacttggcagcaaaatgttaaatgggaatctgggagtctctttgtattgaacatgacaacctaaactatgaaatggtgtccctctgttgcttaggagttgagtgcgtgatggaacagaggctagaaagagaagtggattgttgatagcaggatatgacaacttgggtttggactcaaaaaaaattaatggaggatctgcaaagtcaaagaagtcagataaaaaattataataggtggcacatttcctaacgaagccaagactgtcatccaccatctgtgccctcttgttctgtccccatagagttctgcagcactctgtagatgtgacagaggaagaccgaggcccaagccgcagcaaccgcatggagatgtctatcttttatgtrgtctactttgtggtcttccccttcttctttgtcaatatctttgtggctctcatcatcatcaccttccaggagcaaggggataagatgatggaggagtgcagcctggagaagaatgaggtaatgacaattgrtctaaagtggggagcagcagaggctccagaaaggattcttgggccagcaatgtaagaaaggaggactgcattttcttaacttgattaagaattatagagagaagatgggaaaagtaactattcagccattaaataarcattttccaagcactgtttaaggcccacgtatgaggcacggagatctggaagatatgtaagatgtttaacatgcagtctttacctttgtgtgcacatagtctagaaaacaatgataacttcagatatctgcttatctgactgtgaccttccatgccatgtacttgctgtaagggcagggaatgtgtcttatcgcagcttttccagcaacaagcatagttctggcacattgtaaggtttcaaaagctgtttttgaaatttctttattttattttattttttcgatggaactgaactagaaactgttagggactgtaagagaaatgcgacataaagtgctgtagaaatacataggtaggtagatctttacttctgactaaggacatcaaggaaggattcctgcctaaacagctcagccacatgctgtgtaaaggacttttttaataaccatgaagtccctactccatgtggcaacacctccagttttgtgtactcctttaaggtgacgccttgtctgtagttttgtccaagtgaccccagttgccatctttacttgcccagccctgccctttttcccattcaccgtcctcctcttctgagcatggaacagagcctgccwtggtagatctaggggatttgaatttgtgctaataaccatgactttcttgcagagggcgtgcatcgacttcgccatcagcgccaaacctctcacccgctacatgccgcagaacagacacaccttccagtaccgcgtgtggcactttgtggtgtctccgtcctttgagtacaccattatggccatgatcgccttgaatactgttgtgctgatgatgaaggtgagaggagagaggcacaagagccractgagccccagcgatggttccctcccagggcaagtgggaagacaccccaacatcccagcccatcactgctttacctacttttccatcattgaatccttttgtgatcttattttgttcaataacccaacctctggggctttgggggtccactgagcaaaatgcagtgcagactatagtagccatccaggggctcccaagacctgagatggcaatgggaggcagcttcagacaagggtggaaaaatcaggagacagagatccatcatcacggggtctaaaggagccttggagtattcagagaggctcatcctatttaataytaaatgactaactccagtaactaactctagaaaatgtttcttccctgcccaccctcatctctaggaagactggctgttttgctattaagtctggtggggcgtgggtctgtgttttcctttgttttgttgggtagaatatgtggttctcctctccagcactcgaagtccatctctcctcctgtaccacacaccagagtgtcccacagggcaggaatgagagatggccaacctcagtgacatgtattccccctcttaccttaaggctgtgattctttctctcttcttttttcttcctggcagtattattctgctccctgtacctatgagctggccctgaagtacctgaatatcgccttcaccatggtgttttccctggaatgtgtcctgaaggtcatcgcttttggctttttggtatgttgctgmatccttcccagcactgggcttgtctctttctgttgggtgccttcccagtctttgttgaaggggaggtggttactgctattccagaaatcacccacctagatgtgggctcgttttgactgctcagtaaactgccgtagagacaagatgatgtgtgaggaagctgggagaaagggcaaaggaagccacagccatcagcctggtcctgtgaaattctgtcagcagtccagaggcggccatcattgagtttcactagaactgcaatttatgtgtagatgaaggaggaagccaaagattggactaataaacttcgagtgcttatttactggtaaaaggtataacagttttataacacaaatgggaaaataactatctctcttagcctcaaacatagcaaataatagatttttacctattagtccttctgccattagtaacatgaagagtaatttctgccaaagaaaataggtgtttattacttatgcctataaaggctaatgacctttaaggggtgtgtctgtgtgtgtgtgtgtgtgtgtgtgtgtgtgtatggagtgcaaggggaaggattctggaattaagtttgaggaggtttggggatgatgaatttttctgccatgagccctcttttttcttctcctcaactactattaataattataattgttgggcaaattcttgcatctgtcctcaagagtgttaagaaaatccagcccttggcttcagtgccctataaacaagataatccccttggccaccctccccccaacctgcttcattgtgtgcagcaagttcagtgggatgcaagcccatgtgacagctgtttcacacttacttaggacgtgagctaccatttcaaattacatgtgtgtatggctttccctgcaaggaggagaactttgctcattatctgaataagtgtttgtctggtagcagctttaacagagactctgggctgggttcgataattgtgagtgttgattacrggggctgcttttggtctcccagcggttctttgaaaaaccattaatttgatcattttgggtggagagtttaagggaaccamttgcagttggctgcattgtgtttgcctggctcccttttgagtgttttgagacttggggaaataaaaaagtaaaagaaactactaccaacaaagatgcctttataatacagtctagccctgagcagggggagctgagagagagggagacgcaagcaccacaacagggaaattttttctatgcatgttgattacttgtatgtggtattgacattgtctgtgacttaagtcccattatgtgtctaattatggtgagtgctgaatatatactcacagccttaactagattcggcccttgaagcctgcctccttcccaccctacccccatgttttcattcaaggtctagagggattttcactctgtaaaaggtaccactaattctgataagtctttacattgttaaggcactctaagctttcagaatattgtaatatatactatttcgttagatcttctcagtgactctgaaataggcatggcagatgtcactatcataattgccattattgttgttgttattttaaatgaggaaattgaagttcagaaaaattgtatagcttcttaaagattacacaatgaaaggcaatagaattgcaaggctaaatgggaataaaaagggaagggaaaaagaaaaagagggaaagatgtaacaacaattggttggctattaagtaccaaatgctttacatattgcttttctctccataacaatatattaaataagcattcttattttctcctttttatggatgagctggagctcagaaaggttgaatactttggccaagattagtaagaggtagggccaggattcagaccctgttctatctgacttcaaagctcacaataatctagtctacactgcactgtactattctataccatataccagtgttctagtctataccacagcatgctattctgtattgtaaagcattgttaactggaatccagagcttctggtcctctgagacctagatccatgcaccaaggtttagaaagaattaaaaccaagaattaggaagttcaccccaggttggacaataggagagccctgagaattgaggaattcggagacttaatttagctccaccactgatagactaaatattctaatggaaagtgaatttatgaaactgtgtgattcartctgtccatatgccccataggtacatgtggctttgtaataaggcctctttcagcctcattttctcatacataaaatgaggataatagtagctaccttatggccttagctactttgttgtatgtatccaattaagtgatgttcataaccttctgagtgggtgttcattaaatgtaacttctctctctccacattccttttctttctttattgggtattttcccccaactcctcttgccaactcttccattcaggactttatgaacatgggatatttttcaatccctgcctctaggatccatgagaagaataaatgagttgaaagaatgccaaaggcctggcctagtgtctggctcatgtagraattcaatgatgctagttgtgaggctgggttggagtatacttctgcagtgctctgagagtctcttgtgttttattccaaggatagaataaaataatccattgtcctgtgatgttgctgaggatatcaattacaggtgtttgaaattttctcctcctggtactttctctgtctcctctgaatttctttattctgttgatttaaatctctgttttctgtgttacagactgccctttaaatgtcccaggggcaggcaagtgaattgtttttgagattcaagtgtcctttttgtttgtttttaaaggaacatagtctaaggtctgtgttcatctgagcctaggagatggatgcatagtccaccctctcctgttaaatggagtgttatctggttggtggattttccaggctctttatatctccttcagcccactcattgtattactgcttccttgtacttagttacatctcctcaaaagatgtaacagcagagaaagagtggaaagatgaagtctatttatcctattaccaatcagtagttggtttgaaaaggctcaayggagttaggaggagatttttggcacatctgtaaccttcagtcacttatgacttgtgtgacttttgttgatagttgaaagtcagactgtattttatagggcacttgacgcaatagagataatttaaaagttatagctgtatgaccatggcaatggtttcacaggtacaaacgtttccccaaacccatcaagatatagccattaaatatggatagctttttatttgtcaatcatgcctccatagaggtttttaaatacataaatatttgttaaaaataaaaattgaaaaaaactttttttacatatgagcttttggtgacagttttcaaagataaagtcttcaaatagtgatagaactgctttccaaatgagaaatttccagattagtaaaggagaaatggcatctctggttagaaatgggaaactgaagccaaagtaagagtgaacttatgcattaattgacaagttttatttccaagggacaaacaaagttatataatgaaagatgtcttttctccttttttttttctttccttttctgatgttcctatgactgaattcatttggcagaactatttccgagacacctggaatatctttgacttcatcaccgtgattggcagtatcacagaaattatcctgacagacagcaaggtgaatggcttataagatccatgtctgtaagcttggccctggagtagcatttttaaaactcctctgtatattcagtccatttttaacccaccaaagcaaatgcgtacccctctaagtgttgggaatttactcccttgctgcttggcatcagccagggaatgcaaacttgggagtggcactggatctccaggaaggctttgttgatttgcctgactcaggcagcagacctctaatggggtaggtgggatagacggtgtcagaagagagctagtatgcatagcgttgcactagagtctcaaaggaggcacagtatctttgccctcaaagttcacagacctgtattttttccataaacttgttccttctaaagatgacttggagagctcagggtaactctctttgaatattagagggccagcgtgtgctagaggggttcctagatctgctctttttggcatttaagtgcagacttcaggccactcagtagaagactagggaggctggttttgtgtgcagggtacccttctccagtacatcctttacccttctacctggggatagagagcaggcatgggaaggcttaggagatgggcctcactggccagcccatcagctggaattggggttaacaaagacagagactgtgtcccatttatcggaatgagggataaatacacaaatactagtgcttagatttttctaaatcaccataatgttcctaattatatgtttccttttggtccaccagctggtgaacaccagtggcttcaatatgagctttctgaagctcttccgagctgcccgcctcataaagctcctgcgtcagggctataccatacgcattttgctgtggacctttgtgcagtcctttaaggtaagaggtaccagcaaatcctctctgrgggttgtcatatcagacagtacagccaggcaacactggcatcattacccaagtcccttcacctctgggaagctgaagctagtagaacgggtgtttgttagaagcattcagtaaatactgcaattcttagttacagcacagcttggcttgactgggatcagcttatgtctactggatagaatcttattttagaaaaacaccttgactttgtgactcaggcatcctctctgtctgctgaggcrggggacacattttataagatgtgcttcatccatagagattccagacagtcctgagtaaccccatccatgtaaagagccagccatctgtagtcagatgtcctctgcattttcagggactttgggtgtttgtttttatttcacatgaaagtttttcaaaggactcattgagttgtgtttcatagagagatgattcatacttagccccacctttgtcttcatcagtgtttatttcctgagccactgaacacagggtatactaatggccacctctgtgtcctacaaataaatagggacatctgggcaggttaatatgatgtgtttccyctgcacagtctcgtggagctgtacagaggtgtacataygataaatataagtaaaaaattgacagctgagacccagactttgagtaaaagtttcttaaacatactgaaatatctttggactctagcaaatatcataaattagttgtttttaagctttggggggcctaaatgttgttcaaatgcctgttcttaccaaaatgagtttttcagtgaatgtgtttaaaaataaatttgatggaattaagtgattcaaagatgagaaattatgaattcaccaaattgactttcttattttaattatttatagtttaattaaaaattaagctaaagaaggcaagccagtgaattcatggtttctcatcacttggaaaaggatttctccccacatccatcattactgatttacttcttcatcgaggacctgggattttgagatgtgagatcaattttaaggatgttctggctcctaggagcgacsttgacactttttatcatatccagagaaagtgtttggcgtaatgactcccacgaggcctcacttcaatgaaaactatttttctaaagttagatatggaggatamatctaaaaccttagtgagaattttctgagtctcaggtgattttggatttagaattggaaacacaacatgcttttaaaaccttttttttttagaggattgcccaacaaacttcagtggttagtcttttaagaaatatgtgtcatcctgtcatattatcacaatcaccaagtctctgagaaaccatacactattgagggcaaagaaaatattgtcaaaaawtgatggccaaatggttggcttattccagcaaatactacagagaacagggaagacaggtgaatttgcctccaggtgacactgtgttatagatagatgttcccttttcagaacagttctgtgacacagtatagaagtttgatttttaaaagtcagattaacaaagactacctctgcaaatagaaagcagagagccacacgatataaagagcatcgccattgcctatacctcccccaccctccctaaacagcatccagttttctacctctgacccctactctagagttcttccctcttttcccttattttgtgttagaatgtataaacatgacaagaaaggaaaacagaatgaatctttgcttttctccctacattgggagtagggagagataaactagggactagagtggagacagtagaataagggcagaaggtaaagatgaaaggtagcagcactgcaggcacaagaaaccctgtccttccttctggctttctgtagaggaggtccacattgcccatcaaagtgtagtcaacccccatcayagagcctaggaatcaacacttcattggagagggaattctcccacccactttcagttgcattttaattttagcctctcttcaagttgtaaatagtctcatagggctcttcattttgttagtgctgttgaaaagctctgccctgctcatgcagtctgaaagcctcaattgatctcctgggattcatgatgtgcacaatcaagacagggtggagactcctcgtagcactgtctgccagggagcttagtggatggtaaagaagagggacttctctggcagcgctgagatcaacgcaaaattacagtgtcccactctggccccaaatccaaactgtcctatgtctgcatcytcctccagtaccaaggccagwtcsctgcctcatatctccttgccttgaccctcacctctaaaactgaaatgttatcccaaagtggcrataagcatgcrcagtatggaattttgtgccacatggcttcatggcagagttttttggtggctaacttaccaggcttttgcatgaaacataataaaacrccaggaggcttaaatactgggaaatgacatttcatcagaaaatgaatgacctttctaggaacttacaaacaagtgagaccccaatcatttcactttgattccagattcttcattatgggtgccactttgggtatgggagtgggagggggtaatacagggatttggaagccaaagctaggtgcttcatatttaatttgcatcacaattgctaggttattaattttctgcatggcaagtgggatgaaccccaagcccaggaagttttcccagctttccttctagatatgggctacatttatgggtgagtgaatctccctgatagaggtaaattttaagcctccctttggccaactgtttacctatctgtcagaggacaaggatgcctgagaaagtactacacctcaaaacagaacaaccccagggaatagggagtcccagtctgtgtttgcattagcctccaggcaagatcctgtactgccggtgactgcaggttgttgagcttgggtgctgcttttctttgattaacgtcttatctctgctttccttccaggccctcccttatgtctgccttttaattgccatgcttttcttcatttatgccatcattgggatgcaggtgagctggtaaatcaagggcccggtgggggacagctgttacccagataatctctggcttagcaacctaagcatgcaagacctgaagatgctttgaaccccttcttgcctaagggtgctcccctgaggtcttgtcacagtgtgaccttgggaatttcacatgtgcagtggctccccattttagcttgcctaagtattcagggtagtctggtacaggggcttcatctcaggttgtcagatcatggtgctaattcataagcagctgggcttctgtggtgacagccatagaactaaagcaaagatgacaccattgttcttagccagaaagatcccccaggagactaaggatctatttctcaggatctctggtattttgacttggcctaaaagaaggtcagatgttagttcttcctgtatatggtgacaccaaatcaccacatatrgtcatggctgtcttatagagtcttatacttacacagtcttgactggctgagatttatgccctaagatacatcactgtgaacaactcatggagttcctggcagcccgttcattcctagggagactcaagggccacattccagctaattaggccatgcaacttcctggacagttcccttgttttcccatcccaggtatttatgcaggtagccagaggcctactaagcagaagaagccaaaggatctttcaaagatgatggtggttcttggtgggtgaattcctactgtaaataaccagcagcacatcccatgaacctatctggttggagacacaggctttctgcttgtctccagagggctaactttctgacttggagatattgtgactagatcccagcatagaacttcggctatgtgacagcctcctgcagtcaggcagtctggctgccttgggcctgcyggctgccttcccaactgtgttgccacctggagctgctgctggagtgtcccagccttgctgtgtctgcagccttttccagaccctttctgaaatgtctcttcctttcactcttctctcttgcctgtacttcttggtttcattctttaactctattactggagaattttgttctctaaaaatacaatagaatgtcaagtgtcaaaatgtgtgagacttggttgagaagtagtgggttctccttcactgaggatatttcagtaggaatttaatgatcatgttggcagtgttggaaatagaattcctgctgaagtttcatattggctttgtaacgttcatgaagtcctgtctaactccaatatatttgattctggaattaaaatattcttgaagagccaaatgaaagcttgatttaaattattttttcaaaattgattttttattgatgtataattgtagatatttttggggtacatgtgataatttgatgctcgtatacaatgtgtaatgatcaaatcagggtaattggtttatccatcacctcaaacatttatatcttatttatgttggaaacattataattcttctcatctggttatcatgaagttccttttgcctatgctcaaaatagttcttaccccttttcatcttcaaataaaataaactagaataacaccatctccagtactgatctggtatgaatattgttgattctgataatggtgataatgctgtttatcattatttaaattccttggtgtacaagacgctgtactaaatgtatgcatagagagagagtgaggggggagaaagggagggagtgaaaggaagagagagtgagcatgtccaggcaagacatatgactaatgtttctgagtaatgtgaaaacgtttataggtgagtttcattgtctccattgatgcttagcatagttaagtaacttataacatgctcaagttctcagacagtaagtgaaagaggtgagttgtaagatcagctctgtctgctccctagcccatgttcataactctatactgtgtctcatcccaccagacaagcagacacaagtatttatttttaccctctagttggaggtagaagttgttcaattatgaaattgtagtcttcacaataactgtatggtctaacatcttattcccctcagatttctttccaaaggataatagcaccatgtccattccacagagacatgaatgacatttctgctatgacttgctttgagctggccatccccatcctggtctatgacagagacacagcaccaagcacaaagcagacacctgagcttgttgctagagagactgtttctaatatagtcacaacaaaactgagggatctgtacaaataataaacgcaagggcagagacaagcttttggaaaaatattaatagcaacaaggtatgtytatgagaaaaaccattattattccaaactttcaaaggcgccttggaaaaagggacctttgcagaagaatcggaagttcgaaaggaggagtaacttgctggggatgagaaagagccctgtggctacgtggtgtcaggaagtgggattgtcagcctcagctccttcactgaacaactgtgtgaacttggtgaagtcactgtatctctcttcaccttaactccctcaccagtacagtggaggtgttggttagagaccttcacaagtctcttctagttctaaagttctgtaatcccaactgaaatggatttaaatctatactctcatgagatttttctatgaggcctcagcatcccttctttctcttccataccctgttgatggaggtttaagttagtgacaaggactaagtgaaaagttgaaaaaaaaaaaaagtacaaaaaatttaagaacatcttcacaataaatatgtgtttttgacttaaattatgtttgttttgttctgctttttggttttttttttttgtaaagatgaggtctcactgtgttgcccaggcttgtcttgaactcctgggctcaagcagtcctctcacctcagccccacaaagtgctgggattacaggtgtgagccaccatgcccsgcttgacttgacttaaattatcttagattcaaaataaatagttttggtttcttggactattacacacatactttgtgcaaaatcgcagtgtgctctgcagttagtttgtgattggatgaggtgtttgagaaaatcataatgaattcaactcatgatacctccagaagtgtcatagggaaaaaagacactgtaagttgtatgtctgtggtgaatcagggataaatcatgaattccaaaccaagagggaagaagagggcaggaaatgtgaacagggcaaggataaatgtcagtgccctcctggggtatccagagttaattagatttgactgcttgggtgggattttttaaatgctactatttgtctctttggggccctctagctkcttcttctctttccattcttctctgctgctgcctcacttgccacctccattctccctgagagacaagtagtatttgggttttgaaaaacagcattgagaacaaattcccagagcaggtgtcagtgggagttacttgagcaaaatagctgggggcagagattgttcctcaattgcacattctaaaaactgtgagggggaaaatgtgttccatttagcatacattggataaactgaagcatgttcaatgcaggctgaaaattgtctcaaatgactggaaaagtaacccagtaagtccgcgattgtctcaacattgacttgtgagaataggtcctgatacccaaaatgtggttggggaaggagggtgcatgtgaaagcctccttttcatctgaagagtggaggggttgaccttggmtccaggcagtgctgtgtctgggagttcatcattactcagtctctgtggataaagatctctgagtgttccctcttttgaatgttcacagtgattacattctaagctcagtagccagcagcagatcagcaaatctcattctgtcacccagaatctgcccaaagccattttctgttttccttttcaaagtgcccagttggcccgactttctccatcctattggcctggacttcattttagctcctgcataaatgtttccttttggatgggatttgggtctgttggatgatacatgtggayatatataaatatatgcatgtggatatatgtgtgttcaatctcatagattctacattaatgacatacagaccttctaagatgtgactcaatggatagaaacatatctaaggaagatagagatgccactctctaacctgatctgcttgtaaattgcagggtggcatctgcccaagccataaatgatgtcttcttgcaaatctgaatgctcccatcatgactacctgagacaggaagagaggggtagctccttctgtgcactcctgctgtgagataatgtctttgacagacgcttgagtaccatggtgacaggtaccatggaactaaaagaccagattaggtgtaggaggaactatgtacaggcagaatgacttcaaaagagcttgcgttctacgttatgctyggaccttgctgcatgggtcccctttgctgcactagagcagtggaggataattattcttgcatatcagcccaaaagcacagtatccagcagctctctgggtctgagttgtctgcttcaggggtaggtcatcgggaagagccatgcaagtggctttgccaaccctcatgtgctggacacatcacacagcttggtaatgctcactgttttctgttgtttctctcctcaaggtatttggaaacataaaattagacgaggagagtcacatcaaccggcacaacaacttccggagtttctttgggtccctaatgctactcttcaggtacctggatgcgtaactgtcatagctggggttctcctgatggagggagagagagtttgtctgcctcttcctcccatttccctttgtatctttattccacttcctttgctcctgtcagtagaaaggggaacaggcawtgtctttgccaaactgcccctataacattagacagttttgtcttgtctacagccataccaccatgaatgtgcctgatcttgtctgrtcttggaagctaagcagggttgggtctgctaaatacttgggtgggagaaaatttcatcaatgtctttggctcagcagttaatttgcaaattttaacttcaacatggcctgcaagggtttgggaggggggaatgtcaggacagtgtttgcagaccaaattccacttaagggctgaaaccttrgatagccaggtttatgctgggtcttagagaatcccatgactagtagcagagaccccataaaagatggagacgcagtggatggggtagcagaacccaaaacagacctcagtgggactctttatctctgcatggaaagcactagaaggggtcaactgggtaaaaagagagcctgttgggcccagacaagagcgaggatggggaaattgggaaagaggaccaagaatatgataggatctgcagagctgctcctgctaaccaaaatgtctcttgggctcaggagtgccacaggtgaggcctggcaggagattatgctgtcatgccttggggagaagggctgtgagcctgacaccaccgcaccatcagggcagaacgagaaygaacgctgcggcaccgatctggcctacgtgtactttgtctccttcatcttcttctgctccttcttggtgagcaacattgtgcttttgccttgctatgtggcccatcccatcctacccctaaccctctgatacatagaccggagatgtttgcttcagtgtatgtttgtgcctccctcccctcctctctccacacccccaccatgcacacactcacactcacgtccacacccaggttaagaactagatcatcctctggagaactcttggagattagagtgcctgtcagactcctggatgggtgactttcaatgattgagaaaagtctttgttggttctagggaaagattgttgtgaaaagggaaggtgagcatatttaagtgcattgagcttcatatcraatctatggacactcagagtaatcctttgtcatacctcaggtattttatcttataagtacgtctatggatatcttcgctttgggagatttttgaactgcttgagaaaaggtamcttgaaaatgcaaggttatggcattgataagagtagaatgatgataatggaataaatgtggttctctcttgacttgtaatgttattacatttgatgataattgaccagctgatagatgagaaagaatgagattgcttgattgctttgggtgttagtaaatattgagtagtatatgtggagcatacccacctataaagtggtgggaagccctacgtgcctctgaagtctcttttggagaaagcatgactcagcacacccacttccagaaacttctaccctgcatatcagacaagcagtgataaatagaataataaaagggccagtttagtgtttctggtcactctgaaattcctcagctcaactacactgctaatgccactggctgtacaaaaacctaaaactaagacagtgatgccactgaaaagtggtcaatttcatggccatgcatcaaaaagtgaattaattgtcttatgtccaggcattgctaccttgcaagtgatcccaaggggactgaaacttcccacatgtccagctctccagtgaggggggtgggctacagaaagaccattaagtgttgcctgtaggtcagtgtggcagggagggagctaatgggagatgtgggcagcccacgcagtagtcttggctttgttcctctgctagcctgggccaagacactttcccttttatagcatctataaaatgggagaaaaaaatgacttaataataggaacattttatacacaatgaactgatccatgtgttttaatacacttccttcttatgtatgtgaaaggtttttcagtaaaaagaaaagaatatacaacagtatcttatttacaaatatggaagtataatgtataaagaaaaaaccccctgaaatttagaataatgctattgatgggagttttccatttattcacatcttcagcacatttttattgagtggccattgtgakgttcactctcagcaaggcccatccctcagtcaccagtagtcaaggggtgaaaccagctcacagcttccaggaatcggtgctcactgctagggtgaaatggagcagatagaagcgcatgtggacatcttacttttatcttatatggtttaagtgtttcataataaatatttaaaagaaaccaaagatataactggaaattaattagggaccttaaaggtacttttggaattttgagacagagggtgctgcataattcacattactgttatttttaatgaggctatattcagcacgagatgatctgctttcagatctatatgagactgactgtgaccttggacaagtcacacagcttctcaactcaaaccagccactctacagagatttactgatgcctctacgatgtgcccgaggccttgtgctggaagctaagaacaaaaaatgtgaatccaaagcaattctgtccttgaagggtgatggtaattaaacctgcctcacaaagagttggagcaagcgtaacaacaagtaataggtgtgactgcacacgctacactcttaatgactgttcaaatgaaaggcagtaacagtgctaacagttttcattgacattaataataggtaccccgaaaagtatacaaaagaaatgtctggatacatggaaaaccctttctgtctcttgtaagtgaaagggtcctgcctgataggtagtagttgaacaagttcactgtggctccaacctcagaggcagaaagacaggcccatgttgggattaggttcgcctgcatgagacagaaatctccagataacagtggcttaaccaggagggatgctgatttcccttccacatcagtgaagtctggaggaaggcaggcagtctgtttatggtggctccaaaggggtgttggggccccagacctactcctgctttctgctccatcacctctgtggtgtgtccctcatcctcatggaagagaagacacctagacctccagccatccatctctactctaggcagcaggagaaaagaaggaagagaagagtctggctgttaggtatgaccagcagtctctgtgttgtagaaagactccaaccatgtccttcctccacactgtctccttatcctgtacaccctgtctgcatatctggcacctctgtgcacctggccacttggcctgggggtccacaatagagactccagttttcccaccagttgttatctatcaggcaggaccctttcacttacaagagacagaaagcccagctaaatctgcttcagtaaagtgggattttataggctcctgtaaatgaggagtcctggggcagagcaggcttgatatggggctcagatgatatcaccaggtccaggtttctctctatttacagatctctgcctccaccttgctccatccttgtgagtgcaaatatcaacatctcaagatggctgtagtggcagctctagaccgcacattttcacacatttaagagcaacaggaagaactattttgcccagaagattcaataccattttattggttttgatgggatcaccaaccactgtgcccagggaaatggggtttaatgactagttgaggcctgggtcacaggagggcatcccactgaatctcactaacttggaacagccaagaacctgggccagaaatacagtgaatgggtgagcagggcagccaggaaacaaggaaacagtgctgttgaacatcaagtcctgtcgattccacctttgttaactctctactctggtctgtgctgtcgtcctgcccctggtagattcaggagtactgcaacatcctcccttgrtttcccacccaccctacatgctgctaccaagagttctttctgaatgcaaatgtcactttatctctctcctctctaaacccctttagtagttcctgttgcttacagaacaatctagatcagtggttggcaaactatagcccttgggacaaatcaggtttaccacctgtttttgtatagcccatgaaataatggcttctatgttcttaaatggttgaggaaagaaaacaaaagatgaatgatgtttcatgacgtggaattacatggaattcaaatttcagcgtccataaacaaagcttaaccagaaccatcgtgttcatttgtatacaaatggtctgtctggtgctacaacagcaaaactgaatagttacagcagagaccacacagcctgcagagcctaaaatatttgctatctgaccagttcaccgatcctggtctacactctttagctcagtgtatgagatgcttctgtgatccggcacttggatccagctgctccgccctccttgcagatccctgactattccctgtccctgcatacctctgttctggctcgtttgctaaaacaccctcctccatgccctgaagcctgttcttctgcttcctgagctctgctttaggtttcccctaacccctcttcttccccttgcccttcagatgctcaacctgtttgtggccgtcatcatggacaactttgagtacctgactcgggactcctccatcctggggcctcaccacttggacgagtttgtccgcgtctgggcagaatatgaccgagcagcatggtgcgtaggcccctcggccgccccagcggggcccagagcaaaggtctctggagttcccagggaagaggctggaattggagccacccaaatgcctgcctgttacagaaggaaaggagattcctcttgattgtggcccatagaagaggctctggtatcaagccagtcaccaaggacttctgtatcctcctttcccctctctttccttctgtgacaggrttttccctttgtgggctggtctcatcatccagtcctcacctcagattatttgggctcagtcccaagagaactttccaataatctttttctgccaatggttagtggactcctttgagttatcagggggtttgacaagggtttttggccagctggacatctggccaccatgatcagtgactgtgttttctctttctcgttcctctcaacagatacagttggatataactctgaaattattttttaaaaaccaaacaagttgttcttccaactgttcccttaaatatttgtggatttttattacatggaactaaattaaatggtaggaattggtgaagataacttctttactgtctcttttgctgtttagtagttctgaagtgatagcgtgccttctaggctctagagcagggattggcaaactacatcccatgggcaaaattcagcccattgtctgtttttgcaaataaagttttattgaaagacagctcaaccattcgtttacgtattgtctctggctgcttacatactacaaggaagaggtgagtgattgtgacagagatggtatggtcctcaaatttgaaagtatttactacagaaatattaggttggagcaaaagtaattgtgggccatttttgcaacaacctatatattttactgtcaaaaaatttactgccagaaacatttgctaatccctgctttggagtataaaggcagcattttggccctcatggctgaggacaaggtgagagttctatgaatgcttactccaaaggaactgttctgttccaggtcattttagcttttgggtcttaactcaccaatcctctatccattctggtccccctctgaaaaatactacaagaaatgttatcctttacaggcatggaccaagttgcttccacctggaacccccttcataatcagagacttttcccaaaaatctatcctctggtgaggctgttgaacttgggtcactgttttacagactagaagggtgaatcagaattctttccttcattaattattaatgacttagggtacagagttatctaaatccattcctattacaatggctgagcaacagctttttctttctggtcttactttctaataaatagatcttagaaagcaatgggcagtgtgttagaggagaaggcagccaggcctgcgtgtcttcagctccatggccttggacaagtcacgtaaccactctgggcttctttacctgtaaaatggtgatcgtgatacctacataacttgcaaggtgtttgtgaggatgatattaaatcatgtgtaactgttattataatcaacaataaccacacgggaatgctaattggaatgtctagaaaatcagcctctgttaccatggatatctatgggattgggagcctaagaagggacctcttcactcacccaagaggagaaaccaactgtgagcaaaaaagtccattgttcatctgggctcactcaggtatccttggcttccagaaaccccagcttcttgtggtttcacttatcttgggatccaaatgctgtgtgtataaaacatgctcctccctacttattccagttgctgggaagaaatgattccatgaggatgaatcatgagactcagacgtgtggactgggaaagagcataaagacaaagaagaatttcttctgtgtgctttgtaattcacagtgtaattcattctagttagttagagtttggttggctttctttataaggtgggtgaggaagactaacaaaagtaatgtgagccartgtcttcaaaaggggggctgaaaccagttgcaaaaaatgtcagtctatagccactcccaacccacctacttcccaatctcactaaggcaaaatgaaaggacaactggctaaattacctcctctcaagagttgagagacttggaggtactgatgagctgctatctggaagaataggaggaatcaaccctcaaatttcaaaaagcctagaaagagtaaagctgggctgaagcaatagtctccagacagttgcaagcaaggactgaatgcacagaggtggagatgttgtgcttataatttccagcggaaaccctggtctgttccagggtgtatacagacctgcagatccctgggtgttgcttctttttctggacgctgacagagaagatgctgtagccactgaaaattaatcaatcattaattctatcccttccataggaagctggtactctctaatgggctcctgggaaaagggttggtaagatagctagaattctggctggctccagccaagctgctgttggctgagtggcagaaagagggctgcggggagagtgtccatggcttcctccctggctgctctctgaacacagacctcagcaggctcctactgagtaaagaagacttgcccaagctgaacgcagaaaaatctgtcacaaagagaaacaaagccctttgtgatttccctcatgccaactgtgctccttgctaattagcctaatgggaaatttgtctcttccagactgcagaaagccgctgacttcccactgcccctgaaaagtgggtctgagtaactgactgtaatcagtgtctgtgaaaagcaaacagttctgcagtccacttcaaggcagcctgacatctgctctggacagcggtctgagtcatttgtgaattggcaggctttgttcctagaagcctagctagagccagggctgtgtctgcatctggccaggtatggtccagataggtataatggggtgctcttggtcattaggcagttccctttggcattgaccaggctctgatttccttagaaaattgcagcagtgcagtttggcaaggtaatggttctctggtgcttactgttttcagtctctcctggtctggctttgccaggcccaaggaaagaagctgctctgacctctttcagccatcctcttcatggctaagctgtcatttcttttctacccttctctgagtgtcctattaacccacctgtgcttcctttacagcggcaggatcccgtataaggatatgtacaaattagtgcgggtgatctcgcctcctctgggcctgggagagaactgcccctacagggtggcttgcaaggtttgcctcccagtccccagccatgatctgccgtgggatgcaacatctaacccctcctctctgtcctctgctccaccaccactgcgccacatgagggaaccttcatgttgctttcctttgagtttaaagaggtccaaacccttccagaaccagcagctgttacataaagataagggcatacttggggaaaaggcagaagagttaagaacttcatgtgaagaccagtgtgatcgctctcttcacatgcacacactcatgtatgtgtgtatatgcacatgtacacacacacacacacacacacacacacacacaggtccmccttagtctgtatagttaatcagagggacctctcctttctctatagaatgcagaaatatttttaacccagcaaaagaattctggcttcttttcactggagatggagaagcctcattttagcaaaagagcctcatcgtcccatatgtaatgtatggagtatgatcctagtgatccyaccctcccagctcctggatggtctggtcagaatgactatgaaagctataggacagaaggggtgagaaacaaggaattagggcaagaggtgagagtaggtaaaagaggcatggatttggtgctgtgtggaagaaggtagtaatagctcagagagtctgggaagatcacagtgaatgaagcactactgagagagtccctaccttagggtcctgccatgggttgctgtgagggatctgagggagctgtcataatttccaagtcacttcttgtcagttacaccaaggatattgttcaggggtgagtaggacctccctgctcaaatctgccatacccagggaattctctatatcccaatggctctactaagcccctatgtgaggccaagcctgctaggtaaggaaccctctcctggtgcaagtggagggaagcatgggctccctggggcatagcactgcccaggcagctggaagaygacctargctcaggaaggatgccagcctggacaatgggatagagctggcctgggatggtgacacggtgattccatactcaggaggctggacagctgcctctgctgagactctttaaactccaccctggtgaaacccgcagccgcatgtgggagagctggggagggtagcatggcatgcaagatgctcttcctcctcctgtttttgtttcttctgtccccagcatgccattgacctggcacatgctggggaataaagagcagtcttgtccacagagccaggtggaagcaacggggccaactctttgagcagcaagcacagcccaccaccttcagtgcaagacgccgcctcctgctgcacacacacaccagaggggggatacacgacgttctgcctgtgggttcagtggagaacagcctgacttccaggccagcgccccagccggggtcagaaactccaacccatggctggagcaccgtctatccggtttataccactcacacacagccctgggaattgaaaataagctgtgttgtattggggagggatgaagtgaacagggaagtcaggggaatgctaatcgaggagaaaatgagaccccgtgactgttcccatggagagtcatagggactgaaggttgccaccagttttcccgggtctgtgtggggcgtgatataaaccgcaccaggatggagtcatgtctacgatttgccttgattaacaggtttcctattcttttcccgtttgtccattttgttttgtttttcttctcctgttttctgtattttgttygtttttgctctctgggaatgcctattctcctctcctatctktctgcatccttctccccacttccttctcctttccctgccaccccactgccccgctaacccaccccatcccaactcaccaccctccatgagcagtggccgcatccattacactgagatgtatgaaatgctgactctcatgtcacctccgctaggcctcggcaagagatgtccctccaaagtggcatataaggtagaccaccccttcctttgctctgggctacagaccaacaggaaatgggatctagttgtggggaggccagaacatggggaggaagccaggctggggaggtggaggagggaactaaggaggaaaggcacgatgagactgaagagtcaggaaggttcccaggaggacgaactcatgagacaatacaaggaatggtttttaatactgttcaacatggttttttatgtgatattttgtgtttctacaactgtgtggcttcttgtgagtgagttaccygacaagcagtgttaagtggtgtgtttccttttagaggaggcagagtggtggcctgtgggatggcatatatgggcaagaaggaagcctacagcaaaacagctatcagtgctcatatgcaaagaaatatcttcaatcagataaggaaatcatgcagaaattcctttaaacrtggaattgttaggagaaaggaaaattcctttaaacaagaaatttttaggagagagraaaactcataacaaatgttttcacccatgacataggaagaatggcataggttccttctaggtgtaagaagaaaagaggaacctgtcttccatcctgtgatagactgaggaatgcagctctattccactagcccagctacccaattctcttggaaatactcaaaaggaagggaaataatgggcacaagttgtattcagcattaaatttgacttactggcataacatagttatggggcctggccccagagttatgggtggattcccctatggcttgctgtttagagattattgtacactgggagtcacttgcccttggggtgctcatagcttttggacatgagttgttttgccacccattagtaatagttactgttagttcccctttgctatttagactgacccagaactctggagctctttcattcacctaggaacacatcatagtaatgtttccacttctctagatgtttaaagaagtgggagagagatggaactcaaatccaaacaagaaactggctttccactctaagacaccatgtggcatcagctttaggcaggatgctgcaatggaacattagagacccttctttgggaagaggtacttccctctctgccaggctggtggttctgccagaggacgttctcctgctgctacctcacattgtatggccccagatagcatctcactggaacatggccattagggaccctcattccccccagtacatggctcctcgtgcacagcttaggggctggcatcctttttgctcacgatggccacatccaaaagtaccaggtggtagaatgtggccttgaatttgtacctctgggatgaagcttggtgggagaaggggagcggggattggaggaaaagttaaagagctccaaaagcaaaatactctctggaaagtggatttggccatttcagtgtgatccctttctttgggtaaggggaacaaggcctgcccactctgctcctgcctgrgccacccttcctcgttctgtctcctccgctctccccatcctcctaccccagagcctgtttgcactctcccccttgtccatcctgctccacctcatcctttagacaagttggacttatgcatgttcaatcatgtgcgggcaaatttcatctattaaagactcaaaaagggggcaccaggatacatctttcaagttagataagcaaagcaaaatctcatttctcactgtatttccatatgagtttcagggggtattcatgggacaagtggaaatatggagcagccttgaacaggaaatggagccacctccccgagctgactcctttccttgagccacttcttttagaaatcacttcccatccctaacaaagacattcttaggactccaagggggggccttactgaatgattagggaagccccttccctttggaatttggcatcattcccttggtggagaaaaaacaaacaaactacaacaacaacaacaacaaaacagcagcaaatgagccttaagtgagaagcagggagagaaggactggggcaggggatggggatccttgcccttctttttcgtctgtgcatttgacctctacccttttcttcctttctcactgagatgtctttcaattttttttttttttkgcctgctgtttcttttttctctttcacacagaggttggtcctgatgaacatgccagtagctgaggacatgacggtccacttcacctccacacttatggctctgatccggacagctctggacattaaaattgccaaaggtaagcttaggaagggaggtgggaaggaggaattctggaacaactcatgcaggtggcacaggatggagatatttgaactgtcatctatccagttaaggacacaayaatgcagtcatctgaacatcaagtatctgactcaataactaataattgccctttccttctggtacagtgaatggtttgataatctctagggcttctttcagctttaaaagtatatgatcttcagtgtctggctcacaataggtattctagaaatatttattgaccagaggttaattttgtcctttttttctgtatatggtttattttctctgaagtcttgagaggcttctgtggcagaaggtgctgtcatagaggccatggtagtgttttattcctcttgatttctaatgattgatttaggagagaacaggcttactactacttccaggtggacctttagcctttctgcttttgtgcaatctaaatcctttttaaaatcaggtcactcagactatggagttagggttgctggagggattgatgtatggataagaaggcagaggaacgtacttgcggctattgttattttctcctctgatgtattgagcacctgggaggcttttagaacgaatgaggaagttgctcttagtctgagggcctcagatctcttggcaggatatccctgagtcactgaaaaagggagccaaaatgtgttctgcttcttcagcagaaagacctggtattgcaagatccactgtcactcagtgccaagatttcctcttaaaatatgaggtgccctgctgattcagctcctaccttcacctcctccctcagtcctggttatttctgggtctattctatttattagtaatttatcttattctaggtggtgcagacaggcagcagctagactcagagctacaaaaggagaccctagccatctggcctcacctatcccagaagatgctggatctgcttgtgcccatgcccaaaggtttgggtcttctcctgggtatccttgtcactgtgggcccagcatgtgaagactacgtctttggggggaacccagagtgatcaaagagataaggaaagtttgcccttttcaattaataaggacaaaagggacttaaggataaaacrtgttctttmagataggtcactgtggttgtggatgagacttcctgggtgtatagctctctccctccatataatactgctcagcaaaccttcatgggagaaaggatgttgtcacttagctatagagatttagaatggtaggcgtgatgcttactcatgtactgcttatcctcagtatcgtcaccatcactaggtgggcatgcaagccccctgaggacagatcaggggatctatgcactctgcatcctcagatcctggcaccatggsggccctcaatatacattggatgaatgggtgactgatagcacagacctgttccagagagtgggtaacaaagcttagaggttcctcactctctcccattatctactccctgttcaccatcatgccacatttgtgtttctagcctctgacctgactgtgggcaaaatctatgcagcaatgatgatcatggactactataagcagagtaaggtgaagaagcagaggcagcagctggaggaacaggtgaaagtcaatgccagcatgctaagtgggtgggccatgaggagttgcaggagggaataggcctgtgcctccctggggcatagtgcccggcaaggacttagaagcagcagtaatgggtgcggggcccaagaactttctagtgacgtggaattagaaacccagtggatcgaaggttaaaatggtcaaacaagggataagttatgtgcctgtattatccatgttaattttattttccccacagcaaactcygtagtcattggaattctttccttcttcttccctctttttacccagaaaaatgcccccatgttccagcgcatggagccttcatctctgcctcaggagatcattgctaatgccaaagccctgccttacctccagcaggaccccgtttcaggcctgtgagtagcaccaaaacatccctggcatggctgtttgcaatctgtcacccatgctgttgtgcagaccccaaaactcactgctcagaagggcccaagaacaaatactctgagcttgagtgatcctttttctgaagttgaatatcttaaagtgattttcagcaggagtaagagaaaagcagactaagcatacttagcactgtggtcaacgtcggtgatcactttgaatgaacaatagaagaagggagtttgacttcttttaatatacttgggtcttatagaggagattatttttcttcacaacagaactacaactaattcttgattatcgcttccccgtggatctagtgtcctgctggaagatagagcctccctcacaggtgccatgctggctgagtgtaagaggggaataaaaccagcagttactgctttccctgaggttgacacttatagagacactatttgcagaatctcacttgattcccactctagcagcctactataccctggaggtatatattaatatcaccactttacacatgaagaaactggagactaactgaggttaactacgttgcctaaagtcctgggtagtagaatgtggaactggaatttaagttccttatttctgaccccagagtgttttcactataccatgttttctttaatgaacaaaagggaccttattcagaaagggaacttactttttctataataggagtaaaaataaaacacaaattaaggaattttcccatccttctgagtgataagcctttgccccaattaatctactatagcatatgtatctcataacattatatttcgatcatcagcaagcatttagtgcatacctaaagaacacaagtatttctactcaatgtaaatgagcttttgtgattgggtttaacaaagtcccagttcttacaaaaccaggaatcaccaaatcgcttatgttaattactaagagagtgatacttagggcttgggaatgagacttctgtcggagtcatttggaattgctcagatcattgatttctttctgcctgtggggctggactgtttttgaaaagcactgttttcagagatcaaagtccaacatctttggaagagaagaaaaggatgagagtcatgaccaaggtcattttttttttaaataatttgatgttatgaagtacagtgtgtgaattctcctgtccacagaaaacaagtcagtgtttatcttctgcttgtgtaggagggagggagggaaagaagtatgattggaagagtgggacctcttcactggaagggtttacactgttttttgtttgtttgtttttttgagacggagtctcgctctgttgcccaggctggagtgcagtggcacgatctcagctgactgcaaactccgcctcccgggttcatgccattctcctgcctcagcctcccgagtagctgggactacaggcacccgccactatgcccagctaatttttagtagagacggggtttcaccgtgttagccaggatggtctcgatctcctgccctcatgatccgcctgccttggcctcccaaagtgctgggattacaggcttgagttgtttttgttttggcagtccttggcttagaaatgggggataccaccccctaaattgcaatctctgtttatctacaatttgctttacaaattaacccaccaccataggatcactctgtcttttctccatgtatttattgatccatttactcattgatttttaccaatatttattaagagccaatatgtccccagagctgacttaggcactggggctatggcaaagaacacgtccccatggagacaaatctggaagaagaaattacaagagcaatacaggcaaacgatgctgaagggtgggctgttgtgatgtcatggaaacagctcactcagtttgagggtttagagagtccttcctgaggaagtaacatttgagtgagacttgaagacaagctcttcaagagtggtaagagaaagtatggtaagtttaaggaacctaaaaactgtcatgatggttggagcatggagagctcaggggatgtgttaagttatggatttggagagatacacaggggctagtactttgggggcattataagcaggataaagaaattggattttgtctttggataatggggttttatgcatcagaatcatgtgatcagatgtgtgctttcttgaattcagtgtaggctaaatggattggagggaagcatttctagaggcaggaacaccatttcgtaggttactgcagttgtgtaaattatcagtgatagtagcttggactagcaggatagagatggagacagatggtcagatgtgagaaatttggtagataagactggrtaggatttggtgattgatttgctacttggactaaaggggaaggaggaagcaaaggattctgggtgaagcctttgggtgcatgttggtacatttcctgacattgggacactggtggaacagcaggctggttcctcagaaccatctgtgtttctagagccatgcattgttcagtagaggttgatctaggggtatagtggtagacataacagatagggtcgctccctcaaatatggtggaaaaccagacattaaacagaggattattggaaagaagaaaagttgcattttcagtgatttacttacagttctgataagtgctagaaagagtttacagagtggtaggggagttggagagaagtgttctgcactcttagagtggcctctactaaaatctcgaggcagaaacaagcctagcctatccaatgaactaaaaaaggccgccatgtctggagttcagggagcaaaggggaaagtggtacaagaggaggctagtgacgtagggaccagatcatgagggaggctgtgttcagaattctggactttatgccccggcttgacaaggttttcaaagtaggagatcactctgggttccagttatttaactctgtgagattattaagtgattccaagggtcctctccctctagtgaggattctataattatttactctctgtaggacaaaaaggaacccatttctttctttctgagacatgatctcattctgttgcccaggctggagtacagtggcacaactggctcactttagcctcgactttctaggctcaagtgaacctcctgcctcagcctcctgtgcagctgggaccaccccaggcacgtgctatcactgctggctaatttttttgtagagacaggtcttgctttgttgcccaggttggtctcagattcctgagctcaagctatcttcccggttcggccttccaaagtgccgagagtacaggtgtgaaacacagtgcaaagccgagaactcactcattcttatactagctgtgctcaatcttgttcccagtggttctcaggagatgccacaagtggggaagwtgactgacatttaggcaggtcatttaaatactgtaaaaactctgtagcagctgtgaaaactcagcaaaagctctcattggaagcaaggggacagattaggtgattctctgctcttcatatcttctcctgtaatctaaaaaaacattcctatggattgtttttaagtaattggcaatccttgctcatgccttgagttttccattggatgcagagtcatcagcagtagacttaaaagagatggtgtcccatctctccctcctaactccgccaccaagagagctgctgcccagccactgaccccagtccttcctcccataatctggaagctcactctgcattcttgagcaggtcagatggtagctattaccatactggtggcagtcagccaataatttggcaacaggcacctcattctccagaaagcttggctgcttctttctctcctaacaagcccagtggatcccgtcaggttaagagtatctggaagtactagacagtggtttaataacaagcctactgtgccagttctgcattcttttcccttggakgcctctaaacaactgggcagactttgtctccatcctcttttctcaccaccatttaaacctcttcctacattgccatcaaccaagaggttttcaactcctcaccaccacctctgaaatccttctcagttcatgaaccaacagacttaatgtatggtacaaagtagtccttcaataaatggcaatggaattggacttaattgtttagtttggccagggatgttggcgaaataagaccatattcttactgcgagtagggaaaatttttaaaaagtccatggctgcttaatatttaaacaaactgttcactgtgtaaactagggtgtttttcygccaaatggggaaactgagcagaaataggtttacaatctagtgttgctcttccatatggctgaatgtgacaaatgatgtcatttgtcatagacatgctagcccccggcagaataatgaatggtttcaaaggcaggatgcaggttgaaaacatcagtttctgtctsttctagtgcttttttttttttttttttaatttcaggactagccacatgtaagttacwaggtttacaaaagccagccaaggctaaagggtgttgccctgctggggtgggaattgctagtggcatgactgtccctcattacctctggatttgacattgcttttcaggagtggccggagtggatacccttcgatgagtccmctctctccccaggatatattccarttggcttgtatggaccccrccgatgacggacagttccaagaacggcagtctctggtgaatgcatgagttatatgacctcaaaactacttccttggtttcctgatccctctcactaattttattacatagtcatggtccgtcaggaaaatccattctagtagtttagccagttgccctggaggtgtcctgccttagcccttttctagcccagtttctcatgtgctctgacaatgttccctcttcaggttttacagtcccagaggtcccttccctgcagcaggaacttaaattgctttaggccaagccctcttagtttatgcccgaatatcaagtgtaagaccggaagtcacttataaaatcttgcctttgatggggagcttgaagatgcatcaccagagaatgagtgacaccaaccctgcctcttagtgtagttaggtactgcttgtgggacacacaaatgccccatgccattccttagtgatgcccacctcctctagaacctagcagcagcatgtgccacagtgatgagctgcctgccaggaggcacagaagactgtcttacctctgctctgtgtgggttcaggcacattgtcccttttggtcacaattcaaagacattctaacaggccactaaagtcacttccctgaccccaaaatgagtttattagcataaatggtgaaattcctggctgggtgcrgtggctcacgcctgtaatcccagtactttgggaggccaaggcgggcagatcatgaggtcaggagatcgagaccatcctgggtaacacggtgaaaccccgtctctactaaaaatacaaaaaaaattatccaggcttggtggcaggcacctgtggttccagctactcaggaggctgaggcaggagaatggcatgaacctgggaggcggagcttgcaatgagccgagatggcgctgctgcactccagcctgggtgacagagcaagactccgtctcaaaaacaaacaaaaaagcaattcctgagagacctattgagtcaagtgaaagcctgaagaagagaggagagattcaagttttggcttagctaatacaaagctaaaatatggttcctaaacatcattgactttaccattattcctagttcaggagccatgagctcaaggtcccccaccccgaccttagcttagaattgaagcccaagcagtcactggactgaagagaaaaaaagacaaaacccaaccattgcaaaagtctgtacagacagcttgtactaagtgagttccatatcatttaaattctgattcatctgtggctcttctctccccttcatttctctcctgatccctccccgctgctactgtgtacctcagagccaccctgaatgatgtgtgatggaatgggcacccccacagagggcgaaaaacactcagtagctcaaacaaatgcgtgcttctatctcctgcgagtgctgagacagagaatcgtgcatggttgtgtgggggagacagttagtccagacgcccccagggctgagcaattgactgcctgagggtgttcttgatgaggcaggtaggaactagtagagtcattctctgccctcccctctgaggaacttagcaccaagacctgtggaataataaactatagatagtttgattcttaaaaagacctcgcagcattttgcctgcctggcgatgtgtctagtgggaaaaaaatctcaataatgtgtcctttctttcacagggagactttatgacatcatttctgcgggttccccagggctgagccgtagtgccaggactttttggatatgtgttcatctcattgtcagtaccagtgtctgtaattcaatttaggtgtcagcctgtgctacacactcaacactgtgtacttctgcccatccctcggggctgctgctccatgtccccaggcgtggccatgattgtgtgtgtgcatatggagtgtgtgtctcacaccacctctgatacctgtagactgcagtgttgttaccacgtctgtctggagtcagaactgtgtgctatacaaagcatgtactacaaacaaacactataactccctcaagtgcaccatagcacatgtcttgggaaagtacccctgccatacacaccagaaaccgctcagccaaatggtcacataggctaaggtgggggtcccagacactctttcctttgggcaatgccctacctgtttttagggtgtcatttcctaaatataaaatagctttttctggtacgatctccatctgcccaagatgttcttaggtctttttgttaggtagcccacgtaaacatctctcatacagctctttatgcaatgatactagctatctgtatagcgcatgcacagctgccaaacaagaatgacagaaccttagagatttccagtccaacctgataacactgtaggctggcacagtccaaaacaatagctcttagccacatgtggctagtccaaataaaatataaactatctaatttttatattgattacatgttgacatgctactatttggatatattcagctaaattaaatgttattaaatttcaccttttacaacatggttaacaacatggttacttggacatttaaaattctgcaagtggcttgcatcatccttccatgggactgtgtcactcagggcatccctgacagccacccaccacatctttggatggtttcaatcagaagaaaactcttaacgtcacgtgtcttaaggcttgagaagacgtatttgacatcagaaattgttgacttcccttagaaaactggtttctatttaattgataaaaggcttcttcagattaaaagaataaatccaatgctatcacttcttagaaagcgaacttcacatatctgaaaagtattataccaaacagtgtttgttgcagaaaacaataaaatctgaatcattgcttagtgatgaaaaagaggaatctacaccagaaaaataggtgaccttcagcactcaatcccagctagagcttcctgtccggaacatatagcacataggtgcacataaacacacacacacatatacatacaactgagaccttaaagctgcaagtctctcttttgaaagccattcttgaggaggctgaattgtccactggacgtgagaagcaatgagatrgaaccaagtcccacaagcttggctgtgtgtttatttccaggagccagaggttagtgaattaaaaagcgtgcagccctctaaccatggcatctaccttccttcggacacccaggagcatgcgggatctgggagggcatcttctatgccacgtctgactgtggatccccaggtaaaaagcaaccacctacattaatgcagtggcatccgggctgtattagctgggttatggaataatatctgatatttgcaggtgagccgttgacttgcccgcaccccttccctataaataaaacctggctcatgggtcgtctctaatagagcctgcttctccggtgttttcaatgaccccccctaaccacaacagcccagcgaacaaaattgcatacttcactccggacgggttaaacattctcaagattcaaccagccatgcaagaaatattttccaggattttctctgtgtacttctccatcctttttttgtttcctgactcctccagcacatatgcagttacttacacacacaggtctgtgtcaggactgtctgtcctaaccagtgcaggccacatctcatttctttgtctgttttcctggcttctttttcctgtctgtcggtcttacatcaggttttgacagagacaagaagtttttgtagatttgttttaatatctgtggcaaatcaaaatgccagaatttaaaacggggctaggtgggattgatggcagcagagggagagtgatacattcttagcacttgttaaattgcaagctctcctaggctctagtgctgcagggcagggccttctctggcaagggcgtttaaaaaaaaaaaagcaaagccatgcttctttcatgaatggggtggcctcttagacaattgccctcacatgtttcaaagcagcacagtatttgctgcagcctggctgcgccccatggtagagggctctatgggagcttgcacagttcctgcctgcattccgcatggctttgccttggtacactcagctacagaagaaaagatcctggaccatttccagtgactatattaacataatgtaaggatgctttcttgaacagtttccaccagctaaggtttgagcaagagagattcaagggaagttaccatttccaggggttacaatttgccttccttaacgtctcagtcttgctgcttctgtccttttagatcttttcaatcgttaatccataccttgtgtttctctgggggcttgtatttccaggtggtgacagaccctagctccatgagacgttcattttccactattcgggataagcgttcaaattcctcgtggttggaggaattctccatggagcgaagcagtgaaaatacctacaagtcccgtcgccggagttaccactcctccttgcggctgtcagcccaccgcctgaactctgattcaggtgaggaggtcttcagtgtccagctctttcatcaggcagtgggctcctgccctgatgsacttactctccaaggactgtagataaccagaaaagaattcagagacaagggctgaagaaagtgaaggatgctccttaccaaagggaattcctgtatctgacttacatcctgaaacaggccaaagccctcctctgtgttcaccggaaaagctgttgcaatcccttccttctggagcagggctatacaaatcattagaattgagggagcttttcaaatagccttctacaaaaccactggggctttttaggattgtattagagacccactgtaaggactgaactttaaccaccagttccacttcaacctaaacagtgctacctggagttatttcctgtgtttgaatttttttttttttgagacagagtttcactctgcagcacaggctagagtgcagtggtgtgatctcggctcactgcaagctctgcctcccgggttcacaccattctcctgcctcagcctcctgaatagctgggactacaggcgcccgccaccgtgcccggctaattttttgtatttttagtagagacggggtttcaccatgttagccaggatggtctcaatctcctgacctcatgatccgcccgygtaggcctcccaaagtgctgggattacaggcgtgagccgctgcacctggcctgaatttcttttaagctttttgctatatatatatatatatatatatatatattagtctggctcaactattttgttttattggataaaggaatcaaagttgaaaaagcagtgacttgtcccatgtcatagggccattaagtggcagaactgggactagcactgggatcctttcatttcaatcctggacttctcaccatagcattatgttaggtgtgttattatttagttcatagaaatttcttaattcccttctgctggtgccaccttccccccaaaaagttatgcagccatatttatgatagagttcctgagccatattgttaaccaagatcctatattstgtgtagcataaatagaaacagaatagattgcattgtttgacatatgtgtctctagtggcaccttgcaaacttacctgcttacaaaataggtaatttgctagcctgcctttctcccctgcttccctttcagatcatcttttgacatacctggagaagccaggattcttttaggggcctatcttttttcaggctgctacaacaaattaccacagactgggtagattcaataacatgtatttgtcatggttctgtaggctgggaaatccaagaccaaggtaccagcagatccctgtcttctttctattctcacatgatggagagcagagagacaggaagcaagcactctcaggcctcttcttatcagggcactaatctcatcatggaggccccaccctcatgccctgcctcctaataccataccatcaggaacaaattaggcctcaacatttgaatttggggggggacacaaacatgtggttcctctgagggcccaaccccaggctgtgatgtgatacttggagagaagtcccttcatcatcattggtcagagtggacagagttataaccaagtgcttttgtcacctctcacaggccacaagtctgacactcaccgctcagggggcagggagcggggacgatcaaaagagcgaaagcatcttctctctcctgatgtctcccgctgcaattcagaagagcgagggacccaggctgactgggagtccccagagcgccgtcaatccaggtcacccagtgagggcaggtcacagacgcccaacagacaggtgagcgcagagaggaagccagtctacagcagaaggacaggggagggtgggctgtatcattagatgcaagtcgtgagcatttcgcaaacgcattcaagtacccacaaagactggaatttcacaggaagctatacctatagtgcatagaggttagctgctcaatgcttgtgtactcagagatgatctgaattcacagaaaaccagatttcccccaaaaagatggtgtctagaggtcattccattccagccttcagaaaccagagatataaataggttgacagccagattttggaggagaggatggtcctttagccagaaagtttcctttggccatcttgtgatcctcagtatttgtgagaattgtgattcatctctcagcccaggattcacaagtcagagcagttcaccctcatttacctagcttgcagccgtcccagcaagancatgccttttgctgaaccaccagcttggtgcctaaggaataactatcagatctgtatgaaaacattcatagactctgttttactccttactayagccctatctctagtcatggcattttgacccataataggagaccccctcaacagaaacgatcagcggagaaaaggcagggctgctaatgcaaacctttagagacacagcagtcgagaggtttcccttctagaacaacagttttcaaattttagtgcagaacagcattaacccatgaggtttactagcactgcacattcctggtgcctgaaggacccaggagtctgcctttgaaaagacccctctgtaggattctcagcaggaggttcgtaggtcacacataccttaagaaatgctctcctggaggtttacttcccaaaacctgggctcagtttcccttgggaataggtgagggcaagtatggcctgagccaacaactgagtgtatcaggtacagaagctgagttcagcaaaccacagaagacatgggcaggaataagggtttcccagccagagcaactccagcatttgttcaccttccacagagttgtctttctcaagtttaaagtctctcttttagtgtgccccttgttacatatgtagagcttccttagtagtccaagtgcttgttccacagacctgccacccctagcatcacctggaagcttgttagaaatgcaaaatctcagtccttgccccagatcttctgagcctgcatctgcagtttaaccagatccccagaggtttgtatgcacaaagtctgagatgtcctggtctaaatgttcttgactccttaatctcttcaatccctttttccctgagtggatgtgaatactacagggagctccagctcaggcctctccctgacagaattcagattccaaggactctcttaacagagttgcaagtagggatcatgccaagcccaatctaacatgccatgtctctcctgctatacagggcacaggttccctaagtgagagctccatcccctctgtctctgacaccagcaccccaagaagaagtcgtcrgcagctcccacccgtcccgccaaagccccggcccctcctttcctacagctccctgattcgacacgcgggcagcatctctccacctgctgatggaagygaggagggctccccgctgacctcccaagctctggagagcaacaatgcttgcctgaccgagtcttccaactctccgcacccccagcagagccaacatgcctccccacagcgctacatctccgagccctacttggccctgcacgaagactcccacgcctcagactgtggtgaggaggagacgctcactttygaagcagccgtggctactagcctgggccgttccaacaccatcggctcagccccacccctgcggcatagctggcagatgcccaacgggcactatcggcggcggaggcgcggggggcctgggccaggcatgatgtgtggggctgtcaacaacctgctaagtgacacggaagaagatgacaaatgctagaggctgctcccccctccgatgcatgctcttctctcacatggagaaaaccaagacagaattgggaagccagtgcggcccgggggggaggaagagggaaaaggaagatggaaggacaccatgcattatcagagaagaggaagtaaaggacaatcagaacaccagtcaaacccaccaaattgctttattcccctttgcaagatgggcactgccatagtyctgcctctttgctggggaaagaaaccaggaacgtggagggttattactgcgggagaagggacacgaggatggctttgcttccccttgccccttcccacttttctaaaagctgtggagggatctagctggcctatgtctacactcagtgccctgagaagcctggaagactttctggctcttaactggggagtagtggagaccataggagaggactctcctccctcaccagctcttacgcctcagccagcaccactgccaccagggcaactgcagcagcatctcatgcataaccctgtggcttgcttcccccagggcagcacaggctaagtcaggaacatcggatgccagggagggaggagaaagccgaagcgaaaggggtcagggtgctgaggcaacagcagcaagggctggtctggacaagaaaagccatagcccggcagcccctaccatgagggagacagagaaacagaactggtggtgctggggggtatagccccccatccttgaggcctgtcacccacacagtaggtgctgagagttaggacaggtcaggaagtcccccagggtccacaaaggtgcctgaggctctggtaagggtgaagataaaagtatttaacaaccgctatggcatcaatgtaagtggagtttggtcctagtgccggagcccatgctattccaggcattggctctttagatgccagtcatgggggaaccctgagggtgtgggtagagtagcaggggccacctaagagattaaaaacagagtctgttttccaaccagtgtggaagcaattaaatatrcgtaacagtgctacggccacaccagcacctcctggctgaaggtcagcccacactctggtccatgaggcagcaaggccagtgctgtgccaagcccggtaaggccaagtgccgaggcccagccttccctgccactcctctgagagggcagaacacacatatccaagtaggctacccaccactgggtagggatttctgtaaagatgggaaaggctgatagattgaaataagcttctgtgaaagtctggatttactgaggacctcccctgaggagggaccgttgggaccgcagattctgcagctggtgtggggttcaggtcagtttgtcaggatgctttaaggtgattagtaaatatacctcagcttagacttgggctgctccttctagcaaagcaggctccagtggggcctcatcatacaggatgacaagactggggccctgttcaccttgaacatgcccctgggccaagatggggcttcacccctccccagagtaagagctggggctgacagtcccaccctgtcattcctaatagcccaaacgcagaagcactgagcaagagagccctttcttgccaagccagtgctcttttggtatatggcatacagctccattggaggggacacatcactggctttatctggtggaaatgtacctttcccttaagttcctccttagtgccatcacagcaggtgaatgggtgccctacggggccctccttcccccaccaggaacagatggaacctgccacccaggatcctgatctgccctgcactgagcactcagtggataaacactcctccagcccagacacactcctcctcttgggcaggagcaatccagagttgttatttttcttagaaggagcctcttttccctctattttttaaattgaaatataatagctgcatcagccctgaaaagccaaattcaaccacatggctggagaatcatttgtcatggccccgccttctcttctgatactaatggagcttcatgacccacggtcagcccccaaaccaaagttgtcccaacagaggaggccagtgaggcagagacagagctctcccactctcagaccctcttttgtcttcattttcctctcccacttagcacatgtgtgcttgagggtggctgggaatgtgatatacagcaccctgatcctaacaggtgtgattgttacgtaagacgctgatactgggccttgtattgcttttaaagtttcctctgctcagcatcatttcatgccaaagtgctgctatgggctgctttgtgtgcacaaaattgctttttccacctcggaaatgcagctttccctagggggaggcctacaacaggacgaccattctgagccagtgagtctattgcatggtgttttgagaaagggaattttagtgacaccttatgccatttcaagaggagaaatgcaggctggcagagcaatttccagaaatggaatttgcctgcaaatagtataaacaacactaaatttactgtgccaggaaatcttcctgaactccttgaactcatacacacaggtatttgagtcctgaataaagtgttggaaagcactgcagatgcggtcacctgactgaccacctgggttttctattaccagtgaatttcttttattcaccttcccttgaccaagaaattgggtttcttttccctcagcctgcacttactcttctattaagaccagaaaataaaataattttccgttgagtcamaaactcatcatcttgtttggtgttctgctgcctctgaacaaaagtgaatgccagccttcccttgctgggtgtcagagtctgcctcccttgaaaagaggcccctgtagaccccaacacctattcttttctctggttaattacagcagcatctgagaaattccatgcaaaagaagactacaaccagtgtttcagatataccacaagatcaaatttgggcactggtggtccacctcagaagactcttgagtcatatattcagtttctcttgctaatatatgactcgtcttcaccatctcctcaaaacaagagcaaagccaagatagaggaaggtaaaaggaggaggaaaggaaaccaaggcagggagatgttctaagtaggtttgcatttagttacccctcatttcacttaaggctccagacagactccaggtagggaatgcatgctgtctctttctctgtgtctgtctccccatctcctagaggacagagtgccagcgacctctggacaggggyagggctccagccaaggtgcccctgagccagggtcaacatagaatttcctgccccgtgaagggctggcaccagctagcatccccttggctccacatgagtcatgaacacaattgtcagtgggggtctctgctgctcttctggctgaagaatctgtttttcttctgggcttcacttgtagttcctattcaatgtctccatagggcactgagatcaccaagaacattacccagaagctgaagtccaaatgttctagattttgacctctcttgactctggggccacaaagagaaggccccataatccacctctcagccagtatctcccttctttgcacagattcctcccaaccccatagagcctatgtggtgagcatgagggtcgtcttccctctgttctcccatcccagcctctgttttgctgcatgttagcgctgatccagctcctgagatggttaattccacccaatccaagcttatttgcttgcctgactgactccaccactctctcagctatgggggaatattgcattctaatgaaatagggtttggaactcacctggtgctcctcgcaagacaactgacacaaggtgtagggtgtgggggtggacacaatgcccacctactggataaaagctcactgcaggaaaatgaggtctcctggcataatgcaacaaaaatctcatataattttgatttttaaaaagttgttctcaatttttcattacatcctacttctcagccctctggatgtttcatttttttggacaaagtgtttctttagtggttggggccagggacaggttgagggatatttctcggctcatttataagatataaatattatgaggttgtatgtaaagaaagggcaaacgtacagcagaaggggagcaaatagctacctttcaaggattttgagatttgaaggttaaggaatttttactgctatttttgttcatcagtttcatgtctgttatgttttgagatcctcagaggcctagggttagcgtataccaagaatcctggtgagaggcgttgccatgccttggggtgaattcttccccactagctctctcacycagcctacaagtccttctctcatagatcccagagcaatgggcaccgtccaggaggtacaggagaggactttatgatgcaggaaagaaggaagaagtgggtcccttgcaagtggccagacagggaatgatggtttgactccagaaatcaggaatcaggttcaggtttggataacttctctttaaaatatctccacattgagactcttattttaacaaaatccaaacaaaattaactcagggcttgtgacctaacctttgtaagaaggtgatcaaagagatcctacattaataagcactgcctgtagcaccagctttgtctttttgtcttttgttgtttctttcctgaaccaccctgtacatcatagccaggtctaccccaaatagagcagcagctgatggcttctctgctgtctgtggagggagggctcggctgcagacctatggtgttttgtcagctgttaggtgctacagcccacccagtcagagtacatagacatagcgctttaagggacaaaggacaaacagaactatctttgctttccggaggccatctttttctttccttgaatcctttctgctttaaacttctgaggtttatgcatcccagagaggtcacaccaagccaaagagaaaaaattcatagattgtcccagcctacccaaagggcctgaaaagcctctctaaacaaaactcaagatagctgagaagtatgaatggggttcacagcaaagtccaattgatggcttttgaggctgggacacccccaaactgcccttctgtttttgtagttttgctttcttccacccaccctctctccgcatgctgtaagttaggggagttagtatcttgaacttctaaatgcaaaaggagattttataataagccatgctacctgtaaatacattattgaggtttgcatttttatttttggaggtatgaaagagttgagtagaccaagtcaaaagaggtgtggggatttatgtttatttttatttgtttggggttgtttggttggtggctgggtttcttgtaacagacctattctggaatagcaaagaaggataccttggtgatctgcaatgtttctgaatctgtttctctttaggaagtgattgccatcaaatttagtgatatgatatttgagtcaaaaatctgaggttatagtaccagctgtcttttctctctggtctcctttttgtcgtctttctctttctgtctaaattggcctctgtcttttcctaaggacttaaaatataacccaaattaatgaagaactgccccaaaacttcagtgaaagccaaggaggtacagaattttttcaggacatctttaaccaatacaaaatttatgtcttaagaagataatttttacaatagtgtagtaatctgataaatgaaaactattggaagtcaatagttttttatattccagctttctgtattcaaacttgtgccttcagcaagcatctcttcactttctttcccttgtcaattgaaacatgaatgtttggctaactcatgatgtaaagtgtctgttaagttaataatacataatttaaagcacttagtctccacaaagcaatttagaaaaatcttcacttgttagatcccatgaagtacctatgaaattctcagcattgctataagcatttgattttttttaaggaaacttcctgtttaatggaatctgaatccaagatttgctttaatttcactctattcttcccattttcccttattcttcttgttgtctctctaattaaaaaaaaaaaaaacctaggcttttttttttctatccagaaagttgggttttcatgatctgagcttccttatgtctccttctctttgtgcaaacttaaaccagtcatagattgtcacccagacatattctccaacccagcattggaaatctgaacgaatcttttctctttttgtcctacaagtttgtcagagatgagaatggattgctgtgtacattctacaaccagaccctagactttataccaggctgtgccacttcctcttcacttcactcagaggatggccccaaaactgaaaaggaaatgaaatcatcaaatataccaaatccgaatttgactttatttgatgactcaatattttccttccagtactctaatttttttttatggcaatggcctatatggcacaagaaccaccacttaaagcaaatctgttgaacatttttataagggatgagcaagaaaaacacactccaaaattttaaagtgccattaatcaatttttaagaataaaggtaatatgaaatgagggctaaacaatgtaatataactgccagttaaggtagacagtagttgtggtcttagttacatttgatatggagttgtgtaatattaagcagatcccagtggagttagtaaaaacataggtattgagttttaatggctaccaattgggatatatacttagcctgcaggctgaactttagtcagtgtttttctatcatgttgttttgtgaacaagtcaaaatttatacaaagctaccctaagtgctgcaattgcagaggaacttgcctcttcgtgatattagagggcagtccaactccgctcaaactgagtccaagatttgaattcatccagaaaaacaaatggaggagaaaagcctaatgcaccacatgtgtttggcatttcatggctgggacaatggagtagagggtaggaagacaagctgtagaacaaaagcaaagtgaggtagaaagtaacaggtcccagaagaggacagacttagagatgtgtaaccttggatcctctttttcacttagaatatgggtaaacttcttagcacaagactggattaagagaagttctttctgttaaactcacctagggtagtggctttgaaggcctcagaggattaatagattcccaaaattttcttccagacctgggagatggagagaaagaggttcttgctttaaagcggctcgaagacaatctttatgacttcagcaactcttcaacatagtagcaccaataaaggagagattatgttaacttcctagtggtgagaataccatgggatgggagaagggccagtgagtgggatgggaatgagcttcatcaggaacagatttcagactctgcagggtgcaccggttctagcctcaaataacaacattgcaaggaggtggactacagggtccacaccctctgtccttcggggcccatggtcaggccattccctctttgttttgctcctagaggatgagcatgtaagatgagatcaggagggaaattgggtgctctgcctcaggctgttaaaatgctgctacctgcattctaaaacgtgcaagtcatgccccacaagacacctccttagggcagcatccactgtggtgtgccagcctgacacccctgcagtcacggtgtttgaatggcagctgatgctggcccacccagagtatcggtgcatctctcctaaagccacagttcagcactgcatgttgaccaggcggatatcctataatatagatgctcgtttggatccaaaaggaaaaccattaaaaataaaagaaagatgaaaaactttaatgttttgggggggataaaagaaaagaataaataaaaccttgttgtaaagaatgcatcggcctgatttccctcacttgatgtgtttctttgctgctaccagaaagggaaatcatgggagtgaagcctgccaggaccctcagggtaagctggcagcaggctctgcagctgcacttagttggggtctgctcagaccagtcaggaggaattcaggaggctttcaaagtcccaaggacatcctggctctgaaaggttttcttttgttaaaaaatgcactttgtgctgtgtgtggtagctcgtatgtgttaccccagctattcaggaagctagggcagaaggattgcttgaggctaggaattcaagactggcctggatgacagagtgaaaccctcatctcttaaaaaaaaaaaaaaggaataaaaatgttctctgccttggataacatttttttttaaagattccatacaaactcattccctgaaagagaaaaacagattttctaatcaggacattgtcctgatctgcaagcgaggagtttaacaaggtaggcagagaacttccttatggaacaacagggctctgtgaccagaaaaactatgaccagcctcctctgaaaaaaggtggggggattatagggcaccagctcagccgccaagttcaggaagcagctgattcccaagactcttaggagatactgtccattcttcctcctgtccacatcactccccatttaactgcaattgctcccttgccacagggaaagcagcaagccccaggcccaggcctccatttgatttgccactccgagaactgtctgcttcattctgcttgaggagatatcttcacct

SEQ ID NO: 8718 - DNA, 130349 bp, Homo sapiens
gggattataggcgtgagccaccacgcccagccctcaatgcctaaattttcaaaagacaaaatgacagaatgcaaaaaatgtatttctagaacaaatcttagagatgtagaagtagtctctcctttgtgcccctatattttcattcattgataaggatgtgtatacaattttgtaattgctagagttaagtaatttggtaatttatttaactggtaaacacttctactgtcatcattctttgcctgtgcaacagcacaagcttctccaccgttctcccaattcttactcttgccaacccccaatatgttgaccacgccacagcttcatgtgtaaatcttctcattcattcttccatttatttaacatgtatcacatatggcaaccattatattaagtactgcctaagcctcatggtctatcatccggaacagtggtccccgacctttttggcactggggaccggtttcatggaagacaattttttcatgggctgggtcaggggatagttttcagatgaaactaccccacctcagatcatcaggcattagttagattctcataaggggcatgcaacatagttccctttcctgtgcagttcagaatagggtttgcactccttagtgaatctaatgccaccgctgatctgacaggaggtggagctcaagcagtaatgcgcaatggcttgcaactcacctcctgctgtgtggcctggttcctaataggccacagatggataccagtccacagccctggggttggagaccccttatctagaggacaggcttgtgttcttggcagggagttggatatgaacatacagatatatcccagaatttggagaaaacaaacaaggttctgagaaagaaagtaacttagagaggcttcttttatgtaggatggtcagggaaactccattgaggaagtgacatttatgctgttaccagaaggaagttatgtagagtggttggtgggggtgaaccagaaaagcatcttgggaagaatgaagagctaaagccctgaaataggaaagcatgacatttctaggaatagaaaaaaatcagtgtggccagatcataacgtgaaccaggtggaagtgtattaaatgggttgagaaataatacagaggttggattttattaaaaatgcaaataagaaaaatactgatagattttaagtagggacttatcccagcttgatttgtatggacagaaatcggtttgatttctctttggaggaaatactgaaggaagataagatggaggcttggaagttagtcaaaagcctgaacagtgatgatggtttgattctaagtggtacaattgtaaacagaacacaagatagatggtggagagagtatgaatgggatttgttaatgatttagtagttgtaacaggaaagaagaaataaaaaataaaaattaggcttctgttgcaagttactgtgtgtatactggtgcatttacagatataaataagattgagaattgggatgggtttaaagaaaggatgggtcaagacttctatgttctgttgagttggctctgagacaatctagtagactagttaagaatgtggtagcaaaatgtgaatctagagatctcaaatatatcatagatctgattggaaatataaattcgttagttattcccacgaaggagctcacacagaaagagagaggtgggtacagaattgagcttgtaatgtatcttagtagtacttaaaagttaggtagagactgggcaaggtagcccacacgtctgtaatcccagcactttgggaggctgaggcaggtggatttcttgagtccaggagttcgagaccagcctgggcaacatggcaaaactctgtttctacaaaaaattgagctgggtgtgttggtgtacgcctatagtcccaacttctcaggaggctgaggtgggaggatcgcttgagcactggaggtagaagctgcagtgagccctgatcgcaccactgcagtccagcctgggtaacagagagagaccctggttaaaaaaaaaaaaaaaaaaaaaaagtcgtctgggagcggtggctcacacctgtaaccctagcactttgggaggccaaggtgggcagattgcctgagctcaaggagctcagaccagcctggacaacatggtgaaaccccatctttactaaaatacaaaaagttagctgggcatggtggtgcgtgcctgtagtcccagcttctggggaggctgaggcagaagaatcacttgaacccagcaggcggaggttgcagtgagctgagatcgtgccactgcactccagcctgggcgacagagctgagactgtctcaaagagacaaaaagggcagacagaggaagaggacccaatatggcaactgttgaggaaaagccaataagggttaaggaaatttaaatttgtaggtaatgatgttttggaagctgacaaaacataatggttagagaaggaaagattttgtttaatgctactaagaagtcacataatatgagggtagagaaacaaatgatggtataaaatctggcaacatggagacgattggtaagaaaattcaagaacaatgtttataatgcttcataacttcctcatagctcttagggtaaatacatattcttggaacctgcaaggcctggcaagatttggccatcatctccctctgaaacctccttattttccaggctctgcttctttctacatcagcctcacatctcttcctgttccttgaacacagtctcctcctttaaatttattatttctgcctagaatactttccttctcctcatactcatttaacttattttcttcaggtctagctccattgctttttattccaggaaaacttcccaacctccagaatagaccaaatatcctattatatgcttaaatcacagtgtggaagtattgcctttgtgatgaaagtgtcatgatgactggataattaattattgtgtcttccactaaagtgtagataggaaagaaagcatgcctgtttttgctcaccattttttcctcatgtcaggtaaaatgactggattacattaggaacttgctctgtatttgttgaatgaatgagtgaatgaatgcatgaacaaatgagtaacatctgcctctgtagttaacttgtaatctgtttctgtctttatataacctctactgtaggtagccttaaaaatctggaaaatgactttattgatttaagtaaatattaagtttttaagcttttaaaaatctattgtaagttgattaactatgattattttgaaattttcttcatcaaaatttgagatgactttggatacatactgttttcagctactcaacaagtgccattgtatttactatgtatgaaatctggtgttacttcctgcccatttcctagactcagttgttctttgcaaaatacccatttatcagcaaccagcccaccctccctctgggaatcagtgagagtggatcacatcagtatgtcataaatactcctcctgttttctttgagagttttctgctgatgcaagcggaaggcttggatgccaggcctgtatgtgatacagtagaaatttccccagatgccctgtggaaagacaagctgctacccggagtccttcctggatgtctggcttagtgtagtataccatcaaggacaacctggctctgtctcctaacaagctgctagggccttccctcttgcctaccctcctgacagcctggacctcaggctaacaaacctctgggttgccactgtctccattctgagccatcagaattgtatatacattcatctgctgatgtctctgtatttcaagctgtatgtctttacacctttataatacacagtacagattttgctgcttaaaattctagtatttcctatagacactaaactcaattttaacacaatgaatatgttaaaacattatatatgtgttggattaacacatataatgcaactcatttgttgctaatctatcttggattccttgggtagaatctgtcttctcacctgtctgaaatggaattgaatctcctaacttcttactatttttttaaagccacaaatcccttttaaaatgtccgtttaaggctgctaaactcacattgttatagagtatattttatatacttttcttccttttaaaagatcatatacacttttctcctggcctctaattttgccaaatattctgccataacagcaagctcacagaacacaagtatttgcttaaagatatttaaagcaaatccccaaagagttttctgttgcaaatgtattttaagacataggctgaggagctgagtattcaaatccatgagttctgacactgatgttttattaggcctacccacatgaaaattagtgcttacttgcacagttatcttatttaaaaatacatttgcaaaaagagaataatttcattttcactgattcaaaggtctatcttttcgagtattataaacttacatagtacaaaaagattggtaaaagggatgagaaaaataaagggcaatagtaaggtgagtaaggaaagcaaaattaaacttggagacttgggttctaaatatagcttgtctacatcctagctgcaagatcttaggcaactcaactaacctctctgaacatcacagataaaatggggaataataacattatctagctcaagggtatcgtacaaattatacaatatatgtaaagtgcaaagcatagttcctgcacatagtaagtgctccataagttaaatataataataatcatagtaaaataatattcttaactacaatcttattaaaaggttattacctagagtttaagctgtggggttatttccatttgcacaaagtgtgatagaaatttggctctgtagttcctagcagccaatgtaagagtaaaacaaaaaagtttgtaagtatcaaaagatttatttacttaaatataagaaccctacaataatgcttccaaactagggtttgcagaattaccacaagggctctgtctgtctaaaagtcccccaagcattatctattgttcaaataaatgagttgcacatgtgtgtacttttatttttaaaggcatatagatattgtattaataaaaccaattcatctaattgtattgttgaatttatactttttgccagtaagcattttcctaatagatggacttaactaagaacatcagaatggtgaagagcattgtgttaatacaattcattgtcttatttgttaaaaaagttgaaaaagtattgctgagaaaaaggaaacaagttaacttttgttaaaggtatctcttggttttcactgtcctttccctcatcagtagcgccaagaacatcttaagtcacagaaacattagtttttggaagcagggtttgctgtaactatagtagaaatgacattctgattccactcctagcttcacaaggatatctgtgaaagatttggggcaaaactgttaagctgtctgaaagtgcttttgcataagaaatgggttttactgctaaaactgtcatattgctgagttttgaatgccctaatggtaaatgatactgggttgccaaaaataaccagattagtagttttttcattcatttggccgtctcagtaagtcaaatattgatactttctactaagtcatcttgccaacacccattttgttatacttatgctgaatctgtttgtcatctcttaagtaagaaaattattgattattttgtggggatttaatttaaaaaaaatggtaatggatactgtaaaggagcattatttggatggtttaaaaacatcttccttgatgggaaaatcttttaaaaggctttctaacttggtgtaattacttgaattaaggaagtgcaatgccattctactgacttagaacaacttttttgacttcctgcaaagaggacccttacagtatttttggagaagttagtaaaaccgaatctgacatcatcacctagcagttcatgcagctagcaagtggtttgttcttagggtaacagaggaggaaattgttcytcgtctgataagacaacagtggagagtatgcatttatttatttacttttacatttttgattcgtttttacagagaaaaacttctacagagataacaattattttgcttttcagaaggacgcatgctgtttcttagggacacggctgacttccagatatgaccatgtatttgtggcttaaactcttggcatttggctttgcctttctggacacagaagtatttgtgacaggtaagtacaaggatattaatattttttaaattattttttctcttttggaggaatgtttgaaatagacataaaaataatttaaatgtgttggtaactggaagtgagaagcctgctgtaaaccatcaagattgttgtctcagggagacatagctagttgtgtgacagaatacattgtttctgtttacaaagacataaatgtttcgggacaaaaaatacaattttaaaaggaaagcaatgtctatctgtatctttatttacaactgttcaaagatattacaaaagcaacattattacttaacttccaaagtgacaataacacacatttataaaagcctgkkaattttttaatgataaaataagtgagtttttattcttttaacaaatttgatcttttaaaaagtcataaaacagctttggttgtatgtaagccactccctcttttcagacctgaagtttgcttcctcaaattttgaatttaattgacatattttattgaatacttgggtatataatagttcaaaaatatattgagatatttagtaaaatattaactttctgcaatttttatcacagaatgtattttaaatcaagtttttagtttcttgttaatagttttaatacatttttgctttagaaattcttgtggagccaccgcccttcctgggtggtgggtaaatattacagccttgatgagatagaaatatttaaactcttaaaaatcatgcaaatgctgtattcagtaggaaaatgcaactagttggacttccagtgcctattaaagtttgaaatctttgcacatttatggtctattcaatggatagttcttgagcggcgtcaatatgaatcatgagtacatttcaatagattatagaatgtaactaataattaatatttaatatttctctttatgatgtagtatctaaaaggacattgaaaataaaatttttgtagaaattccaaaaagtataaaaagtattttaaaacaacttgcttattacaattcactttgaagtctttttttgacttttaccgttcttctttcctctgaaagtcagggaagtagctacctcttgagcatgttacattgacaatttctatttggagaggaaagaaagaggaaagaaaaacaacataagatttttgttgttgttgttgtggctgttttgctttttattgcaaaggtgaattttttaaaaatctatatatttgcagcatttgtcttagtacagaaaatgtttatcaagttaccatccctttaaagcttatgataataaaaagtaaattataaagaataataatctcaatgaagtgatatatgtatattatcacaaatcagaacagattttcatttaaaattcccactcaggaaatgtcgaaaagcatttttaaatgagcataaagaaatactgagacattttgtaagccagaatatttttcttctcttcatattcatttaacttctattattttcttcaggtctagctccattgctttttattccaggcaaacttcccaacctcctgaatagaccaaatatcctattatatgcttaaatcagagtgtgaaatatttcctttgtgaataaaaattcaactcattctattacaggatgtttttttaaccataagacacatctttgaatttataattgaaataatatgatggggtctagaaacctttatatcaactttgctgaatgatttataccatagcaaataaatggatatacataaatttattttgaaaactcaastttatcttcagttgctcacataaatattgagagcaaacatttttctaaaagacatttgtagactccctgagatatatgcttatttgtggaaaaacatatacagatataatcatttgtatctgcaaatattgtttataatcctttcaagttgcaagaaacattttgtgatttaatgtataatttggaaaattcttaatgctttaaattatttatttttcttttttagcaacaaatgagttggattctatgtttcattttaacgtgttaaaattagtttagtgcctacaggaaataataaacttttggggaacaaaatttatattgtatgctgtaaaggcataaagaaatagagccaaatgtagagagccatcaatggtaactctatgcataattcaaatattttatttaatatctaaaatgcacacacggacaaggccaaagttaatctttgccacggcaacaaccaggcagggttcagttttactcaagacttcctaatcctcttgctctgtgcctctttgccatggcaactggaagccaaactttgtttagaatttctaaataatgttaggggacaatgatggttttaagaaggcaggtgaaggtgagtgttctctggttctaataaagttgtaatgccaggcagatctaccacactatagcatggcagttaggagtatatgagttatggtatgtgaggtatatgatgagttttgttatgagtcataacagttaagactcatttcctggacataattcttcatttttccatctgtattaaaaatatatatctcatgttataaacatggactgtgccttgcacatcacagacattcaatgaaaattatttaattgaatttggtaagcagtcctattaagttctaaatactccataatttagagatttgggaatgtgattagaattacttattaatttgaaaaaaaatgtcctactaaaaacctgcctgtgacctttatcattgctaaagtttgaaatgtactttgttacaggaaagactacggctagggcctatattatctttttctcttttgttctgtgtaagtaagtataggggcagagtagttagcttgaacttagttctttctttgttctggactatttgctatcctctcaccagtgacaattaaccagtatagaaatatagatgtttctacattgttcatatacttgaacatatatttctttatgtagatactmacacataaactagttatatatttgtgggttatatatactagtcaatctatctatctgatctatctatctatctatctatctatctatctatcagttctccatgtttgtctatttggcgttcccatgaacttcagaccttcgcctgtgttctcttttctccatttggttacgtatcattgcctactatgtgttgatcactctgattctccatctctagactcatccctcagaaacacggaacttactacctttcctaaatccagacattaacatgctccccaagtcctgaaattttgctttgtaataatctctaataacttcttgctttgacacctccattgccatcatcttaattcatggctttattatttctcacctgtaaaattgtaatagtttttttaatcagtctgaagtctcatcctttttttaatgtaatctacagcttaaaaagtaaaataaaaagtgaagggttactgatttcttctcattgcctttggtataaattctaatcttttttgccagagaaactggttccactaatgatctgggggctaggcctggagctgggaagggatcttttttcttttctttctttcttcctttctttctttctttctttctttctttctttctttctttctttctttctttctttctttcttttttctttctttttcttctatgattgattaaaagaaaacaaacaggaggtagttttaacacccacctctatactttctcaaggtgtttaaggttctgggcaaatcctacttcttctattatgttctcttatgtcacttttgccacaaaatatttccattgaattgcacactttttatcaccttttcttggcatttttcaagtcatttcaatctgctcttttttgtgatgatgattgatgatgatgatgacatgtgaattagtggatttcttgacattgtaacctacatgaaatcaggtataggagacacaaaaggcataaactcatagttcccatacctaatttttcaccagacactgaataaatcatagattaaaaaaataaaactgcatattgtagtgacaaaggaaaggaaaattttcaaagagggaagtcaaaaagagggagaatatgagataaaaaaattaaccagaggcgaagtgggaggatgaagacagcaggactattttgtccagattaaattaagttgattttggatctagatgtttacagtcttgcctttttgtttttgtttgtttgtttgtttgttttttctttgctccctttcttactctccttatctcacctctcgtctggaaagagcctcctgacttcctaaaagttcatagtttgagaatgtttttcctaaattttctttgatctgctctttggacattctaggtaatgtaatttggagggtcaattttatttttcagatacacatacccataggagaaaaagcaaggaatgggagggaaatacaaatgtagcggagtgataacacaaacagatcaggtccagtcatggcaattgctggtttgaacactgatgctagtgctctgggattgcttgcaagggcagatggaatatggtgcaccctaggtgttgcattatttgcacgacaaaagtttgtagagagctgggaataatttctttacagacagtgtggtgatgaatgtcaatctgagtaggtaaggggcagagatttgtactgaggttgattcattctcttggtaaatacacaatgttcacaaaggcaaggtttcatcttcagaccatgtgtgtatatgtcaccttggtgcagagagagaaatttttcatcagtgctgacctttgatttttttttctagacatcttatagatttatgtagttatttacatgggaaacaattagaatggaaatttaacatatcttcagtttaaaattaatttctgtctagtctaaatatctttgtaagtactagatactcaatcccatagcagtggccttttaccaaaggcttagtgctatgacttttgcatacataaagacctcactttttaagatatgatacaccagaaaaaaaatatggcaagactttagcaatatgatttgatgcctatttctatataatacccaaatatacaggaataaaaattatggcaatcactggattttgtgtacctggctctaaccaatatttatattagaaaatatctaattattgtctaaaatatttaatcttcattcctgtttgtatgtcagtgtgctacttcaatatcagtctgttaaaagagtctaggaatgactactataagcagagaattatatgttcaggaatcacaacaaaaaacaagaacaaatagagaaacaaaagctttcctactctttcatctaggacaagaataaatacacataaagtcaatattagtgaagtaaacaagcatcttctatatccattcatagtaccttcaattgattgatttcttaacagacaatcagcaaaattatcagtttttattagagattttagtagagaccgagcttaaacaaatawattctatggtgcttaactctatagtatttaaagattcaatatttatttcctctaaaaatgagtcaagtgtctgaaaggaaaaagccacctaamtgaaacttcagtttctactatacagggtatttattataaaactgtaattacaatgcaattatattgaagtataaatgatcatcattcatttatttaagaatataatcaaaatttgcatacctggaagaaaaccatccaccctccaaaatagggatttgctaatgtaggagtagaaggcaaaagttgagggtaactcaggtaacacactcatacgtattaggatatgaacagctggtatagcaaacttgatagaaatcactgatagacaagaagacattctctgcattttaaattaaagtacaatttgtctgtggtcattcaagagatagtttagagaaacctatacaaataacaatgatgctaagagacaatatcaaaatcacaataaatatcatggcaatacagtgtggccactatattttaaacacatccacttgatgaaaaatataataatttactgataaaacatattaagcataatagaaaatgaggcagaaaccactccaagctgggaaacatcatgacatctgtagtgataaatattttgaaaatctaactctatgaatcttgtgatttttagctaaatcaattttcacccttgagacccaatttcctcatctataaagtgttgtaagcattaaaagttataatatttgtgaaaatgctttgaaattatgtgatactctgagaagtaaattttttcatgtgagcccatgaaatcagagcacatagccttttagcataaacttgattccaaatgatatctcttcctttcagacactgtgagcagataaagggatagtttaaggttaagtgatagaggcataatcccttataggcctttgaattcttttaactttgcattctttatttcagagatttttcaggcttctccagattctacagtctaaatagtttgtaaatccacacacttctactttgccagggatttcttagkgtaaaaatatcctgaagtctcacctgccttcaatccttactgtgtccatacccaccattaccaggataatctttgtaaaaggcagaacttacctttgtccattcctcttttaaaagctcctattggtagaaaatatactgaacccrtgatttgataccaagtatgttttggctcaacttttatgaaaacaaatatttaattagaatataccaacatttatgagttttccttaaagataaattttggaggaaaaaaactccattagaccaatttaattccctgatgattatatatatattacctagtgaaatccttggcagtttttccattttaattttaattttactgaactaatgtttagcagcatcactttcatttaatttttacaataactattagattcatgaatccattttacccatgtcaagttctactgaatatagcttatgcttggaattttcctttgtgattattacttttctaaaggtaattcttcttttcaaacaatacagatctaaattttccaaaaccatttaaattcttctctttggccagaaacattttctgtgtgtagttttggctaccgctagtttagtttttttaattggttttgtgtctcaatgctacaaaaaatataatttatgtaatttttcatttttgtcaaacttaaatcgggcaatattaaccattctcaattttttgttgtgttgaaatttctatcagtgacattaatgtggagattgacagctctttgagctagattcattttgaaattttaagactttcgattatttcttatctagccaatagaaactttagaaacacttttaagactgcttgatagcctggaattattatgtttgaattctcattcatttgtatggtattcctcttattagctttcacacttagtaccaatttcttattcattattggagcaaaaagtaaagagaagaatcaaggtgataagtttaaaatcttctcaatgtaaaatagtgtgyggggaaagtgtcaaatcatcctactttggtctttgtgcatttaggaaaaataaaagcaattagcattgcacacacatatgtaattgaatctcttcagatttgtctggctttatctctaaccactttgtgactctttttgtaacttgcatttttctaaaaatgtgaccttgtttggtcttcctactgttggccatgctgtttttccttctctccacatctttttatcaatggtgcaaattataaattgtattcaaatttactgtaaagatcatgtcctctagacagcccctatcccacttgtataacccttgctcttcagcccctttcacacctgcataggtattcttctgctgtgatgatcctttgaataattctcttggagttctctttaccaggctctcttgcagcaactggtgagctcatgtaggctatcactgggtctctgcttatttgccagtgcctgcaggtcctcagtacctgtttgctraacaaacgaatggtctgtcagcttaacccaactctgtatgtagaaggcacttaataattcttaaaaacaattttgattctgtccttttattgttatttatgggaattatttatggtaaaaatttctacataatagaaaatttggaaaatgtcaagaaatagaaggaaaaagaaattgcttagagcccatgctaacattttgtttttyttcctctatcttttgatcacatgctgtgtatgaaatttcatgttcaattttttcccaagtaaaccttgattattctagacaatttgaaaaatatagaaatgaatagaaaaataagaatttcaggtttccagttctcaggatctaaaaactttttgagtatttcatttgactaggacaactagatctattcagttatttattaacttattagttcatttgataaacaactattttgtgagtgttttccatgtaatttgggctgaggacacctatcccatgaagcccgtattttctatcagtggcttcttggagatggtgttttaaatcttccaaaatcttcatcagcaccccaaaacttcctcctcaaagtaacaacataccttgctacagataattattggkgttatcaatgttttataaattataaatttaaaaatcactatcttaagatctatatataacatattaagtaaaacttatattcttacaagacttcctccaggtccctgttacaaccagattttctttgcagacttttaaattatggaagttctggtgctgccactgagttgtgtagattattattagatattcaataaataaagttggtagatgtgaagaggtactagacaatagtcctattttgttttggtttgtttgttttgtaatttattctgaaaaaatgtttatgtggagagaaaagggaaaacatacagaaatacacagcacacaaacaaattcttacttttttttggtagtctttctaattttccaaggtcaccagctaatagcaaatgagagttgtagggggtggggtgaaggctggggtcttaatcggggtctatctgattctagatagaccagattctagattttccactcggttactcaatcttcttagtggtcagtttaataacctggaatttaagacatgactgtgtgatgatgggcaaatcacagcaggactgaatgggagctggtaatttctcagaggttgtttgtgtgacatatgcatgtaagttcattcacctgatttagctacttacatgaaccattgtgcactgagctgcttctatatctttagcatattctgtatctatgtaaaattcacataagattgtatgacttttataaaaaacaaaaagacatctttgattaatttgtcttcactatgaatactgatgtgatgtgttacaatcatcctgaaaaggaggctaacaaaggacaggactgagtctgtcttgaggtgagtgatatgatggaaagaatggattttcccccacccaactcatttttgatattacataaagtgaaaaacattaaataattcaccaaagtatctagatttttttttgtttttgaagtgcaagggaagtaacttgacctttgttaaacactttgatmatggaaaacacataaggttctcatcttattccaggaagtgtagacactagataatcttttcatagtcatccaaaaagcatattaagtgaaccaggtaaatccatcctacactttttattccagagacaagttggctaaactttgaggagactaaaacaaaacaaaaaaaaattattgtttggttcatttgataaatgtggattccaatcatataatttaggccaaatattatactttgacttcttagacttagatttccagatagtctggtttataaaataagattttaactatgcttactaaactctatgtatttctactttccaatgacccatgttcttattttctgaatttacttattgatgctttaggtatgataaaggtatgtaatggctraggaaacataaatgaagcataagacatcagttgagagttttgacggaaaggaagtggtgatatgaaggaaacagataaaccaaagaaaaaggaaaaggtcagggagctgataaaagtaacttgaagaaactttagtgcaaatgttggattcagacaatcgctacttttaaagtacttaaagaagtcagtctttgaaatcttgcccgkattccattccagtttcatcattggagacttccaatgatgaaaaattggggaagaattaccttccaaagcctcagtttcctcgtgtgtaaaatggaaataatagcaagagatattaaatgagatgattcactcatcgattcatcaattgtttatagagcccctgctaagctaaaaactgttttaagtgttgacacagtggtaaagaaagcagaaagtgtaactacttttatgaaactgacttcctagtggtgagagataacaagaaaacaaacaacaaattgagataacttcagttatagataaatgctgtgaagaaaattaagtagtgtaatatggtagagtttaatctggccagacccagatttaggggtgaatgcacttttagacagagtgatcggggaagatccttatgaagaagaatcattgagctacctgttggctgacaagaatatggggatccatgtgagggagactggcaagagtaaaggttatctggcaaaaccaaacaaattggtaggttcgaggcacagaaaggtcaggcatctgtagtatggtgagtaagaactgagcaggttgtggtgaggctagaaagataagcagaaggcaggtcccacagggccttgatggaaatggaaagagcttgaattttacctgaagtataaagggaaggaaccattttaagttcttaagtacagaataacctaatcttctttctgtgttgaagagatcactttgactgttatgaagagaatagattggaagtaaggcaaagcctggaagcagttatgaggagactgaatgggaggatggagaaaggggatggtgatctggaccaagtgttggcagtgcaggtggaaagaaaggaaagactgacatagaattaagagaagtggctgcatggaaaagacaaagacattttagagaatgactttttttccccatgagcactgggatgggaaagagccaaattagggggtcrgaaatccagagttatgtttgggctgttattgatgtctgattttcattaggtggtagagaggtcaagaaatccrttggagataagaggctgaggcccattcagtaggtctcaactggagacataaacataggagtcattgcattcagatggagcttaaagctaagggactgcatgtgacagtgtaaataaacatgtagagagkagcagatgactggtttctgagccttgggaaacttcatatttggaagagacacaaggaggagctaggaaaagatagtgagaagaggtagccagtgaaaaaaagtagaactatactttgctttgaatgttgaaaagggttggcattatagtgagaattcagtaaattccacataaaaatctgaatttatgtctcccctagaaaggttggttgtgaacatgcaattggtaaatatctctattaactttaatattgttacaaaagtaatattaaggaatttataatatttggaagaattagatgtctttacctaatatatcccttgctagcttaacaattagaaaaagaaagaggtacatcttaacataatttgttttaataaaaactacagaatatattgagagactaaagaattagaaatttaactgaaaatttcatgcaaaggtaatgctctgttgaaccattttgtagcttatgttttgttttgatacatattttaaaatattgtttaagacaatacttgaacagattgggattgtgtgtgtgtgtgtgtgtgtgtgtgtgtgtattggttaaataactggtttatttttaaactgaaattaaaccttccatttctttgagaaatttaaaaagtagttgttatcaatgtggcagatattaggtagaatctaatatygtgaaaattaaactgcacataaatagatataaatccttttgtcagtgtgtgtatatctctgtgtgtaattttgatctcaggcttggcaggtttccttaaaacttttttttagagctacttaattttgtacttactggtggttagctaataagaaaaagctaataaaaaatagtgcttactctgtgccaggcacttctgttaacattttataaatgttatctcatttaacaagctcatgtcattgtatagtctagcttatacttgtctttaacataagcaaatttgttaatttgtgtttcctgatattatcataaaatttactggttgtcatatcctaaaagggaatagttcaatttaattttccttgttctaattttaaatacagtactaaggttgagaaagaaggggtcaggaaagggaagtaacattgagtgtctcgtgtgcctggcactccatatgatgcttcaatgcacaccaggctattcagcctcagatttgtttctacattgcttctagttctacagattattcaacgaatgtacaatccttggtcactagtcttaatagggaaaacagaattatggttaaaacaaaagagtaagtaacttaaatatgatctatcggtatttattttgtattatgatattttgcttaagttgaaaaaagggcgcatcaggtgttttggcagtttactgtgatctcaatagtgagaatgtattgaaaaatctcagtacaggagaaagctgtgcagctttctcttcctgtcgctgcttaattttcatgtagatataaagccgcagtttaagcacatctgcttaatccttatttaaaagactaggagagaactagaaagggagggagggagaggaggggaagggggaagagattgagagaaatctctcccatataacacaaacactgtattagtgtgtgagaagcagataatcgtgcatgtaggcactatcatttgtgaaatcagaaagcataatttactcccaatgctgaataatctagttgtgtgtaagcaccagagagatatttaaatacctatccaataaaagataataaaagcctagcaaacctaagtaatccattttcagatgttaatccaattacgtaaacaaatattacccttttttttttttggtcattgtttcaaggataaagtgtaaatgaaagaaatagcattccatctaggtaaaagaggaatcagcatcattgaaatgtgaatagctgtgattcctccttgctgaatggtaactttagaagagagggaacccaggagtccatccagaggctcaaggaataagaggttctcacccataggaagatgaaaaatactttcagggtgacccatgagggaaaatcaccaaagcctttgaaataaaagattttcccttttctaagaataaaagatggtgttatgtcaagggcggctcgatggtgtggatgaaagaactattgggaatggctactgaragatcaaaggcaagtggaacctcaaaattctggaagtrkaacragtcagatacaatataagaagtacttcaaaggcaagaaaataagaataataaaaatacctttagttgtcaaatgtaaaatttgtgccagttttgtcacattccatttttcaggaacactgtaaaggtattttctattaatatcaatttaactgtacatatcttcccatctatcttaattagtcacttttcaagaacaaatgtgttatgctcaaagcatccaaaggacttttttgttagccttaataaaatgctttctcttaaactaaattttaatttagtttacatgtctacgtataaggtggttatagaaaatgaatgtaaaatcacttcattaagtgtaacaaaacaaaataatatgaggaattgttatactgtttaagcatttgaaaaackataaaggagtatagaaattttgttaccactactatgattagtttctcatttggtttttcactttaagaattggaataaaagttgaaatcttgattaaaaaaacaagaaatgattcacaaattattttacaaattgaaatactgaaatacagaatgttcaaccactgtcaacatgaactyctattctgtaattaatctattctataaacatctgtatttgctaaagagcaacagatcaaggaaaagaaaaaataatccttgccatccatagagccatgatttttgtggaatcttcgctccagtttaagttttgtcagtgtctggaagaaaatacttcccatggatcatctttttgctaaagagtattctttacattttaaaacatatgaatatttacataaaggtgtttgtggaaaaggaaattatgtgccttttattttaattcacccattattctattccacatgtaaagtagaaaatactactttaagacaaaagtaaagcattatttatttaaagatctattttgtccatgaattttatcagaggtaacgcttcttaatgttattcagtgccataacttgccttttttctaggcctccattttatgaactgaacatctggatttgatggcaagaaaacatttccttccgctggcttttctaataactccctcttacagatatgcatgcctcatgtttgttaataaaattgacgtgattttaatatctggtattttaacacactgtgaattatggaattttcagtggctttatttaattaaatgcattttaaaatccttacaaaaaaatattaagagtaactctaaaatgtattagagccacagatgttttcctttatagtgttaattgatttaaggtccatcaaaatgctgttaaaatgtctagaggttaacaataacagtggcacatgggtcagattaaaattctttttgagtaaaataaataaataaatgacagcttattttcttctgatttaaaaaaattagctagtggattgaaacaacaatgtgatagctaagatttcattctctcactttataatgaaaggagatttaaaattagggattatatggtacacgaaaaatttatatacacagattacaagtactagtttttttagtgaagaaaakacaactatatattttctctttttatctgttgtcctattttacaattgtagcaattaatctgccaaactctttaatcaataaaatatggtatttaacaaccaaatttggcccctccctccccttaaatatatttccaatgctccttgctccattttaaacctgctgtcctttataagagaataatatattttgtaatttgagaaaatcatgcaaaggaaagtttctcaaaattcacattaatatgtaataatagtaataaatatgtataaccataatatcttagaattttacaatattttatagaaaacatgaatattaaagtgaaaatttaaacacatcaatttttcatgttaaaattactaagaatgaactacagattcatgaatactaagggcaacttttatctcaggaaatatatcagtggactgaaaatgtcaaatcaattcaattaaatcagtaataacactttgctgtttatgtggctgttttttcttctatttttattgtcttagattgcatggatacaatcaaaataagttaatttgtatacaggatataaatggaccagagaatgtgtcttctattaaataataacaaataagaataccttttattttgtgatggtctttactatttactgagagacaagtattgttcaagttgccgkttttttttaattagctgacatatttcctgcttttatttgagttagaattcctgtaccaaacattttaaaaagagaaaaaaaattaaagaaagagaaaaggaatttggaaactactataatgtaaagtagcattatttatacaacaattaattttagagaagcaagagaccttagaaataatctatttcaacgcatctattttacaaaaaagaaaattgaaactcatagatatttagtgacttgtcctttgttacaccaaaaatgagggaacttggtctagaattcctccagcatattatgaggtatttgttctgtggcctgatacaatgaaatgaatgttggattaggcattttgggacaagttttgaatcctaactctattactaattcctcttcactagactgagattctggtatgtggtattcaataagtgacttgacttctttaagcyttggtttctttttcagtgagatttacagcttagactagtttctgaatcttgaccctgtggacaatctagttggagaactgagatgacctgggcattgtaggatgtttagcaacattcctgcctctgtaaactagacacagcagcacatttacccaacctgctctgactgtgacaaccagaaatgtctccaggcattgccaaatgtcaamtgagggcaaaattgcctaccctagccaccttaactgaaaactacaaacttcattgaaataatttctttatggctcccagcagtaacactgtgctattctagaccagttggttaaactactggatgcttcatcagaaagcacccactaagcatcactcaccatgaagttcgttgggtactctatacaatgaacaaaggagataycacataatttttaaaaaacttaaaagattcacaggtgagaattttgtagtaacaattaagtattaactattagaaaaatttaagaagttttaacaaaatgatataaaaatatattcactataagtaggatgtaatttttgtcctgtaagagttatccatgtatttacgaattgtacctaccagaggttacaaaaatttggtcattatttgaaagattaacagggacttatttccaatcatagatgttcactatactattctaagacatttgcaactgtgtaaggcagtcatttccagtaagaattgctagaacaaacattaagcatttcacagtgaaaagggtcataggtatattttcatcctttgcrtatagaagaaatagcaatctattattctcagtttttgacttaaaaggtattgttgcttccctttctttccctcccctactcaaktttttgcccatggatccagatacctacaagggcctaatacagggaaagtgcactgtgtatgagctatgaaggcacaatggaagcttgcctggcaatcagtgccagaacagacagctagtctgatgaattctgctacacatcacagggctactagttttttkttttttkttttttttttttttgtcatacattactgcaagttccctgaggaagtttactgatctgtagttttacgagaaatgcacgtcatggaggtggcgtgggggagcgggtgaacaaggaaactttagttgctataaaacaggagctgagagctcaagcaggttggttatgttctgccagatggagataaaactgtggcagccacatcctgtgactagaaattgtttaagtaggcagacctgttggaggactaaagaacattaggcaaggagattaaattagtgtaggaaaaaaaatcagttttgtttaaaacgaaatatctacttgtgttaatagaacattctaactccaccataggatggaatcaagaggttttttttttaatacatatagtgtatatatataaatatatatatacacacacacacactgtatgtattcctatgtagattaaatattttgatttacctctttctagtaaagcaaagttcattctgaaatccaaaatattcacttactagagcagaaaaaaattagctgtgcatttatgctgatcacagtgtagataattaatctttaagaaagtaggtttttmtgtttatagttgataaagtgttagtggcaagaactttttctgttattgaatattatcatcagattactcgtgctttccattttattcctttaaaaaaatccaacttttgtaagccaccactattttctgaagattttatttctctctaagctaagaaaggatgtcaagaataaaccattttctccttttaaataaaaatgcattcactatagatattcatttgaaatctcaaacatacctgaattaagtatactcagttttgtgagtgaaaattaattattatttaaaacaaaacaaaacaaaaaaaatgttcagtgttttcattttacttctcttgctgcttttgggctctgactgggcccggaagcagaagttgcaaaacattatgagaaaacttttgctcttttcttttttttcttcaatctccacccatatggaaataccagaaatctgaaaccccattcttgctaaatattcttctcaggattgtatctctactgcaggtcttctatgacgttttacagctggcctctttccattcagaattgctgttcatctttgaatgtctctgctttactcctgaatgaacacaaacacattttttttaggtttcttgttgacattggctttctttatagcccataaaaaatgcatttgtggcatctcttccacagacaaaaatagtataattatgattcaatactcgatgaatgtgtgttaaactaaactgtgcccaagctctgtgcaacagtacaggtttttcacctttccaggggagagatgtggagcacatatacatttcagccatcctacatgcccacagggacatctttctggtctgtctcattggaatacccttccttatttggtttttagtttctttctgctttaagcacctttcagagagagagagatgttttcctttgtctttgtataggcagtgcctatcgttacagagtagcctttaaatacatatttgttgaattaataatgatacacatgaactgatgaggctctataattctatgagataatctggtatcgtgggaatattttagcatgttttgtatagatagactgacactatgactggtaatctgatagtaaaaatggcaaaatattgagcctgagtattattttattatgttgctttcttatacaaggagggaataaaataaagtgatgtggactgtaattgtgctcatgaaagacacaatgtatacatacctccttgagacggaatgataaggataacgtagaatgtttaccatgatttatcartctctcctatataagaaaaatatttcttgtcctgaagtggtaactttggtgaagtcttttgcttgctcttttacagactaattaacaagttttctatgccggctctgtcctttcctctcctctcacccctgaaaagtggttaaaagtttggcatttgttacccagaatactaaatgtaacacatatgtggcaagatttgatggaattgcacttctgttcttattatgttcctttctggaaaattatgacaatttgtgtccccttagagagtgtagcacagttttctggttgctcctcatgataatccaaaaaaaaaaatccagctaacccttaccttttagagtaagaatctttagaagaaagagtgctttcatcaaatcatttgagaacgttaagttgaataactgatacggtactaccctacagacatgcgcaggaagtatctgcatttctgtggcgttctgctaaggaaaagaattttctttccagacaagatttttcaaaatcatattttaaaaatatcttaatgatgaatttgaagttgagaaccaacttatttcaagtaaaattaaaattttgagagataagagaatatactttttttaaggttagaactcagaggccattatgacaattaatgggctagtggagacacctggtctctaagaaggagacaccagcttcttcatgttttgatttctgccttgttctcttgtctgtcaccactagacacatactattttatagtaattacttgcatattttgtagaaaaggcagctgtgttttctacaaatatttcacaaatgttagtattgctctatgccaaggarcagaagacaaatttgtggaaaagatacatgtggcccctccccaggtgggatttcttgtgtaggccccatgcagtggagggacagagggggccagtgctcattttgaggacacgatagttcggactgtctgaggaaatcsacagtgtgtgtttaatgaccaaaccaacatggctttgaagaatayatatatatttttttttttgctttttttttttcrttgcccaggctggagttcaatggcatgatctcagctcactgcaacctacgcttcccaggttcaaggaattctcctgcctcggacttccgagtagctgggattacaggcatgcaccaccatgccttgctaattttgtatttttagtagagacagggattttctatgttgttcaggctggtctcgagctcccaacctcaggacctcaggtgatctgcccgccttggcctcccaaagtattgggattacaggcgtgagccactgtgcctgaccaagaatatttttcttaatttttctgtaaaactagttgttttagttttcaaagaaagatattttggtagtttttctttaaaatgcatatcatcatacagaaatcattgtccacgtatatggacatatatatctatataaatagattatatctatataaatatatagatatatttgtccatatatatgtccatatatatatatgatcttttttttgatatagtgtcctagacctggaattcctgtgttaaaaaatgaaaacattttcagtctcttcatatatattgacaaatggctttcagaaaagttgtttcctctattctcttcctaacattgtatgagtttcctttcacatacttttgtcagagtttaattttatcattttcaaaagtgttacttttataaaaactggtatttcttcaatttaccattttgtgattaatttaatttttactgtgttcagggttttatcatatgcttattatttacatttcctttgtgaattgtgttcctatgatttgcacatttatcttttgtgcagctgtgtttaaattttgaatataaagttatatgaaagaggaaatatgtaatttacataaacacacccaaatatatgtgtgtgtgtgtgtgtgtgtgtggtgtgtgtgtgtattctgtgttgaaataaatggtagaaccaggacaacaggtagaggttatgaggttgtcatctgtgacacagtctagaggagaaactgtgtgggcatctatcaacttacctttttgaaagaatcttaactattagtttctggaatattcagagaagacttgtaaggccaacatggactctagtttccatcctcctgagaagacattccattatgaaatctaagtaactttgacagcaaacccttcagtcttatcattttcattagataatctaccaccaacacaatgatccaaaaatgcattatattcttgcactggagttcttcactttttgcttcaccccaaaactgccgctcctaaccacatgcttagctgctaactttcacaccaggcttatgagaacagtattttcagtaagctctcttttcaattcctttcacaatggagctgcagaatctttgagttgaaagaagccttagaggtgactaggatcaatgtatatatatccctcttaccacacacactcactgaatattttctaaaaactacattaagaaaaaaagaaaagcctaatttagtgctgaactgctgaaatattttgaaatttgtggtttcaaaatcttaacactgttaattgaaaccaatgtttctcatgccttttagtctctggactcctttttaaacattcttaaacataaacctaatttttagcataattgtggaatataaagaggttttgtctatgtgggttatatatatttattgtaaaataaactagatagaatttwaaaatatttaattatttattaaataataataaatcaatatattaatataaatagcacatattgtatgaaaaacaaccagatattataaaacaaagatttaataggaatagtgtcacttttttgcatttttasaaatcttttaaatgtctgtctgaataatagatagctggattctcatatatgctttaatattctctatctgttgtaatattatataccatatagtttctggaaacattaattttctactaatgagagaatgagagagaagaagaaaaataacttcttagtactgttaggtaaataataatactcataacacttaattaatattattttgaccttgaagaatctttaaaaggttcttggggactatcttgagtctccagaaaacactgagaaccactgatacgccaacaagataaaattcttatccttaccgcagcatggaataggaccatactttcttccttataataatacttcaagtatttgaatgtatttattgtattttcatctatactattattttttaggacaaaatagacttctttaagttttccgtatttgacacattatcttgctcccttccccactacctacctccggttagcctcctctgaatactcttggatttcaatttcatttataatgtgtgatattctggactggacacagcacttcagggacctggtatcttgaatcaacaaagacttgtcttccaaacgatggtgattaagaagccaccatgtccaactggtcagccagtttttatattgtacaaatcagcaatctcagagtcaacctaaccagatttaggcaaggcacttccatgatgtattgatgtattggctattttattaatagtaatatcaataaaaataatcattaagataactgataatattcaggacttcatatgtgctagatgctatgtttaatgcatacatttattcactcttctaattcttaacaactttataatgtatatgtatttcttattcttattttatagataaagaatctgaggcatggaaaatgtaggcaatttatttgagattacagagctaataagaggcagagccaatgtttgatctgaacaacttgattctaggatcattttggctgggaattttctgagagctgtgtgtgtgtgtgtgtgtgtgtgtgtgtgtgtgwgagtgtgtgtgtataaacatgagaccatattagtatatacacaaatgtcaatatatattttaaactggaatgttttaatagagtggcttatatgatagaaataagagaaatagaggaggatggaaagggacaaaaaaagggaaaagtaattaggaatattgaaaaacctaaaatgtagttctctccatattctggatactcctgcctttttcttccactttccacacattgaccagtattcctttctcctttcctaaaatagttttacagatactatagatacccttagctatttgacagttatgtttctgttcttttaacatgtctgcttctataactgtcacacttaaatgttttcataggaatcatgaaaactatagtttttcctccaacgtaaggatctcatatcacgctttcattctgaactaaccattccctctctgcagttgatgtaactgtgccatgtgaccattgtacmcatgtgggagggaggagctgaattacgcctgacccctggccagagcaagagctactggccaaaggggagattgagcatctgtgttgtacttcccacgtctcttcacctaggaagtgcaatagatttctgacgagtctatgattacccactgatgaataaagacaatctccctgcacaattgcactgcaggcaagactgaacttatgaccaccacttctgtgtaattttgaatttcttagacctgaaccctgctgagtacacctgcttccytctattccttgctgaagttcattcttttcagtgcgttaatggagccaaaccaagctggtggtggtaacaatttgaataataatagtctttaactttttatcttttgaaaaatagaattctcaggagcacttttagctataagattccttcatccaattaaataagctttaagcttcatgaaaagtgtaaaagggcacaggtgcatttgtggaaatagaaggaagcaatcttgagcctgaatacattgaggtactggcaagcttctggaagtagttgaagaagacttcagttagaagcttggtcaaatggacaaagccctgacctggacattggagacctgtagccaccttctgaatccacagctgacctagtggccttgatatataatattgattgcaggatagttttgtgatggttaagattgcaggctttaataactagatttcttggatttaaatcccaactctgccacttactgcttttctctgggaagagtgattaaccgctttgtgcctcagtttccttatctttaaatgaaaataatttgagtgcatacctcacaggtactaaagaataaatgattggaaaataaacattattgaatatatgttagtaattattattttcattgttatgctattattatttttattattaatgtatgacatcatgttacctgcctaacaacagagtattgagacaaaagcaaaatattttttctatattaataatcataataaacaccactaatgtttccaaactatacttttttttaaccctacatgcctttagttcatggaaagaaaagtatgttaaagatgctatgggggtgaagagaatgataaatattattatttaagacaatgtttgctataatttttatatatcaaataagtttatatgttctcagaaaattggtctttgaataattgaggacagtgtgggtttttattctgtttctggaaggcggtgcctgtggctgtgagaaataaggaacagaccatcttcccacatttgagagggaactatacaaaaatgggaaaatatttgttttaaatatcttttggatgtgaattttgtcataattgcaaactgttttggcagcaaaacgaattatttcggtagcaagaagagacttaacgatgctatgtgggagaaaaactaagtccctactatctttctgagagcacgtctcagaggacatgatgtgatcctgtaagtttgtagcaatcttattgtgccccagtgcagacactccttcctacttccctgtagaaaacagaactgtttttttaaaattctttctcaactaccatttttaatagtcatgttacttgatgacaaaatctgatacagtggcctttaatactatatagtgaatgatttttgaaaatttggaaaactctaaccgaaatataccaggaactgctctcctcttcatctcagatgtctacttcctcttcagacctgtgtgtgaagctctagaataggctgtttgggaagactacaaaatctcctctccgaggtcccttataaccctgatagttgctagatttgaaatcaaggatttattctccccctgccctgagcctctcccttatgtccacataggctctagcattggaagaaatattttaagatctctttctttttgactttgtgatactcccatattaaaaatggcttatgacaggaaaaggacaaatatgctatattttttcccttaaggctaatgttctcgggactaccatgaaaaatccaggtatcctaatctggagggttaccctttggatctgaatgggattggagtcagtacaaggggtggggagtgtttttagaacatcccggcagcmtttttttttttttttttttttttttgagacggagtctcgctctgtcgcccaggctggagtgcagtggtgcaatcgcggctcactgcaagctccgcctcccgggttcacgccattctcctgcctcagcctcccgagtaggggggactacaggcgcccgccgccacgcctggctaatttttctttttttttttttgtattcttagtagagacggggtttcaccgccctgctgccttttaaagcaatttaatacatgagttaaatatcatattttaaaaatagattttattttttattataattttgatgaatgcatttttgtcaaagttgtcaaagtcaagaagtcattattgagaccctgagggtaaggcaggagccaagtgagaacaagcagatgtcaaagatggtgaaaaacyagaacagccaggtcccccaggcatatacagagaagttttgcaatggcaggtccccgtggttgtctgacccagacttccaccttgaggtaactggggtaactataacgatattttcatcctgatctcttcatgcagttatatgtttccaagaacagataaactgtgaacttaatacaagtgtctcctttmcttggattctcaccatctgggtggtaaacatgacagaaacattcaagtatgttcaatgtagtacatggtaacaaatgctttagcacagactagggagcatgtctggcaacatgttggcaaataattaaattggcacattcaggataaaatgagaacatggaaaaacagaatatgattctcttyccagccctggaaagacatcccaagtgtacgtattgtttatattatgttattagtatatctttaccagcaaagggcaggtcatcatcattcaatatgctcaaatactcacatttaaagacataggcactttgagaggccaaggggggagaatcacttgagcctaagagttcaagaccggcctgggcaacatggcaaatcccatctctacaaaaaatacaaaaattagctgggtatagtgcctgtggtcccagctacttgrgaggctgaggtgaaaagattgtttgagtcgaggaaatggacgctgcagtgagccatggtcacaccactgcactccagcattctagcctgggcaacagagcaagaccctgtctcaaaaaaaaaaaaaaaaaaaagagagatgtagggagcattgtggacatctattcatggagggttaaacaatagaattagacaaccatgtgtatgtgtggaatcatgtgttttttccacacatgtaggaaggagaaggtaggaacaatgaaaagattcttttagtgatcatagtggctccaaaacagatgctttggtatatgtaatacccatttatcttataaagaaaataaagaaataataaaagcatttgctaaccatgttagatgctatagtaaatgtaaaaataaagggtctgttaatmtattaactgagcttaatatatgatgtgatataacagcagccttcaaatatgcggagggctataacagagatcatgatgaacagacttttattctggcttagaaagactagacacagaaattaaaggcataaattactctacaagcaaagcaatcttaacataacactcctttcaaggtagactatgaatatttccaccaataatatatttattaaaatagattccttttcatttgtctttttaagttaaacataatcttgcttgaatgaggatgagtataagatacctcagtcatgaccttgtagatcactgcatcagccagctttgtattcagctatcaaacaaaataaaatgtgatcactagtggttcaaatacattggagttctacaactaaagatctaaaggaatgaaatccatgactagtacaaagacataataatgccctaagcaacttacgatattttgatgtttcttttctgacaccccattcgataggcttttgtcttcatgctcagcatctcctatctcatttgggatgctatgcgtccacacctttcatcacattccagcaaaaagaaagggaaggcaaagtggtaatatatttttcctagtgaggttttgcctctttattcagggatggaaaccttccccagaagcttttgtctacacttattggccagaaatttaacatataaccattcattgctgtcagaggtgggaaggagtccctgagaaagaaattattcttgttttccagcctctattgtagcatttaacaaggaagaatgggattatgaatagctttggaatgtttatcatgtcttctagttgccatagctcatagtcattttatatgattgaatctatattaggccttttatctgacaagtttcccaatgtacaaagactgaaaaaaaataattttcctcagatgggaataaagaatgtcaactggtctggccaagtgagtttggaaagctaagatttagccttgggtgcattattgatggacaataaaggagtaggtggcactcatccattcattcagttattctagctgtgctattgaatacttgctaactgcaaagcacagagctagatcctagtaagaatatagaaaagaaagtcacagtctctgccttgaaaacatatttattttatttctaggacaagacatctacacatatacaaactgtcaattcataacatgtcatggaaacataaaagaaggtatcagtgaaagtggagtgtttaaggaaatttccatgcagttgatagaattttaatcctataatttcaataggtagtagctgtgtctcaggcattctaggcagtgcacagcaagagaaaagattgagataaagataaaaactggaaagaagtaggcaatcagtcatatttctgcaaagcaatgttagaaaattgcatgtgttagcttgtatacacaacttagcttacaatgttagcttgtagctaactgaatacagatgtgagagttaaaatatactctcctaacagtagaataatgattgttagagtggcagggatgatcttatagaaataaacattggacaaccagcaaaaacagtgaaagccagccatatggctatctggaggaagagcattccagctactcaaatccaaagtggtatcatggtgtgatgtctttttttttatttttgttttagagacagggtctcactatattccccaggctggtttcaaactcctgagctcctgtgattctcctgcctcagcctcctgagtatagtcacatgccaccatgcccagctaagttatatataaacataagcacagagtaacatggtagcaaaaaataatgtcacccaaattagggttttgaagacaatacaggagttagatagataaagaagagagggaagggcataacacaaaggaacaggaagtattaaaatgtgcgtgttatggacttgcatacaaattgagtgctttaattttgccaagcatctttcataacactataaggaattaacagtatgagatagcataagtaagggggcctgagaacttacataaacacccttggtacatggaaagtaaatataaaatggtgctgataattctaattacatagtttatagaaaagatacatgaccaagcttgaagcaagaatgattgataaggaattaggtaggttctktataaggaaaggtgatttcagatcccaaaagggcatggctgaatgtttagcctttcagagttggggaatccatttcttcctgtggaaggattagtctttaggtgaatagataygtatcgaagggaaattaagagagcataagaaaaccccactttacctgccatctatccatggaagcagcaataagaccacctgagagctatggtacaattaaattgaagatatttgaacacataaagtaggtgtaatgtaacatataggctcaaacatttgaaagtgatgatatttggtcattgctggcctacaaaagaaatgattttatgtgattcagtctaatggtaatagttacaaaggattgacttcttcgcaaataaaatggttgaaatagtacccaaaactagcasattgggcaaaaattacaaagaaatatctaagtggttgcatagtaaccacaaaaatgaacacacttattttcagagttcaaaccgtggtagatttgagagtatgtttggaaatgactaatgcttagtgttgtttaccctgtcaccacattcctgcataaggctctttatctctgactggtcatgctcacatctgttttctgccagccttttctggtgcccgcaggcacccacctgcacccaatgtcctccttttatgctttctggcctcctttcatgtactgtgtggtccaccatactacctaatctgctatatactcacaaaactatttacttcttttgaaaaaaatgtattattagatttaaatawatgtatttatatttcccttcactttttaaagttttcactttatttttatactatgttttaagcttccctaatatcccactgctgaatcccaccgacatggaatccacggcatggtgaatccctgacttacccattcctactagaagtagagccagaatctaatccagacctcctgccagccactcccagaccccttctttcccccaaagaaaatgaagaacatattttttgtgcaaagagatacaatcaggaaatttttttaaaatcagcttttattttaactgaatagcttacttagtcctggggctgtaaagtcaactgaatgatggagtcatttttttcaaaatgcgacatcttcttacccacttctcttattactctcatcattatgaaaatcacatttgtgaaaggaaatgaatttatatcaggttttctttggcatcacccaaaggaccttagtaaagaaaattaatactaattttattttctattgtgagcaccttaatacggaactgtaagaataattactatttttaatgccaaatgaagcatgtaagtattactagcttcttttttgtattaacttctatacttatctcaggagtttttatagtgatatagacattttgtgaaatagatcatgagtgaaacatagacctggtatagcttgactggggcctactttacagatttgtccttaagtactgaatataaatgtttctgcttcttattttccttagcatttttaaagaaagtcctggaagccaaaaatctccatgatgaaatatttataattattaatcactgttatatgaccttattatgtatgaaaactatattcaacatcctaaatatgaaatgtgattagttctgattttaaagatttgtgataaaacaagacaccattgatgaaatacatagaaaaaggaagacaaaatagcttgggacacattaataacttacacaaaaaawtttaaaaattaaatcttctaatagatttgatatataatataccccagaaatatttacattatattttcaaagtctagagcatttcttccatagactccaaaactatttgtatatattatcatcgaaacacaattttgagagaagttggaatggcagtgcagttagcagataaaaaaaatacccacttttctttacaagtctctatctaattcatactccctattgctctttcctgcttcacaaacttcttaaaagattttttcatgtggtgtgaatatttaaaatctgtcttagcaattttcaaatatacaatatagctggccatctgtatttgtgggttttgcatcctctgattcagccaaccatggattgaaaatattaggaaaaaatgacgaaatacaacaatacatcataaaaataatacaacttaaaagacaatacagtataacaactatttacatagcatttattttgcattaagtattataagtaatctaaagatgatttaaggtatatgggaaaatatacttaggtgatgtacaaaaactttaatcatttcatagtgtatacatatatcaaaatgtcacattgtaccttataaatactcataatcatttgtcaattaaaaataatttaaattttttgaaatgtaaaaaaaaaaaatttttctagcctcccagtctacactctcacttttcactaacccatttactgctttcttgcttgttctcccagcacaccacaaaaacaacttccatgcatacaccagtatcacccccctcacccccctgtttccaataaattaaacccaatggaccaagctaaagcatttattatacttcacctctcagaggcatttaacgctattgacaacttccttcttttcaaaaccctgtcctcccctaattttcatgaaacatgaarctaccttctagttctcttatttatctcagccatctggctcctctttctctattcccttgttacctattggtgttggtatgtattccattctagaactttgtctcctctactgtgatgctatcatttagggtgaaatcaactactcccattgcttaatttgtcttttataaatttgtgacttctacatctatagctccagttctgctgtcttttttgtattaaagaccaatttctccaactatgcactagacacttccaactagtatcccactggtatctcaaattcaacattattgaactcaaaaacttcttttgttaacttgccttgctgtcatatttcctgtattggtgaattatatcagcttccatagacttgcctgagccaatataacctaggacatattctccttttcccttaactcagcattgactgacaaagaacatgctaggaagtctgtattcttcatgtcttaaaatattcacctctgcttccattgccacagctttgatttgggccactcacatttctgcagtagtctctgagattgttatcatccatatctctgcatttttcttgctaatgagaccttcattaaaattattttgtaagtatttaattatttagcagttcatgcctttccatatgacttaaaattccattgggttttgcttttttcctgtaacctaaagttacatctgggttggtcaaagtgaagcatagtaactacattccctttgatagtgctgcaattaagaccaatgaaatgtgaaggagttttagggaagctttttcctcagtcttaaaaagagacaaaaggaaacaatacccctctcctgtctctggttcatatttgatgagaatgtggcacctagtctttttgagaccagtggggtagttaggcccacaccctgtggatgtcagagcaaaaatatggaaggaatctgggtcctgataccatcatcaaaccattgagctaattccgttttgtaagataataaattccttactgtttactctgttcgagttccttttttttctgttagttgtagctgaaaccattttaactgttgttttttgtttggtttggttttgtttaatacggagtcttgctctgttgcccaggctggagtgcagaggcgccatctgggctccctgcaacctccacctccagggttcaagcgactctcctgtctcagtctcccaagtagctgggattacaggtgcacgccaccatgcccagctattttttttttttttgtatttttttgcatttttagtagagatggggtttcaccatgttggccaggctagtctagaattcctgatctctggtgatctaccaatcttggctacccaaagtgctgggattacaacccactgtgcccagcaccattttaactgtattctaaaagcattttacagcctgctaatacataacctcatctccaaccttgcttcctaagttccactctgtgttccacaaatgggattaatcacctactgaaagctctataataattcctgtcacctgaggatattgttaaaacttctcagtttgtagaagagggccttcattatcagcatcacatttattttccagaaagatatctagcacccctctaccttacatcttgcttttcagccaggaagaacaactttttctttctgaaatgtactagaatctcagtgttgggccacattgcttttttttttctaaaagactaatcgtcttcctttcccacctaactcaaacatatccctcttaacttagacattacttattttggggaagtcttccatgattaccctaagaatagggtaggcattctttctctctgcttccatagaaagtaggaaactattgcacttactcattgtaatgtggctatattttgatcaaaataattaaaaaatactgtgtggattcaaatttttctcagctactcacaagctgaatgatctcacacaagttatttattgcaccttattgtgctttctttttctctgaaatagaggtaataattatacatacttcatattattacaatgattcaggaagctaatgtatatggtatacttacatatatatatgacctagtataacgcatgatacataataagtgctgtgtacatgctcagtcaaataatggtcatttgaaaacatttattgagtaaatgaagaggaaagtgtttattttcaatacattcaaagatattgttttggttatttccattacagaggcataatcagtttactattcagaaaaatgcaagagtacatttttactgctcctccagtgatactatggaaaacaatgttttagaaaaataaagaaggtgtgaataatgattaaagaatcatacactctcaaagtgaaacaatttcccaagaaatgcggtagaataagccttttggtttctgattttttttcttaactttgcttgtatgttgtagaaagctaatctaaatttaagaaattgaaattttgaagtattaataatgtacttctctcccaaaattgttttaatgtaatgatttttgccatatggatgaattatatatgcatctagaggctaaaaaccataaaaacaagcttcttcttagtagacttttgttgtttattttgtacagcataaagcagcagtcaaaaagttttccaaacaaattatcttatgtattttgactaaacccagatttatcttcttaaaatgaagacctttgttgtagttgcatttgttcctcatatgcagtagaatgacccagcctctttggcttagaggtagtgcctcctttttacgacacttggagcggcatctgatgctcatcacttcagttggataaggaatgctgtccagtcacagagactcatgagatcatgtccaatgaaggcatttaacaataaattcacaactagtgagtgagaattttataaagcagtttcaagtattaagtagataggtaggtaagctttattatattttttaaatgtgaaattttacaattgtgaaaatttacaattttacaattttacaatgtcaggatggataacattgcctttttagtaatggtagccttcactatctgcattatgactgtacaataataacatataataatatatatagcatatatattttatatatataacataatatataacatatataataacatataattataacataataactggggctatgattgcaaacatttataagatgtggtatgaaaatgtcccaatcacaaaaacactcaatttaaaaatgaaagaaaatgaatctatgctatgctttgcttcatctttctctgaactagttacaaacaaaccttttaaaaataagctttcaatttgggaataattttagatttacagaaaagttgcaaagatagtaaggaaagtccccatttgctcttcatttggcttcctctaatattaacatttgccaaggttacatttgttaaaactaagaagtaaccatgggtacaatgctattaaccaaattacagctttcatttgaattttgcccatttttccaatattgttcttttcctgctacagcatccaatctaggacctcatgttgcatttatttcttatgcatctttagtcccctaggatttgtgacggttttctgtcttttttcttttgaagactgttcattgcctctgttagtttaatgatcctctgagatgttattcacagtaaaatagcatgtgaatttcacctaactaaaaagtttatttgatccaaagccctgattttaagaatttgaaagaaaaaaatgactctatttttcccagttctaaacattttactagaataataattgtattctttcaacatggaattaatgttgatgagaagcaaacatctaaatttaaaagaaaatatagtttgttgagggaggtaatagacaataaaatgtatttattatagaaaaaattcccaaaactttctcattaaatgtgctttatctttacttcattactaatatttagcttttattcttttaaaaagcatatgccaatgataatatctcattaataataagaatccatctaattttagcttgatcttccccctgactaggtttgattggattaaatcatcataaagagacaaaataatgcaaaaagtgataaatctataagcctcccctaaggtttcccatagaatgatcaacccaaatgtgctctttattttatgccatgaaatgacatactgtgtcaagaactgaatttcatcatacatgagacgtaagactatttttatatctctgtaaattgggtatgaattataaaagtatgctggtaaactgatcacttgagaacataaagtcaactttccctggaagagtttctcattataaaagaaaggcaagcatcttcttcctaatatctagctttatcaggtcaggggctatattctcggaagggataagtaatttctgttgtatctactaatttcatttaaaaagataactagagaatattggaagcattattgtagaactgtgtcaaagaccgaaatatcattcctaccttagactgtacctcaagatcgaagctctggatgctatctggaattaaaatgtttgcattaagtttaaaactcagtaaaataaatgtttgaaatgaaaaccagaccaataatgaataattttacttagacctactctccaaatgtgctaaaagacttgtaaaagttgttgttgttttaataactaagtcaagccagttttatttaattcaatacatggagtattaatgcgctgtatgaatgccgaaggtagtattggacgccacaatctttaggaaccatgcttctgagttttaaaatggtgactagtttagcatagattcaacataagcattaggtgttcttttgacatttgggaatcagccaatcaacaggaggaatagtaaattgaatacgaacttgaaagagaccatgtctttttttcatccaactgtgaaaaactttctttgtacaattgttaaacttaagaaacagatggtagatctgtatcagtcagtgaggggtttctgaagtacttttctggatgaatgccaagaaaatgggtttctgagacttgcatggctctggatttgttctgagctgtttagtgaagtgagggctggcattcagaacccaggggagggggagtagtcattcccattgccttgcatagagatagaatcacaggtgacaggtcattggaaaatcacttcttgagagtgggtatctttattttgagttggtatctttttgagagttggccactcataagccttgcttttgataacatttctttaaattcctccaaggaacaaggggaagtgcaaaaggaatacgataaagtgcagcattgaatgagataagcatattcaacttaaggggcacactaaatactgtaatctgggagcataactcagatttcttttcttctttgctcagtataagttgcatgatcatagaagatttatgtagaagtcagaaatcaaggtcaagagggtaggcatatttagattcttaccctattcataattaacaataaaataagattttgtgtcctgattcagagaatggatggctcagtccttataacctcttaaattagttttatctataactggatttctgaatctcttttgaaaattactaccattgatggtcactgagtgaaaaaagcagaaggatagactggtgttaactgtaatgaacatttatccaacattacccgtgggcctgctatccattttaaattctaaaagcactttacagcttgctaatacatagcctcatctccaaccttgcattcctaagttccactctgcattccacaaatgggattaatcacctactgaaagctctataataattcctgtcacctggggataatgttaaaacttctcagtttgtgagagagggccttcattatcagtgtcacatttattttccagaaagatttctagcacccctctaccttacatcttgcttttcagccaggaagaacaacttttactttctgaaatgtactagattctcaatgttgggccacattgctattttttttttttctaaaagactcatcatcttcctttcctacctaactcaaacatatccctcttaacttagacattacttattttgggggagtcttccatgattaccctaagaatagggtaagcattcttcctccctgcttccatagaaagtaggaaactattgcacttacacattgtaatgtggctatagtatgatcaaaataattaaatctaaacaatactgtgtggattcaaatttttctcagctactcacaagctgctatccattttaccaagcctcctgcatgtattactatgtmtaatcctcatatcaactcatatataaactagattttatgattatggctctaaaaacaaggagactaaacctcggaaatatcatttaacctgtacaagaccttacttggctgagctaggattcaaaactaggtcattccgaggagaatataaagtccagcttttttttttccacacagggatgtatatttccaggtacagttttacattttgttctttattgtatgaacataaatatagatacatatgaaaattcgaaagcacatgaaagtgccaagaggaaatgcaataccatcttatgaaatgagaaattacacatatcttacagtgagtttcaaaattatattgctcaaagtatttttactgtggaaccataggcacaaactatagcaagagtaaatccaaaaatgtttattgttcttctataaactaactactgtgtaggatacaagggatgctgatttcaccagtgcctttaagaaggacaaatcaaattaaaaagtcaaaatgactgaaggtgataatccagatggtggtaacaataatgactaccatttatagaactttttgatgttgttcactcaacgtttctatttttattcaattataagcaaacagcagaattaacccaacattcagcaactccagatcagcttttcttacccccatgaagagctatcaatttaacaaccacagttgtaaggattcttaataagctgtcaatgagcactgctgccggtctagatggccatgccccaacaaaagcaaagccactctccctaatgctttttccaggattgctttttaaaggcaccagagcgagatactgacgcctattaaggcatctgagatgcaccgtgttggggtttagcctccatgccagccagcctctggttgtctaggtgagcgacagcaccataaaaacacgctgcgtacaattctggtattaggatcacaaaggcagagaggtgacaaatcctttttctttttctttttttttttgtaacctcccttaaagattctttgatgctttgctctattactgtgggcctggtctttttttcccccccagttttttcttctttaaactctggattgctattttcatattaatttgatgaccccatcacagtaccagaatattcctgaaaatagagttccaatttgatcaaaacataaaccagagtgagtgagtgagtgactagaattataaaggccaggcagcaggaaaagttaccctaaaccatctgactgctcaggtcttgcatgtgcaaaggggagccggaagaggagaaatctattatacatgcaacactgaactggagaacacggcttggggcctctgggacagttcargtccctgagctgccccctacttcccagacagctgctcctgcagtttgggcacatagtcgtcccactcagcctggtaacgctttctggccactggggccacgagcacgagctcgtacttttttttttttttttttgagacggagtctcgccttgtcgccaggctggagtgcagtggcctgatctcgcctcactgcaacctctgcctcccgggttcaagcaattctcctgcttcagcctcccgagtagctgggactaaagccgtgccaccacgcccagctattttttttttttttttttttgtatttttgtatttttagtagagacggggttttaccatgttggccagcatggtcttgatttcctgacctcgtgatccacccgcccccgtgatccacccgccccagcctcccaaagtgctgggattacaggagtgagccaccttgcccggccaagctcgaacttttgacagaaggatgccattttgaatttgccactgtggcctccagatccattgctgaggatgggctcgtcacacttcagcagcctgtcctgtttgtaaaccagccagacatagcggtggagatctgtgccctccggaggcccgagcccacgtaatggagatgactgggccactgctaacgtcattacccttcatgttgaccaccaggaaatgacgccattcagtgtattggggcttcttcctgccgggagcgtccgggtctgttaggaccaaggtgtagagtttccttgactcaagatcatcccatgaaatgctggtgggtctgttaacctaggtgggcgtcagcactttgcccagctcgtccaccgtcgccctggcgtaggcgacatgcagcgagtgctgcggctgcccgtccacttcctgcaggctcaagggcctggaccgcttgctgaggtccctggcatggctgtgcaagaacgcagcgcgcagctgggagtgccactaggcaaggcgcaggcgcagcggcgactcggcagcctctgaaaactagccagggaagccggggctcatttataggattttaaaaatattattaaaggcttcacaaactgtcttgtttaatagccacaacattgggaggccgaggcaggcggattacctaaggacggagttcgagaccagcctggacaacatggtgaagccccgtctctactgaaaatacaaatattagccgggtgtagtggcgcatgtttgtaatcccatatactcaggaggctgaggcaggagaaccgcgtgaacccggcaggcggaggttgcagtgagctgagatagtgccacggcactccagcctgggccacagagcaaaactctctcagaaaaaaaaaaaaaaatagatacaacaatctccttttaactgaagaggaatgatgtaaagttatataaagttcagaggaattgatgtaaagtgaatcgtaaagactttggaatctcctactaaaatattttaacaggaaagagacacatcagtgcattttacaagcagatcaatgtggcggtatctagcatgcatggggaagggatggaggaagttgtcagtttagaaactgagtataaacattattgaaataggacatgataagtacctggaccagggtaaaggcaatggaaaggaaaaggaagccacagaccacagataggaggaattcaaggactgtgtaccgaaattcaggagaatgatgtgaaatagatgctctgaatcctctattcccaggaggcagcattatggagttaggagaaaatgcaggagctttggattctagtagacctgggattgagtttttacactgttactctatattcgaagcaatatatttaaaccagctgtgtcttccttttgtcctttataaaacaagaataataatgcttatcacatagagatattatgaggattgtataagacaatgtatcaaatagtaggtattcggtaaatgttccttctttactaaagatagagaaaccattttctgatgtacaaagggatgaagagctggcccaatatgaattttcccaaagaagttaaatgaaaaggatctcatgatccttttcaggatttattatttacgaatgttaatatattattttaatattttctatcttatgaaataattatttggtcaaaacataagacaattgataggaatatacagcatggaaaatggttaccaactagagctgcagggtatcagggaatgtgacaaggcagcaaaatgtttctacacatgtctgttttttcargcattatctttcwtgagactatcaagtgtgtatttaaggagccattcaacttacttcagtgcatttgcttgcaaagggtgcaatgtgatgtttcctactggtagggtcgtatttcatatgtggtgatagtgttgctgaacaaataggaaatatccttgcctagactatattttatcatttcattatctagtggtaaaggaatgtgagttctatttacaaataaacattttgtcttacttttttctttgtgatctattttctccaagttgcataatgtaatgaattaataaagcttagttgctggccaaatcaatggtgactttttatgtttttaaatataatattaggtttaacttatttttgtcattaaaatatcatttgtgagtgcttttcaaaatgaagtgcttctgaaataaatcacataataaaactaaccttacttttgaaatacatttttattgaagcaaacacaaatcaatctgaaattcagcattttgtagcagttaaatgtatagtcaggcagcttcaacgtcaactagagaagttgtggttttaaccccgagatagggctgattatgctggtgctatggcaacctattgcaccatttggtagcgcctgtgtgcttaaccgcatgagctgcgcctcttcctttcctataaagactcagaataagaaaaacagaagtacacsgaagagaagaaaccacaagagcagtaaagacactgctgttagcttttagctgtgcaaacagcagtcttatgagaacaacacattgaaaacctcttctatttgaaagtgtagcttttcccattatgcctgggttcctttaatgattttgaaagtaagccaagtgtttctgttcagagttttcattaaagggaaataagaagaaataagcagtgcatttatcagcctttgcttttattgtcctcagctttaggagtgggaggcttttgtgcagcctcagcagacattttattctgtttgtgagatgggagattagtttctattaggtggactccctataatctagcatttattttctgcttttttttattatattgtagttagttcacaaaaaaaagtacaattttaattcatctcctggctcatttagaaagggttgtggttggtgctgtaaacacgtttctacataactagattaaattcacagacactcactgtcctagcactgtttattttctatggggagcttcatttacctattctttccctcaccccacttcttttacaaggtataggttgatcagcaaaggcttttgtatgttttcctttgtttcaaagtacagacataatataatcataacttttttttgcatgttctactatttttccttccttaaagatttgggtaaaaatactgaaggacagacaagttcatgctaccatttttgttaggcataggcctgttcacttttcttcccatttttctgaaaaataagaatctaccccttttgtagtcattgtccagcaatttacactttttaacaataagttttaatgtgtggtactctgaatcccattttgatggttatacataatatttactcatttttgagtccctaatagctctttagcacaaatactggatttagcattaaatattttttccttacagtgcaatgcagttgaacaagcatgggggtttttacagtcagacagatctgcatttaaatctagactcattttgctacaagttctttatttagccttgcatacacgtttttatgattttgagctttcatctgtgaaaagaagagaataccatctactttgtaggatttctataatgattagataaaataatatgtaacagtatttaggacagtgccattcacatagtacccgcttattaaatagtaaacactgttgatagcaccaaatacactaataaaagatttcaccacttatgcaaacatcttttgatgattctttgttctttaatgatgatcgtaacctatcctagaggaagcaaagagctacaaaaacatacacttactaagggattaatataattaaatggtttttgctatctgaagtatattgcataaatcaggtatatatccctggatttaggtaaatgaaaacagacattttcataagaagcaaaaagataattaatatgggaacaaacctattctggaaaatgtttaaaaagagaatatgggtaaggaagcatctttctcagttgttcttaacccttgtttccatcataatcaccatcagagctttaagaaaataccagtrcacagatcacgttaccccacaaacctactaaatcagattttccagcgctggagcccagaaatagtcacctttaatctaattcccagtcaggattaatacaaataaaggattgatattttttcttcctcaggataataatactggttacacacacataaatatacataactgataacaagccagaattttgtaaactatgttctcagaaacattgcagttacattgtacaaatgtcctatagtatgtccatgggaaaaaaatgggtttgtggcaaatacttttaggagatcttgagctaaacgaagtgacataagtttctatgcttttaatatattaacacactttataaatatctcaaaagggcatgtagcatgaattacttctgaaacaaatttgactatgggacatttaaaggcacacaaatctaaatcaaagacttcaatttgaccatcattgcacaggaagcgataaaattttccccctgacttgtagataaatagtttaagacagaaaaaaagcagtgtaactgattgttcttaaatggttatctagtagcctttattaatttttttgtcattaattgtttcgttaatcaacatgcctgaaatatataacatgatgttttaaaccaaatataaaatacctacaaatgcattcctagttttgaggtgtgtgtttgcaaagtcatatgtattcacaagcaaaaaacattattgtaaatattggacaccataagtcattgggagacagctagatatggttgctatctttaaaattttttaattatttgattttattcctctcatggccacaaaaatttgccttctttatcctcaatactgctttacatactgatatttttctttattatttgcattattatttaaaagtgtgtatataatttgaaagtttaaatagtaccataaggcctagagtaagtaagaacagtcttttgctcccacgactctcccctcccttgatattttgtgatttttaaatgttatcttttattgtagtgctgtttctttaaaacaaaaaaaaagatttttgccagtatctattgacttcttctcttgatcttgagatgttgctttttataacctcttgctctttgttcatgggtgcaatgttttctcatttctgaaaatatgaattgtagttggttatcctctcttttgctccttgcattgcctcattctcccaagtgcctcttttgtttatttgagctctatctttctttcttattagaggctttgttctagtgtttcttggatgtccatttgtatttaataaaaggcctcaataaagggatgttgaaattctttggacattggtggagctcataaattcatgtgctttaactagattgaatgaaatcagaaaggcactacactcactgagtcttagtttccttatatatcaaatgaactgcatgtcaataatcactaaaatcctttgcttctgtctgagtagaaatctttggaattattttctgatgataagcagaaagtcctttactcatgagattccaaaaataatattaatatacccaatattttaacataacgtctacataaagaataagaaaattattaaatagacactatttcaaatctagcactttcctcgtgtgtgcctgtgagcaatttactaaactcttttaggtcccagtttcattccctataaaaaaggataaataatgytaactcattggcttactgggatgcttaaaagaaaaaaaatacatatatattatataaagaggtgtgcatagtgtctgctacataacatttcagtaaactgttgccatcattattatatttactgataagctaatggagggtagaaaagactgtttcctgtggttctctgaaatcataatacctggcttgtcgctgcccagagtgcttactccataaatacttaataatttaatatgatttgttagatttattgtctgtggaccatatagcagatttctagcataaaaaaagtgcaattctcttatttttattgtgcactttattattatcatgcattgctaagaaaggaaagccatacatatctgttttagctgacccttattttttgtcttgatttgcttttttccacttttgtacaggctttatgtttatggaggtcaagtatgcattctcaaccttcaaaacatgctatcattcattttagggcagatgctgagaataagtatttatttaatctattctattttacccttctgcccttgtacttttcccagatttgcagaactagacaggtttaaattccctaggaaatagcatcccatttttttttcttttttttttagcggggagggagaacgggtgatatttaaagcccaagtatgtcttttgaaatgccgttttcactcaaattgattcctagtttttgctgaaatctctgatcagggacttaggggtgtgacttcaaggtaactttgatttgtgatcatttaaacattttgagttgtaaaagaaacatattgggaaaggtaaattcagtaacaatacatgtgttagaataacacagctttgaagatcaagtgttctgttatctacattttcatctgtttaatgtatctagtcaattccattggtgattcacaacaggattataatgggaaaaagagctcttagataatttacagttttttagtgctatggtgccacctactgaaatattactaaatactcctttgactaaataatgaaaacacaagacatttaagttttaaaaaatgtagaaaatttcatccctagaagataaaagtcaaagtgtagaatgtagtaactgtaatatgtggaacactagatatattactgtgttttattttatatttatttgatgtgtttatagaatttgagagaaagctcaatgcagttcttactttgagaaatagtgatgccttctctttattgtcacacacctacacatgtgccctcttaatttccattgctatgtcacatattttgctttacctattttccacactttcccagtattgttcataaagaatgtttacatatattgtagtgtaatttgtattaaacaatctccaaatattaaatatttattgtgcactggttataaaatactttatgcaaaaattttgtttgcttttcccagatctatttgactccactaagaatatattgttgcttttaagtaatacaggaaatagggtagagtacaaggctgtctacatacataaaacaacttaggtaactacatcagttcatttgttttgcattggacaagcacagtaatatttaaccatatactccagtctaaatggataggtcatgaagtagttaaatatgttatacaaccaatcttttgttgttgttgttgttgttgttgtttttgagtcagggtctcaccctgtcacccaggctggagtacagtggcaccatcacatctcactacagcctcaacacacactcatgggcgtagcctcccaagtagctgggactataggtgtgcaccaccytacccggataatttttgtattttaagtagagacgaggttttgcatgtttcccagactggattgcttggttcaagcgatccagctgcctctccctcccaaagttctgggattacaggtgtgaaccattgcrcctggccacaaccaatctcatcaggtcttttttttctatcagtgaagattcagcacagtggcttctatctatgattttggtaatgtttaataatgtttgcacatatgaagtgcaacagacaattgaagtcattgctcatgtaatttaggaagaattaaaatatgatagagaattaataaattattgcagatatttggttttatagttttctctaaatagttaagtaccttcacctactccctaccttgtttcatatataaaggcattctccaccaaagtatttgttagtgttctgctaacgttgatgtaaaaatcattagatgactgggggggcggggtgtggggaatgtcctttagatgttacgtaggtgttttaactaagctattttatataggtcacatttagcgtgttcctactttaagactggtaaaatgtttaacattaaaaagactgaaaaatagatttatgtaatctagtgcacatggcttattaaaattgatatgttgctttaagttgcatcactctagtgcataccttatttccttaggggcattggcttaaattttaaagtagtttttaatttaaaatttttattttaaatagattctatgtgtttttttcaggcacgaaaacatttttatgtcatttatcatgttgactaaaagtgttaccaaaactaaaaatctgtttatagggattttatgaccatgagaacaagcaagttgagtcttacactaagtctaaacagtgatgctgaagtcttggaattttcttttaaaaagataaaatggtgtgtggggtgtgtgtgtgtgtgtgtgtctgtgtgtgtgtgcacgcacatatttgaaatagtatataaaaatgaaataaaacatagattacaatgttttagtgtcacctaaaaatcactcagtggaggaatttagaatcatatccagtgataaatcagtgtacaagcaaacacatattcaattcaagaggcctttatgggaagtaagcatgaacatagaagaaaggaaaatgttggctctttagatattatactgttttccaggatattaaattttgctgcattaaagatgaaaagattcgaggaaattttgaatatggagcgatgatgagatcagaaaaaaatgtatatgtatgcccattattctgtcctctagctccagaaacctcttaacatctaaacaaaaggtctgtaaattttaataattgtgcttgatattagtgtagtttggttgactttcctgtcaaaatagtattctgtaataaattaacttgacacacctctaaattttctctaatatttgtttgtaccattatagagcattcactcagcacattgtgatttaatctgcatatctatttttagggtcaaggttattttagcatttgtagcactactagtaatttacttgcagccaaattatgattaagaygcatttttacttagctcatgagtttttaataaacaccttctgtaaaagaattctcatgcttaaaatttcatatgaagaggaaaggctgtaaggacaagttgatgggaaaaggggacgcctgatgaatgagagcatggcctgtaaagtcagacaggctcaggttcaagtctggctcacatatactagactggccttgtgaacttggccaagacacttgacttttctaagcttcttagggtttttgtggtgcttaagaaagaaaacataagcaaaagacttagtatagtgcctggcacccagtaaacactcaataaatattaacaattaataacaataaaatattatttctaaattattctttaaaaaagtaaatcattagaaacagtcttctccgttttggtaatttacctcttgtccttcttttcagaagttagattaaaataatatacatcatgtatttcttttaaaaaacgtattgcctttggaccacttggaagtttattaatctctctgagacatggaacatatacgtagtctgatgaatagtgtactggttggaaacagttctagtatatttactcaggcattcacagttcttttgttaaaaaacaaatagcttcacatagtgtcccagcatttttcttctcatttctgtggtaaacagatgatgaattataattttcttttatgaaactctatctatagttggtgctacacattttggtgacaacaaagtagtaaatcagaacaacagaatataggggtctgtggaattagtggtgcaggtaacattaagatttctcttttctctgtcatcaaatttgctttctgatttctcctctgtattaactgatccaatggcttccgtcattctgaggaaaaagttcaagctccttttcaaggcctacagtgcttgctccttggctcttctcctaaagctgttatcatcagatctgtttgatttctcctttgcacttactcatgcttaaaagaatccagcaattayttatcaatcacttcttatacacaagactctttgctacagctatttctctttcttctcctcctcttcctcatcttattatgtgattcatgctgatgttgatgcgagaaattttgattattagtcttaatcaggtgtatccatgactaaaatgtcattgcagatgactagatatatgtgttttatgggttataagcttatccagggcaagggtcatgcttttatcatgtttgaacctagtctccaacagcataccagcaaaacaatgtatgwttcttgaacctaagtgaactaaattaacttgtttcaagttccaaggaatgaggtgcttgcatgagaaggggcatatcaacctaattttagatatgtaagagctcatgtatttctcagataaagaagagatatgtgttgtataaagtatgttcacacactcaaaaacaatttgaatattttaaatttggtgatatgttttgttcttcacaaacaatgaaggacacttttcctttcacttcaaacatgagagctattagttattgctatactaatatttttttcttattacctcttttgcaaatcaacacaattctaagactgtaatttacaaggaaataagaacaaataaggagagcggaatgctgttaatgggaacataaacataacaatagtttacatgaaacagaaagataaaagctaactagataagaaaagggacaaaagtacaaacaatatcaattaaaaacaatatttaagtatgaattattaagaaaaagagaaatgtaatgagaaaacaagaaagtcattatgttaataattatgtatcacccatcaatgatataaaaatatatatatcaaaaatgcattttacttcaaggaataagccagggaatgtcattgaagaatacggggtgatgctccttggatggcaactctgaaggaagaaaatgttttcacatcagtttgttctcagaagataaaatataaaggcagaaagtcaccttaagtaccagctaattcactttcccatctgatctctgattctctttaacaacctgagtttacagtcatttggaaaagaactttacaatcttttaaataggcatttactaagatgagggatgaaaacattgcacttcactgtagactgaatctagttcccatcatgccaagaaagctgctcttttcaacatttccacaaacccagatgataaatccagttgacccatgttaatgcaccatgtttatcctgcatgtgaatccccatattatttgacttcaaccatttccttctcraaacaccctctactctttattcttgtttgctacagttttcctcttacttggaaaatttgattacctatgctggctctctccttaatattcactgaacttcaggattctatcctggacacttctcttttatgtagttcggtgatctccttcacctctgtagctgcaaaatgtatctatatgctgatctatagcatcagcccagatgtatgtcatgagctacaaacctctatattcaaatgctattatacattttcacatgaaatctcaagcaaattctgattcacctctctactcactgtttattactctcaagttcagtgaaactataactcactagcatgttaaactatcaatctagatattttccttattactctttctcctttattctcacttgaaaggatttacaaagtcttggtgattcttgagtgtttcataggtccttttcccccaacctttcttttggggtatactcttcctacgtaggacatcatctctgtctgttttgctttggttttggtctcctgattttcctgcccccacctttgctctttaataatccattttccatttcctgaaaggttgatctaaaattcaaatgtttctcctttaggcctccctttaaagacatccctttaatggatatctaaagcctgtaagataaatcccagcttcttattcttctgggaccaagctagctatatgcaatcctttaggttgtagcttaaatacatccaagaaaccctctgtatcaactcctttaccagccaaccaccaactctggaaatataaataagatgatcctgttatgttctcctttagcacattctgtatcacctgtcatcacactgtattgattgattgtttttgtttatatctcacactaaattgagctcattgagggcagggaatttttatatgttggtcatattatatccctagcatgtggcataatgtctagcacaaaataggtgctcaattaatcatcattatctaaataaataatgcatttgggaaaaaaaagtttcaaaagtttttcaaaagtcttttgcaggcttgaaattaatcccaatagtgatcctttagtctgttatgtttctgatttagcctggggattcaaaaaataaataacataattttgatatatttgggctttgtaaacatggtactaagagaggaaatatagtttcattagggtaaaagctactgaaaattgccacttggtgaatgttctatcatagacttgaggtacatataaaaatctaatatatgtttacattaatatgaatgaaatttgaaattttctaagagatttttgtttcttctttgcagggcaaagcccaacaccttcccccactggtaagaattaatatttatatttttactaattttattttcttgttgcaaagtttatatatttaactacaattttctattattaacactgaaattatttttaaggataaattttataatcatgagtgattcttgacattcacttgttcttaaactttctgcttatacgttatagagtttaataactacctaaacatgttattaaatttgtatatatattttgtgtataaatagtaacttttcccaaacttgacagtaaatcacacaacaggtttctactctcttttaatattttaagactataaaaaaatgcatttaaattagataacaaaattttatagtctgaaagcaggttaacagctgtctatgtatgttatagatatgtagataacagatttgcatatgtctatatttctttaagagtatgttgcttttttcaatggtatgcaaaacctttgagactattgagatatttttaaataataattttcaaattctactgaacacttcaatagtccttataaatgtcttaatcatgagataaatttaaaacacagagatgctgcaaataaattcatacatagtacatacaaaataagagaaaaaattaaattgcagatggttaaatatcacatcacttaactgatgttactgaaaatgtattttcctgcataatcatatggttgacagtatgcattaagaaggtaagtaaaacaatgaagacaattttgatttaatatggtaatgcacaattccaactaacgtacattcaacagatcatgaaattgggttattaaaatgaatatttttgtcattaaataaaaattcygtccaaatgaagaaaacaaataaccatgaaaatagtaacaaaaacacttctgaatctgcataagaactatatttccttatttttaaagaaggtctaacacaattttacagcgtttagcatggcagtgatgttttataaataaataaaagtcattcttgcatagtagattgtgattggtttatgccagctactcaaatgcaacttagtatctccaacttttacagaagatagattcatctcaaccataccagatggttatttttgcaggaaagggataggtataaggtagaatggggagtgattctttaaaatgacacatgactcatcaccttattgagggagtttctgttatctctgaattgactctattatgacaagcctccaagtgatgaaaccaggtaagttaaaactgttaaccaaaatgcaaaggaaaatggtctctcccaaatattggccacaacaatgtcatcaatggaaaccaggagaatttgcaaagtggaggttcaagaacaatgtggaattggcaattgagtcaggttttctaattttaaattcttatttgtgaaagggaatgtgaactgaacttaagatgtgtgcaaagatatgaaggagagtagttctctgaaaacctttctccctacccctgggactgaatttgcttggctagaagtaatctttaggaatgctactcatcaaaatagcgtggtactatgtattagtctgggttctctagagggacagaactaataggttagatgtgtatatgaggggtagtttatgtgattgacacacaatcacgaggtgaattcccacaataggccatctgcaagctgaggagcaaggaagccaatccaagtcaccaaacctcaaaagtagggaagctgacagttcagccttcagttggtggccaaaggcccgagagcccctcacaaaccactggagtaagtccaagagtccaaaagctgaggaacttggagtctgatgttcaagagcaggaagcagccagcacgagagaaagatgaagaccagaagactcagcaagctcacttctcctaccttcttgtgcctgctttttctagccgtgctggcagttgcttggatgatgcccactcatattgggtgggggtgggggggttggggagggtctgcctcccccagtccactgactcaaatgttaatctcccttggcaatacgctcacaggcacacccaggaacaatactttgcatccttcaatccaatcaagttgacactcaatattaaccatcaaatactattataaggagaatgttgcatgattttccttctagtctgtttgtaattcacatctaatgaaagagtgagagtggacgataaagggaacttgttgaaacatttctctcaaagcaaaagggatcattggaagcaggcagacaccagaattggtttaacctaaaaataacaaattaataattatcaagtctataatgatgacagtgacttaatgtgaatagaaagaattctaaactctctccttccttcctccctcccttctttcctactttctttccactccctttctcccacccccttttcttttcctttcttttctcccaccctctctccctccctttcttttattcaatgcatagtagttgaaaaaatctaaagttagacctgattttacactgaagactagaggtagttactatcctattactgtacttagttggctatgctggcatgtcattatgggtaaaagtttgatggatttatttgtgagttatttggttatraaaatctagagattgaagtttttcattagaaaataacacacataacaagtctatgatcattttgcatttctgtaatcacagaatagttctgcaatatttcatgtatattggaattgaagttcaattgaattttatctgtatttagtaaaaattaactttagctttgatactaatgaataaagctgggttttttatttatcatactatttccattttcttctctagtaatattgcaattttcattcttaactctttcctgtcctatcatttctactccttttctagtttctctcattctctccctttttccatatttgtgccattgtcttttgcccaatcttgttgaactgatttaattattttttgttgtgtgatatagttcagtttttacctaattaaatatttaaatttttttttttgcttttcaaaaagtaaatatatgttaagcaaaaaaaaaaaaaaaattaaatacatctttataattccaacctccagagatcacatgagcttttttttttttaacacatttggtatatttttctattcttttattaagaaaatcacttttttcagtaaaagagcattaaaaaaactttaaaggactttaatcaacagtgctgatttgccctgcagaattttttttaccattgtacactcatgtcaactgtgcataaacttatttcactactactttgtcacatattttcctcttcttaaagtaaacttgagctgtggatattatttcagtattttaaattgtatctctttgttatcatgacgtcaaagacatttttgtagactttggttgtttgtaaacctagttgtgagttttgtttttcagtcctttacacacattttcattgctttgtttgcttttaatttattttttaaaaaatccatgaataggccaggcgtggtggctcacgcctgtaatcccagcactttgggaggccgaggcgggtggatcacgaggtcaggagatcgagaccatcctggccaacatggtgaaaccccatctctactaaaagtacaaaaattagctggatgtggtggtgtatgcctgtaatcccagctacttgggtggctgaggcaagagaatcgcttgaaccagggagtcggaggttgcagtgagccaagatcgtgccactgcactccagcctggtgacagagtgagactctgtctcaaaaagaaaatatatatatatatatatagatagatattttttcatggatatatatatatccatgagtaaatggaagttttgtcttttttttcccctggaaccctagccctgctaaaaaccttctaactttacctttctctatccttttctttatctacaactttttaatttttttaatcatctttaccattatgcttcatccttctgaactcaattgctttggataggcgagaagctgctttcaatttcatttccccatttttatctttagctaatgttctgtagcttgttttagatctgtgtctacatattatatgtatctctgtatgcatcaatatttgtatatatgcatgcatatatgtgtatgtatatttatgaatacatatacacaccatatacatacacttatgtatggtgtgtgcatatgtatgtgtagatatatgtacatacacactatagtggactggggagttagtatactgggaggagcatacatttagggtatgattcacatatttattttgtccttctcccattttccattaattaacaggattgactacagcaaagatgcccagtgttccactttcaagtgaccccttacctrctcacaccactgcattctcaccsgcaagcacctttgaaagagaaaatgacttctcagagaccacaacttctcttagtccagacaatacttccacccaagtatccccggactctttggataatgctagtgcttttaataccacaggttggcacacaaaagttgttaacttaaatatcagggaatgtcatttagaarattctacagttatcagtacaacttgtctttaaattatttgcacagtttctaagtawgtgattttattcaagtgcagaaattgcaggaaattagtatctgtgaaatayagatcgactgaagtaattaatgcatgttgttagggrgtggagagagaaaagaagggaagcaagatctccaaggacaatcaggaggggaaatttgttctagtatcctctgatctatacacactcgccatgattctcccgcttggcttcccgccacctggacagatgagaatttccctagttcagagattatcagttctactctccttggaaggtgtcttaaatgggagtcttcccatttctttgtttcactctagattctctttatccaaaaattgttgaagatagagaatgtattatttttaaatccactctgagaatcgacaacccaattttgttatttgagtttcttttaagagcatttgcatcattgaaaacatttttaattaaggttgtgagttctactggtaaattaaaggcaatgtagccatgttcccgggaaaaatcagattgatgcaagagatatttttgccaaggaggggcactatgctccttagaatactgatatatgtatatgctcatttaatgtttagcaataggtctgccagtgtattcagactcagatttaccatcagtagagtgttcatgcttttctgaaataatgtgttatgttgacttttttgtgggcaaacaggtttatagacatactctgataaaagatactaagctatttgaactgtttaacaatgccatttatcttcgtttgaaaaacaagcatatataataccatcacagaaattttgtttagggtacatcaaagtattttgagtaccttamtgatgaagtttattggatatagtaagcagttaaataaatggtcagtgccttcctacagcaagtacaagactgtgtatttaatcttccatttgtttccctgtcaccatagcagagtagtaactaggacctgtctaaacactgtaaaaatttgaacacattgcccaaaatttttacaaaaggaatgcaaggatgaaggtgctgatgactaggtggaacatctcatgctattttattattttgtttattgcctgagtagtgtcacattgagttttccttttgaaggttctgtatttcacgtcacatgcacaaataaaaacatgcaacattcttttcattcccacatttttaaaacctaaaaccacttaagccataaatttacaggtagagcaaagtatgagaaaggtttaaagttgaatagattgaaaataaggatgaataattttaaaatactgatttgttctagcaaaataatactgatgttgaaattaccttgaaaagttcatgctttcaaataaaaacacactttcttttctagaaaataatcttttcatcaggtgatacttcaattatctattggaataaagtctatatgagttatttaatttatgattatgattgatttatactgctgaatgcagtcaatttttttcatttactgatataattgggggaaaatcctttaatctgcatttctaagaatattattacacactattcaaaattgttcatttttgaaaatggctacaatgaccatccatgtgcataacattaaatttaattatgtaattttattttataaagatagtttatgactatttcaaagcattttcaatatagatgggtatgtgtgtatatatatatttgtatatactgttaagtatatataaagtatatgtatgtgttgtgtgtatatattttaatcctatgtatacatacatatacatatatacatataggattaaagtatataaaatgtatactttatatgtacttaaaagacacacaatgaaaataccctttaaattctgttccttaaagatacctttttaaccattgttgtatatcctccaggctctcaacatatgattttgtgagtatgcaagagaccgtgtatgtaagcatggacatgtgagattgtttccacatgttttcaaacactagatattatcaaccttttaaaactctgccagtatgctagttagaaatatttcatgttgatttacatttaaaaaattgttcttaacactgaacactttttcatataccttttggcccttctgtatattaggtagatgtctgtcacatctcttgtccatttttaaatttcttcttttctttgtaatttgtaagagatactagtacattggaagattcctttcttattctccctacaaagaaatgtcccatctgtcagtttgtagagttgatggagaattcagaaagctcatagtgatgtgaaagtcaataaagccacctggaaacacgaattctctatggctgcatccagctcaggaaacctcccaaggctatgtaaatagaggactcaggtgcctgtcactttccagccaagcaaatttaaatactgacagacacattttaacagattcagttacttcacagtttggtaaactataatcgcaatttgctccttataacctcttagtaaattattcatctccagtgggggaagactgatgtaatgatctcactttcctaccttaggtgtttcatcagtacagacgcctcaccttcccacgcacgcagactcgcagacgccctctgctggaactsacacgcagacattcagcggctccgccgccaatgcaaaactcaaccctaccccaggcagcaatgctatctcaggtttgcgggtcctttagacttgtgcaaatatgaaaagtacatgacgactacctgtatttaagaatggtgtgaggaaatctaaccacttattcaatgtgcagctattgctagttgatgaatttggaatttcagtcactcttaggaatatgaaaccacagaacaaatgtccttttaacagagatgaaataatagtgagaattgtgagactacagcaaaaatctgctcaggaggaaagagttattcagaatagtctattttttatatatttcaggcaattaccattctacagggaaaactttttgttagaagtaagaaataatatgcataaatctttacttaaagactttgtaccaacaaacaaaagggtgaagagtgattcctattatcagtgaagggcagtgagaaattgtaaccacaatgaaactgttatttaaagaatgagaaaaaaagaaaggaatgggtttatttcccattcaaacattaagaatctttcaggatggcatctctgtgtttataacaacaatgcagaatatttcctcccttttcttttcaaaattagtgtccaaatcacttcttggtgtccttttatatgcaagaaaaacaagtatgtcttttgtcagatcacaaatccacacagtctcgtatataatttcagtgatctgagtgcttgaaagttaaagatataaatggtagacctatgtagctggtaggaacatggtcttgctttaggtaggaatcaaacacatcaaatagaataattattattttgcagtattaaaactgtgcccttggcataaaaatcattccaggcaatccacactctttaaacaagtgggagaagagccgccctcaccttcctcattccatctagtccagctgccatgggaaccacaataaaaatatttggagcttttagcaaacccacagatccagaaatagtggaggggcagaaactgtaaaacaacaaaaggggactgacccctggggctggttgtcacacagactagtctgctctgtcctgatcaaggaattcttcttctcaaagaagtggctaattccactgatgaaaaatctattaggattaatcaacctaattaaaattgtaaatgccgtccataaccaccactgagagtacctacataacaagggaaacgaagttttcaagtgaggaggagggaaggtaggaagtttcgggaggttgagagtggaagcctcaaaacagcttgggagcagggtctgctagagaggggagaacagatcaagtgagtgagaggagtgtggaaaagaaggtggaaaaaagctgatttcaaaactctgcagagggccagttctatgtctgaatgagttttttaaaggatgaataaatgagctttcctcactcttctacatattctgctggagccctcctctggggatccagagtggaaaacctcatgtttatgttgtttattctattctatggtttagttaaatttcgtggtttagtggcttttgaagactgagctgagaacccatgctcaattatttggaagatgcattttcaattctaatggaatgtatgtgtgaaattatagactgtactgcatttgtaattggtagacacctgcaagctcaaatcaaagccatgttcagaacrtgcatgcatgtatcactgcagaaatacagactctgcctgcaaatgtgagactaatctcacatcattgaactgatgaccccagggatcttgacagaaaataacccaacaagctcttgaatagagggcagctcatatttcttttgctttttccatggcaactagcatagtgctagtcatctagtaggaaccaaatgaatatacattgattgcctgtgctgtaattctggatgtgatgttgggcaaaggtgtaaaatacattaggtaatttgaagcctgaaaatggaaagttctaacctagtacaatgtgcagtttctttggctacaacactagattctataccaattagcaactatgtgattgaaaaataagagaatgatgccactgtaatgtggagtttgttggatttcaagccaatttgatttttcctggccagggaagcctgaattgtgaaagtagaattgtaaccttcagctggaaaggaagaaaaagaaaacctttgagctcatgctgtggcccaggcaggatcccattcagctctattttaagaaaattaaaactgagcacctgcacccagggatccctccccagagaggtgtgtgcctgcaaggctctcagcatgtatcaagttgcacttcctcctgtgccaaccttttacactcagagctctacctccatctacatggtctcagcaccactaagacagcaccagtctctactgctttgatgcattttttatattgcctaaggcagcctgcagcccagagtcttaggcttcttgggctgtccaaactatatatttttttaagttgtgctctgattatgaagctgcataggtttccagttgtctgcccctaaatgcatctttcccataagccctggtatttttggtacagttctgtagaatgcatgtgtcrtggtatagcagaagtgcttgaagatttgtttctctgccttatctttagtaattgtgtttatgttggctatctggctattgcccttgcgtgacagacacaagtgacagtgctgatggcccttctgattgcagatgtcccaggagagaggagtacagccagcacctttcctacagacccagtttccccattgacaaccaccctcagccttgcacaccacagctctgctgccttacctgcacgcacctccaacaccaccatcacagcgaacrcctcaggtctgactatgctgctctagtagtgtcttcagttatagataatgaaatggaaactcaaaactttaatgtagctcttttattttgtgccagatattatttgtaggtttcccattttacaaatgttcacgtatcaacaccaaattatgcaaaagaaacttgccagtaagctttttctgggcatattttattttactattaatattataaaagtccatggcaaagaagaatcaataataggccttaatgtcatatagctctgggatcaaatccaatttcttcaacttcgtagctgattacagggcaaattactaatactttctgcatatcagatttgctttctgtaaaaatggacataataacactccttttttaattatgtcaaaataattaacgtgatgtctgaatatgtaaaaatctggtatgtaataaatattttaaaagagtaattgtgacgcttattagaatccaagtatggaaagccgtgaatgaaagggaaatgaatagtytgaggaagattgcatatcatcaactaagaattatatcaaggaatgaatagttttccctcaatttatacaatgtttagtttaaataacttgaaataaatctttgattcactttattattttaaaaacaagcgaaygtcaaatcaaacgmggactcctagagcaaagatgccaataggaaattatctttgctaaagagtttttctttcaccttttaatataacgaattaattagcttttattcttctattcattttcttgcagatgcctaccttaatgcctctgaaacaaccactctgagcccttctggaagcgctgtcatttcaaccacaacaataggtgatattaccctcagtcaggcagccacaccatccccatgtgcctggtgatgtgctctcacaagggccttccacccactctacctcgggctcctttctttaagttgcattaagtgtttgaatcctgagggtgatggaacagcaggaagatatttctctgcttagcagtgcaacagctgatgagatcaggatgtaattgttactgtcataattcatcagaaagcatgtgtgagaaacaaccacatctactagaactttttctcacaggggtttaggtcttagtaaggaaaagaacaagcccatcaaaggggctgtccattgcaagtggtgagcatcagacggctgatggcagagttcccgttaagcagtgagagggcgtggagataaaggaaagagaaactgaggaatggctgcagcaatggtggtatctgtgaatcagcaagtaagctgatcagagcttgcaagcccacaattctcctcaaattcttccaacccaaaatcaagatgagcagagatctcttagcttacacaaagcacatgttctcccaattattcaacttaaatgcctacactcacacaagatactgctaaatttgttgacagagcaatttgttaccctggatctagtagatgtgcaaagagcttacaaaagttaatctagagaatgaagcagtctttgcattttctctgacttttttttatgtaaatgaaaagtataaacttcgtactatgggggttataattatataaattaacattgagattaatcaaaatatgaagacctttaaaatatttttggctgtgtgaatcttcagccatgttgccataccgccaattagatgcgtacctaaaagtcttaatattgttaattgtatttattgggtatatttatgaaaaattttatagaattagctcattcctttataatgctttaagttttgaaatgaaaacctgtactaggcaaatccttcatattctgttaaatctaactagatagactttatgaagtagaagtattgtaaatcagctttcccaaaaatgacatggcagatattctaaagcaaaattttaataatttacattttttttctccattacagctactactccatctaagccaacatgtggtaagtttatttacttagaatcagcatacctcactttggaatagcactttaattacatctttctttattccaagctttcaggacccactagtaagctaaactcactggctctaatttctcaccgatgactagtctcaaattagtaaaaaattactagctacacatggacatagagttgggaatgatagacactgggaaatacaagagcgatgatggagggaggaagacaagggttgggaaactacctatattgggaactgtgcctayttgctgggcgtcgaattcaattttactgcaaacctcagcatcctgcaatatacctttgtaacaaacttgcacatataaccctggaatccaaaataaaagttgaaaactaagttttccagttagacaactttggtaaagccacttaatttaatttaggtatttgaaaaaaaaatggaataacagcaagtttgttggtgagggggagggggacaaggattcagtgtgatgataaatataaaatgtggataataccttcaaagcttatcaagaagaaaaatctctctttttctctctctttctgtcttgcttgttaggggctggctcaaagcagatacttgaaaacagtttgtctctctttttttttttctcattttcttccttgattctcagttgaagcaaagcggttcttcatggtcagggcttattcctccattcatttctaagtctaaccactggagtcactgccttcagtagctttccatacatttagtgtaaagagtggccttcatatgtctgtttaattaatatgatcttttgtaatccggttgtcattcatctctcctcccgcctcttgaatcattgcctccttatgttcttcacttaagtaatatggaaccactttcagttttcttttctttctttctttcattcgttagttctttctttcttttttttttttttttctcactctgttgcccgggctggagtgcagtggtacaatctcagcttactgcaacctctgcctcctgggttcaagtgattctcctgcctcagcctcccaagtagctgggactataggcacatgccaccgagcccagctgatttttgtatttttagtagagattgggattcaccatgttgcccacgctggtcttgaactcctgacctcaggtgatcaacctgactcggccttccaaaatgctaggattacaggcatgatccaccacgcctggcccacttacagatttgtaaacacatactgttccttcctgcctctgtggccactcctgctcttcctctacaattggaattctgctccaacctcatcccccaaaccccatgtctatttttctatttcctgctcatattttaaaacacaaactaagtcactttctctggaaatcctgtcctatacctccaaatggaacagatctctctctttctagtgccacattatttcctgcataatcttattttagaggtttgtatgtctcctgcaattcatgcttgtgtctgcctccacactggattatacatttctaaaagctgattatatctaacttgcctttgaattcctagtattggtgaccatgtcttacatatgacaagggcttaataatttttgttgaataaaaacaaatgaataaatttatatttgttgtaaagatatttttatcagtcagcagaaattgttgacactaaacaaaggtgctttggaggtatattatcaatcataattttacscaagttaaggaaagaatgagggcttctgatccctgagtaattaatgccccacatatatcaagaaacaggtggttaataactacgttttagaaaacaagaaaattataaagcaagaataaatttctcaaatgcatcatttatttgtgcatcaagtcaacaagtaactagtgagttcccattaatgatacatattatgcatactcctgaatttacagtgataataaaaatagcctagactttgctctcatggaagttccaagtccagctaggaagacagacacttatctggtaatcatccaaatataaatttacaagctgaggtccttgttagggcagtaaagcacagataattacgaaaaaaatgatatggaggcacctaatgtgttttttctttttcatgttttttggggatatttggttagttgatttgatattttkgcatttgcattaatgtagttttatttattctggaaaaataacactcaatgttctattttcttttagatgaaaaatatgcaaacatcactgtggattacttatataacaaggaaactaaattatttacagcaaagctaaatgttaatgagaatgtggaatgtggaaacaatacttgcacaaacaatgaggtgcataaccttacagaatgtaaaaatgcgtctgtttccatatctcataattcatgtactgctcctgataagacattamtattagatgtgccaccaggtaaatatcaatttatttcttttaataaatttataaaaacagtacacttttgtgtgtggtgttctccagtggtcacaggagctagtctggtgagagaacagggctgagggaaaggaaattccttggaaacaagtgggtgaactttctgctgtcttaaccaagtaaaaatgatagagtcaaataagccttctgtttacatccattaatcaccacttctacttatttaacagggagatgtttatgtgcactaaatatagtttatcctgctaagtgattgtctgcaagctttctttattctcctctacttaaatgaagtattaattatatatgtacatatatttattcttttaagtacaaatttatctgaaatatattagggagaaacataaaggatttgatgtgtatgggaagaaccaaaatacattcataaaaaggaaggttatggtcatgttagtgagatcaagttggttttgtcagctaagctactgcttggaaagaggagggggtgacaggcgtcgggcagactctggggaagcatctcttagccaaatgcattctggaaaagggattccagagccgtgtaatttttttaaaaagtcatatcatttaataattcaagactattaataaatttgttaacatttaaatatgttaacatcaaatgtattttgaaaataaaatccatttaatttattcattttccctaaatattactgagataaattaccaattaaacacagaagatgacaatacttaaaaatgcatttcccaatagggaaactcccaatacactttataataatcattcaattaaaagtaagtaaagagtaaacaaaaaatttaagataaaaacaaaaatacaaaatggaatgagtgttttttaaaatgtgcgaaagctacaattttatcaatatgtttgcttgcatttcattttttaacgtggtataacttataaatgaaacactaccaaaatatatggtgctaaaaataataaagtaaataataaaagaaacaaatccctagagttattagacttttcccatagcaatctcaatccttgccaaattctatgtcattagcataatttcagtggctttaactgacatgttaggaatgaatgagggcttaggatacacattatgaaatactaatcaagtttatttctgtatcttcttgtcaggggttgaaaagtttcagttacatgattgtacacaagttgaaaaagcagatactactatttgtttaaaatggaaaaatattraaacctttacttgtgatacacagaatattacctacagatttcartgtggtaagaatataacattgaccagagaatttwtttttgtggcacaatgttgttctagatattatttaatcttactctctgccctttctctcttcctccctgcctctcttgttctccctctgtttgtcttttttctttcttgtctttttcttggtctgtggtatatttagagtcaaataattaaattacctatacaattcaaacaaattcacaaaataaatgaatacttttcatgaaaaataaatatctaaaaattgaaagtcaattaatttacaataattttcttggcaattgttatacacaggcattgttgaagagatcatgaaagaagggtgttataaggaaatgataatacacaaactctgttatgaagtaaggaaaaaaaatacaggattgtatggttcaagagtttactttttccatcctgcatcaacaaaattcatacacaagttcaagaacacttaaataagaagaaagcagaaaaagaacagcaagtgcatctagggatatgtttggatttgaattgaggcaactaataattgagatagtatttttaaagtgtatttgaatttaatgaggtgaactctcccaccctttgacttaaagccatctgccaggccatagctggcatgacagacagatgtgctcaggtgtgcatgcgcatgcacgcatatccacagctacacacatagaggatggagcattgcgctgggtgtaatcatcacctaatcaccatagtatagattcatggccatcaggcaagcagacaaggaaaggaagagcaatcatgacagaccaatgataaaatgttctctctagacaatctattagatgaagactaggtgaggtgcaatttcaactttaagttgtatttgctatatacagattgggcatccctaatctgaaaatccagaatccaaaatgttctcagaatccagtactttttgagtgccaacatgatgcggctcaaacaagtgaaaaattttacacgtgacctaaagtgactggtcatagtcaaaatgcagaaacataacacagaatttagtcagcatccccagagaaaaataaatgacctcaagctatgtatatgaggtatatatgaaacataaatgaattttgcatttgaacttgtgtcctcttcccaatatattgtatcatctaaatgcaaatattccaaaatctgaaaaaaaaaactaaatccaaaacacttctggtgccaggaattttgaataagggaaactcagcctgtattttcataaaagttgaatgtaaaaattatttttagggttttttattattttggtaatttccacagatgtttcaatctgataaatattaaatagagaattataaatgtgaaattagaaaataaatgtgtgcgtgaaatattgcatcgatatattcattygaaatatttctttatttcaggtaatatgatatttgataataaagaaattaaattagaaaaccttgaacccgaacatgagtataagtgtgactcagaaatactctataataaccacaagtttactaacgcaagtaaaattattaaaacagattttgggagtgagtatgttacttgcatttatatgtaaaattgcttctctcttcatgttcttataattatttgagaatcataggaaatgaattgtctttttgctgtttttgatactttttaagcatatgctttttatttcaatgaagckcaatttatctatttttacttmttttgcttatgtttttggtgtcgtatatgaaagtccattgccaagtcatgcagatttatccatatgttttgttctaaaaattttatagcattggctcttaaatttagctctgttacccactttgagttaatatttgtatatggtgtgaggtaacagtctaatttcattttgttgcatatggccatctaatttttccagcgccatttgctgaaaatactatttattcccccactgaatagtcttgccattcttatcaaaaattagttgaccataatgatgggtttatttctgaactttcagttttattttattgatttatatgtcatacttacactgtcgattactgctgctttgtagtaaattttgaaactggaaactgtaagttcccccaaattgttacttttcctcaagattgtttagaatatctaagggaacttggaattctgtatgaattttaggatcaacttttcaatttttataaagaagccatctgggattctttcagggattgcattgaatctgtggataaatttgggaaatattgccatcttaaccatgttagtcttccagttcatgaacacaagatatctttccattaatttatgtcttctttaatttattttcaaaatgttttgtagttttcagtgcattagtgttataattcttctgttaaatttatttctagtttaagtttattcctggttataatgctgttgttttcttaatcacattttcaggtttgttactaatgtacaaaagtacaattgatttttctgtattgatcttgcagtctgtcacattactgaatttgtttattaatgataatattgagaaatttttgacaaaacttataaatgtaattctaaattttgttttgttttgattttgagacggagtctcrctctgttgcccaggctggagtgcagtggcgtgatctcggctcactgcaacctctgactcctgggttcaagcaattctcctgcctcggcctcccaagtagctgggactacaggtgcgtgccaccacgccctgctaattttctgtatttttagtagagatcaatctcctgacctcatgatccgcccaccttggcctcccaaagtgctggaattacaggcatgagccaccatgcccggcccgtgattctaagttttatgtaaaaaggatagttgaaggctaaagaggctgcctaaatccttgtctcctcatacttctccaaaataatatatagctacaagaacagcaaataaaactatgtaaaaactatatcctcagcataactagaaaattttaatgtatttttattagtaccacaattattacattctttataatcaatgcaacaaaatagaaatcccagaaaactatgttttatatttgaaaacagcacaaaatgttttcagtgggggaaaaatagtcttttcaactaatgatcctggtatctctgtagaaaaaaaatgaacatcagctctcacctctcaacaaacacaaaaattaattcaaaatggattccagacctaaatactaaagctataatttaaaaaattctaatcaaagacataggagaaaatgtgtagctttagcaaagatttcctagggcacaaaagcaagaaacataaaacttttttgatgaattggagtgcataaaaattgaatattcctgctctttggatgaggccactaaggaaataaaaaagcaataaatagtttgtaaaaaatcaaaattaattttttcaacaacagaagtttttccagaatatacagagagctctttcagctgcaaaataaggactaaaacagctcaattgaaaatggacaaacatttttaatatatacttcacaaaagaggatacacaggtggttaataagcacattaaatgatgctcagcatcattagttaactgagaaatacaaattaaaacaacactgagatgataatactatacatccattaaaatggctaaacttaagaatacggatactactaactattggtcaggatgtgcagccatgacccaggaatttcactccaggtatttaccaaagaggaaacatgacaaagcagatgcattcatagtagccaaaacctggaaacagcccaaatgtgtattcactgttgaatcctaggtaaaatgtggtgtatctttacaataactactgataattttttaaaattctaactatgacacatgcaactaagtgaatgaatcttcagaacattacattgagtgcaatatgttaggagtgaaaaagtacttactgtttgtttcattttatttacatgcaatgggtaaaaagacaaacttaatctgtagttaacagaaagttgatcagaaggtacgtgagtctggtcaaaggagctgagttgactgggaagtaccacagaaggacattttgggatcacagaaattttctttatcttgattgtggtgttggttatgtggatgtatacatttgttaaaaatgcattaaactgtatctcaaatgggtacattttaatgtaaattttacttcagacattttatttaaacatttatcagtttttctcagtttcaaatgactagttactggaagcaatgacaagtgctactcaatgactgctaaatttattggtgctatgaatgccagatttttagcacagcaaaatctacaaattccaggatttttaggtagtatctgggcaagaatatatatgaataatgtatatgaaaggaagagggggttcttagatatcttcaagtcagtggaatgcttaggtttcacagtgccaatctggtgtgacatttactttgttaaaggaatttactctaaaacaaattaaatgagcccagatgcatttctttaaattttattttgaattcatcatttgtcaaaatatggttatmaataatgcatgcttataatatgaagaatgctttatccatgtcttatttttcatattacataacattcttattcttttaacaggtccaggagagcctcagattattttttgtagaagtgaagctgcacatcaaggagtaattacctggaatccccctcaaagatcatttcataattttaycctctgttatataaaagagacaggtaatttgtgtagaatttaatttcatcagaaaagagaaatcaagaatttgaaagtactagaaatttttattgagccagtgagtcacaaagctctctgcttagagactgcataggcatagtatactccctgatcttagaattgcttccactcattcaaagctttccagccccagaaatgactaaaatccagaacattctaaatatttgcttgtccttcttggtcttagtttaaatctttgtgctccaaagcctagagacagaaaacctctggatgacaacactcatttctgtcttgcaagtattatgtaagtgatttgactcactttgaactcatcattcagcctcctaaacaaaccaacaaacaagcaaaccccttgtaaaacttgtttcagctaataatacagacaaaatgttgggtgaataaaaatgaacatgggcccatgtagccgctggggccagtttggtgtaatcttgggagcatagttctaagtttagaattagacttctgyagaagtaatgcaattaaaaaaaaaaagaagaagaaagaaatgtgctatgactagttcactcatgaaatgttcaaatgagatgctatttaagagaacaaatatcttctggacaatttaaagtatctaaattgtttgtagaaagtaacatcagtggagtatctcagagcagcctcaatgcctgggatagccctttctctattcttttatccataggttaaaataggaatgaagtgaacctcatagaattctgtcactctgtgctgtggggaaggaaccagacatacacttcaaaacttgaaaagtgaaaggctatttttcttcattatgttattttatattttaatggccttttcttgctagtgtctttaggtcttaataatcagactactaaagcaaagttaaatatgcatgtagttttcaaattaacattcaaaggccaaggaaaataaatatatactatatatttgaggttatgataaatttaaaagttaagtctatgtggaaggaaaaatggaaattccaggaagataaaacagcagaggtactgtctgcctcattggacacctcttttacaaacactttgtgtagcttctatgggaacacattgttcattttttttttctcttctctgaatcttctattcactatccctttctgcattcctcaatgtctacactctctctactagagagtattgtcgatgtcagagtatatggtagacattttatgcatttatggctcttttatatttttacagtttttttaaactgtatttccactgtatttgcataattagggtaaaaaggatgtaatgagttagtagcaactcattacagcaactagcatgggtccttcttattgggcaactaaatagtgttacccaaatttaacagctgtccacatagaacacttaaacgggattgaatggctgagaaggggaggctagctatcaggctgtgtgttttcttttctccaaagctgccgattggtgactgaatgcagctttggaccatgccctgacactgcataaagggctctttggagccagctctactctaaacagcgtgctccgcttttgttttctccttcatctcaaacatatacctgtctcctctcccatgttacctaaggcaaagagagttgataggattatagtatcgttaaggcaacttaacttttctcaccattttaaataaaattactattaaaaatccacaggaagaaagtctatgaaatttgcagtttactttttaatcagatattaaatttcacttcattacttcacaatttaattttttcagtgtctctaaaagagagggattaaaagaggagaaaaaatgcaattgacattaatttagttttattggtttagcaggtttttttaattatgtattatttaaagattttatcaactattttaataactcagtggagatgtgcatacatatcttcatagttcatatgatgaaactgaggttaacagaaaatgtgatagatgttcaagttcagtagcttgatctgtttcctttctgctcttggttttgtttgtttgtttgtttgagagggagtctccctctgtcgcccaggctggagtgcagtcatgcgatctcggctcactgcaagctccgcctcccaggttcacgccattctcccgcctcagcctccctagtagctgggactacaggcgcccgccaccacgcccggctaatttttttgtatttttagtagagacggggtttcactgtgttagccaggatagtctggatctcctgatctcgtgtgatccgatccgcccgcctcggcctcccaaagtgtgtttgtttatttttcctcacatttttagcttaagatattttggagaactgcagttttatctcgttaacttaatgatggcaagtgacagtgaagcttcttggtaattggggaattggggaagagatcttttgtgctttattggatttaaaggattatttttcaaaagttactgaaagcaataggcacctttcaagaccaccatgatgttgctggaaattattttgtgtaatgccttttatttttttaagaaaaaaaaaacagaacaaattgcttaatctctctgtggctcagttttgtcatctgtaaaatcagatgatagtgagtaccaactaatagttgcagtgatggttaaattaattatttcatgtataccccttgaaacagtgcttggcacatacagtgagttattatttttaaaaatcgttattgatattattattactgttgctgctatccagaaacatgttgccactctaatcatcctctttcctgatgtcacttggctactcaaaaatagcagcagctggtgatttttttacttaacaagtgctaagtcttctgcctgagtgtgaaaacacacttagacactgtcctacctctcatatgcctccccagccagagctgttgtcctgatcaggtttgtcactaaactcaaaaacattccttcttccgtttgtaatattttcttttctcccttacatgtattcagttccacttacctttcaatgaacagctgaattccacttccggcatgaaactccctcattctcacagctcccgttaattactgtagtgtccaaattactatgatagaatcaacccaatgactgatgatcaaatggattctgcatctaacattcaaaacagtagctaataccgatgttcaaagtttggaggttacatatcagaaaaggttttctaaaaaagaatcattctgaaacatgcaactcaagacttacagtatacactgggggctgtgttttctcagaaacaaaagagatcgtcttcacaaatgaatctgaacttattaaatattttatgtaccaaattaatgatataaaaccataatttttcaatatttaattttaccaatgataattgagtttgttcaatacactggctgataattgtaggtacttttgagtatcaaggatgtacttatttttcaatcactcaatagtttggagttcacttggaacaatgtgatgtagagaccaaattaattaggtacgtggtagtactgacttttaacgacttactaattttttttcacatttttcctcagaaaaagattgcctcaatctggataaaaacctgatcaaatatgatttgcaaaatttaaaaccttatacgaaatatgttttatcattacatgcctacatcattgcaaaagtgcaacgtaatggaagtgctgcaatgtgtcatttcacaactaaaagtgctcgtaagttatatgttttaatgcttctttccataaatggtaaaaagcaaggtatgaactttttagcctacaatatttctatctttattctagcaagcacatttacctggcacatttgttaacatctagggcttataaacaygtaaaatctaaaagtttaaaaaccgttatcctggattctctctcttcttcagatatagtcatagaattttaaggacaaagcataaaagcatcttaattggcatcagtttgtgcaatttcatgcagttaagtacttaaccaacttagattaaaacattcactgtttgctgttgtctttactatctggaaatattaattgtaatcagaaacctaacaatgtctcataaagcattagcctactaacctctgttcatctgataaaacatttcataaaatgtaatattttattagcattttcttctcttcgttaccctcaactacttactattctattttatgtcacattatccatttaaggtttcctttcaatggcatttggctcttgccactagtataatctctccatagtttccaggcccaaagttagatctgcttctggggcacatgttaacctccatcgaggacagggaagaagaaatgccgtgttttaaggcagcatctatagctccagagaccctaacgggcactagacttgtgaagaaatattgtgctatttggggctgaatataagacacttttaaggtcatttaggttttggtttgaaaagttctggtcctggagctctatgcttttgttgttttcctgagtttctgtatcacagaaaaagaagacaatttgtttctgttcctgaagaacccatctaggtgtttaccaggataacattagcactccgggaaagaagggtctagattgtgtaataggacttggaggtttcccaatcaacaacatttttcctctcctctccccaaacttccccctcttccccactcccttccctttttctctattctctaattctacacagtctccttcagggattgcaataactctcatggcttcatgtacaacctatatgctaatacttactgaataaatgagtgatttattcttcagggttttgatattgttttttaatttatgtactatcataacttccttatttataacccccaagctracacttaaaatactttatactatatccaagtatygtcaagtaatttacatatgcatctattaaattattaataacaaatctttcttcattttgatagctccaagccaggtctggaacatgactgtctccatgacatcagataatagtatgcatgtcaagtgtaggcctcccagggaccgtaatggcccccatgaacgttaccatttggaagttgaagctggaaatactctggttagaaatgagtcgcataagaattgcgatttccgtgtaaaagatcttcaatattcaacagactacacttttaaggtaaaagtatgctctctacattactatagtaccaactacattataatgattgattcatagtacttaaataactttaagaccactgctcacatgagattgagaagctctgatgtgtaatggaatcacacttaaagagtctcaaatatttgactctaaaatttttattcctatagctcaagtcagtggtttaaagcaaatgtttcattggaatattttagaacttcaatatgacttaattatagctaaattattgcttctgtgttaagaagcacaacactttatgcacaacagattattactttaccaaatctaccttttctttactttggctttttatctttattaatgtggaatttttcaattgcaaaatttcacaggtaccttgaggttaggaaatatttgaaataaacactagacaatactagtgagcatacagaatttaaaacactcattatctcactgtctactgatcgtattttgtacatgtaacttcataatatacacatttatatgcayttaacacgtattatcaacattctgagtacacagttttcaaaatacagttttaaaactgtatttttaatatatcactatatcacacacacctttctatgttaaatatttaactactatgtagtttttaatgcctgtataatattctatgtatggctttatcacattctattaactataactatgttggtctctaatataaacaacattccgataacacacttattggtaaagcaaaatttttgaatgtctttaataatttatgtttcataaattcctaaaaatgcatttattgggtcaaaatgtattttgaggctttttggatatgtaactttttttttctataaaatttaccaaattgccctggtgtatcagtgtatgaaatgactgcttcttgagaggctcaccaacactgaatacgcctttctttttctttatttggtggttgaaatatggtattgatatctttcttttaatgaagtttctttacttattgttctttgtgttattctttgcctcttttatccagttttctccggagaaatgccttgaatattaatgatattaaactctttgtcacatgcgtaaaaatgttatcagtttataatttgccttttagttttcttcacagcactttgtcttacataattcccctttttatttttaaacaaatgtatctgtcacttttattcctgttaaatagaaatttccatagttaattttttaatatgatgttgacaaacggcctcatattctttttttgttttgttttgttttgttttgtttgtttgttttgttgttgttttttgttttgagagggagtcctgctctgtcacccaggctggagtgtggtggcgtgatctcggctcactgcaacctccgcctcccgggttcaaatgattctcctgcctcagcctcctgagtagctgggattacaggcacctgccaccacacctggcaaatttttgtattttcagtagagataggttttcaccatgttggccaggctggtctggaactcctgacctcaagtaatccgcctgcctcagcctcccaaattgttgggattacaggtgtgagccaccgtgcccggcccatattctttatcacttaaagaagtgttttcatatttataaactttttgattttgtttttgaactggaaatgtcggttggattttatcgatttttagggcattatgatagatgatgccatagttgtgatgccctggtgtgattagtttaaatgatgcaaaaccattgtcacattctaagagaaaaacccctgctctgtcattgtgtgttattctctcagagtattattgaaatcaacagcctattattgtctttattagtagatattcaaaaaggagatcattcagtgagtagagacggtgttggcataggcgttggatgacatcattcttattaaatttggtataaaggttacactgatctgataaaacacattgcttatatgttcctgtttttctgtatcatataactttttaaaaaaattttattattattttttgagaaagagtctcgctttgtcacccaggctggagtgaagtggcgtgatctcggctcctgcaacctccgcctcccaggttcaagcgattctcctgcctcagcctcccaagaagctgggattacaggcatgcaccaccatgcctggctaatttttgtatttttagtagagacgggggttcaccatgttggccaggctggcctagaactcctgatctcaagtgatctgcccaccttacctcccaaagtgctgggattacaggcgtgagctactgtgccaggcctatattatataactttaaatagtataggagtgatttgttcctgaaaaatttgtcttcattcctttcatgcagagaaattctttaagactcatttatatcttctttcaataggattagtcttttcagatattttactctttttgagtgagtgtgctatatatattttttcaaagaatagtcaacctaaaagaaatattttcttattgtcacatcattgtgtattatacttcattccccactgcttctccagtgcccattaagctccaggtgcactggtttctctataatttctcagaggcacctaggtgttactctttttagccacctccctccacgctcttcccacttcctagaatatgcctctcccactcttcaaatcgtataagttactatggaaaaatataggtgtacatcatattaaaatacaaccttaacgttcaaagtaggagataattattcagtttcgaattctcttcccccaatcttcaaaagatggtttttgttttctttattatacttgccataccttcttattatgcttatttctgtctccactatcatgttttgtgttcactccttcatgagagagcagtcatttcagctttttcaccattgtgatctctggttaataaattaatgaagttgatttattagtattacttttccatagatttattttgatgctcttcaggtggctttcggattaaaagtgttttcttccttgtaattttttttcatttttataaactaaagggaaaaaaaaggctatggattgtactttggtaaaattttgactgtaacccatgtctatatcgtttgtcactaatttctgaaggccttcacatgaaatgtaatcaatgattcttaaagtaaaacattttgattattgatgatttctaatgagtctgtagttataatttggaagagtttttaatatatccattatttaagagagtttttctacatttctggtgctttaatttcttattgctactaattattagctgataaaagttaattggcttttacaatttctgccttttaggatttgtagaataatttttacagctctatgtgtgatatttatgaatattctgtgaatattgggtaaattatatattctccataggataaaagcttagatatatatttgtcagatttattatatttattattattctcttttaatgatattattcaaatatattttacttaaatttttttggtcaaggattcttactgctcttttgctcttttcattttccctgtatatgtaaattgttttcacttcatttgtattacattttatgagacacaggtgtttatgcattatgcctatatagtaaattttactatatatccatttgcccttaaaaaaatgtatgtgcattttatgcataattctagtaaacagcttatggttgaatttccttttttaattaaatattagcctattaatagggaattttaactttatgaatattttgatgtattggattttatttcttcatccagtttcattattttaaataattatttaataattgtttaataactataaatatttttattgctaagtgagataagatatctttttgattgtcttttcaaatatatttgacaacatactgacataaccttgaagtttaaagcaaatcagcatacttttattgtatgcatggtatgaaagataatataaatgttttacattgtgatatataatatatatatatatataaattcacattagcaaactaattattttattttttgttactgaaattcaggcctattttcacaatggagactatcctggagaaccctttattttacatcattcaacatcttgtaagttatcactgggctatttattatatatattaagatatatattaatgcttataaagctatattattttacacttataatcacatttgattgttaaatgcttaaataatatctcttccgtaaatgtaatatttttaattgtcagtaaaaccatacatatatatgtaaatatatttaaatacaatatcttaaattcaagttaggagattcaattattaaaggtttgttgaattcataagaggatttatatacccaaactattaaattatgtttatgtttatgaaatatcgtcatgttagtaacatttttcgtgtactattttagattatctattttattctgtctcttcagcatatgtttagcagaagtgggccttagatacaagtctgtcttgatttacttaatggaagctaatataagcactccctaataacaatatacttatgtaaatatttatcactgatatttaaaatattttcatcaaagtaaaggtgtacatgaaaaattacttagaattaaatttcattataataatgaaaataacagctgcatgttacattccccacccacaattctgtttgccaggcaaccacttttaaccatttctatttttgggtctccttatagtttccttcatatatatatatatatatataaacaatattgtatactgctctttctagagttactaacattaccaattgatctgagcctatggaggaaggagacctagtactctactttgggctttctctacyggttaacattgtaaatagaattatttaagcctgtatgtactttgttgtcagcaacttctaggtctttctatctttgccacttctagttcttcctctcttacatatgttacatatgcacatatgcatgtgcacaatcactggtatgaatgcaaagtcaaaagagaaaatataaaaacagcttattttccaaactgctttactaagccctctgcaaagttttagttctttctgctcagatttatgaaataaaaactccctgtgttaaatgtcaaaaaagtccagcaagatagctttgattttatttccacattacctttttcttttataatatctttataataaaaatgacttcattgactctttcctattaaattgtaaataatttatagcagtcatagactcagctgaacattcacactcacatcttaataggccagatctgaaacatttcacctggaaagacacagaacaaaaagcacagcatgctagcaagggagcctggcagtgggaatccttgcagcgggaatccttgcagcagtgcacacagcaatccagctacttttcttatgacactctcaaagacaactgagatatgagagaatgagaccacatgtgtaggtgtaggagctgcattccaaaaggaatcagtatctcttatactatttccatgggcatagcttccagacatgccaacaggggtgtgctcagttatgagcgggcactgcactcagggaaacccaaagctggtacttcccatgaggacaatagagttcacatatagcactccctgttcaggtgtagtttagcaatcaagggtcattttgccattagcaatgttgtctggtaaccagctaatattccacttttatcaggtttccaggtcaacggagccaaaaaattagccctcatctttttccacaaaggagacaacattgtattcactctctgctcacaatatcattatcctaagagataaataatatagtttcttttaaaatagtgatatctgttccaggaaaggacttgggctgtgaattgctagggtacagctactagggatgtgttgttgggtttccccggcataatattccaccacctgtactttgacatcattgtcaattgaactcctggggaccctttcttcttgctctgatctggactctcacatgccatcttgaaatattcccccatcagttttctggtttagatttgctgtatcacacatagttatttttttttctgtctgagttcactgatatatgttctctagtgtaagaaaaataattctaattctcccatacaaaaaaaatttttattctgctctggcacttgttcagtgtatcgacttggtataaaattctaagttaaaaattttagaatttaaaaattatttctgtcttattttcctgaatccaattttactttctaattccatcctgattctctctctctctctctctctctctctttttttggtctgttcccaagttttcctcccctggaaatgctaggtttctgtctttattcttggtcttacctgaattttttgtttgttttgttttgtttgtttttgtttttgtttttagagggagtttcgctcttgttgcccaggctggagtgcagtggcataatctcggctcactgcaacttctgcctcctgggttcaagtgattctcctgcttcagcttcctgagtagctgggattacaggcaggcaccaccacacctggctaatttttgtatttttagtagagaagggatttcaccatgttggttaggctagtcttgaactcttgatctcaaatgatccacctgccttggcctcccaaagtgctgggattacaggtgtgatccactgtgcctggccctgaatctttttcattcattttttctggatgctattgacctttgtaacctgaagatttatatatctgagaattctttgctccattttcttcccatagtctttggttgagtctattagtcataaaactcataagttgacttattattttggcattcccctttggtgttgatgttttccttaaaagcttggttcttattggtagtctagtcatagtcacagtgagacaacaggaaaggttgattagatgttctgtggtccttagaagatcttggtgactgaggagatttcctatgatattgctgatttatttttttctgatatcattcattatcaccaaaaactaattaatccccagaaattaatctccagaattaccctactccttgttgtgtggtaaagtgtgaaaaagtggttcttctcacagtaggacaggaagataggtgtccaactattgcatatgtggacaattacattgtcctcctaattttagtcctgtgcctcatcccttycctgtactgagcctgactttattctcagtctctcactgctttcatttaattttccttttgtcttctcctccctggtagtattttttcaagaagatattttttgttattgttgttgttgttgttattgtttttgtaaatagacatttgacttccatgttctgacccatgattcacatttactgcatatgtcactttcaaacctgagactcaggcattctgagtaaatggaatctattcctttgatttaggctgtggcctcctttcttttgttttctaccttctacaacttgttgaaattgctctacttctaatttcccttctctcattttcactgtcattataaatctatggcattttcagttttttaatattagcagggttcctggaaagaagggggaaacacatgtgtgcttagaatgcaagctttatctgaagacttggctattttattaagtttgttgagaaaagtctgatgctgcttaatatttttgtagaacttaatctaattattatggattggaatgctaacttacagtcatttgcagtttcttgcaaaatcttacttcagagtattctagaagttagatgttgcctctgatgaggtttttattcacaaaatctggaaacaatcatgctgattgatatatgtatactagtaatcactggtatggattgacaatttcagtgaaaggaatttcagatagagataagacaaggaacactttgggtcattttargagcctattgcaataagaacttcttccctaaaaatgttcactgcaatccacctatatattcacattcatstatcccatccatttttatatatgccggcagtataaatacccctttaaaggagataaaattatttctattttatatatgaggaaactcaagtttggataatttaatctatttgccctatgagtcaaagaaatgacagagcctgaattcaagctcaggtcttacagtctgtatctgaaattactttcaatattcctgtttgtatgagtttccagttacagaaattttgatcatgagatgaactgtttctggcagctgtttgcttgatagagtcatttccttctttccagttgtagaaaaactgtctcatgctcaaggcctccacttgccatacagaaaatacatcccctctacttccttatcaccctacttatttttttcagagtatatgaaaaaatgcataattatttcatttgttcacttacctttcttttttcttttcttttctttcctttttttttttttcttgacagagtcttgctctgtcgtccaggttggagtacagtggtgcaatcttggctcactgcaacctctgcctcctcggttcaagtgattctcatcccttagcctcccaagtagttggcattacagacacacaccatgcctggctaattttttgtatatttagtagagatgaggtttcaccatgttggccaggctgctctcaaactcctggcctcaagtgatccacacgcctcggcctcccaaagtgctggggttacaggggtaagccactgcgcctgtctgttcagttacctttctagtgtctgtttcccccaaagagaatgcaaatttcctgaaaactaatattatctctgccttatattctatagcatttccacggactgtcttcctttttatcttcacagcccttatatcttctcacctacatgaccatttacttatttcttctgttcattattaattatctatttttcttcactagagagtaagttccatgaggacaggacccttgtttttctttatgtagatatcctaagtacctagagctgagtttggcagatgaccaaaagccaaaaatattttttttgtgaatagtgaataattagtacttactacttcccagccaccgtgctacgtgtttactgtgaatcaacacctttagccacattttaggattttgggaaaggagggacaaagataataaggaatctggccaagttcccaactaagaagtggtagagctaggattggaagctaagcagtcgggctctggagctgaggctcttaagtcaccgcattattttgctgcattttcactacataagaaaaggtgaatatactggagatatttccaacacaccctctcttctatgccctttccctaggaaagggcaggatttcacattaaacttagtgaatatttaagtcagggtaagtcttatcctaactatagaatgaaaccatttttgtctcttagtgaatggattttacacctcagtgaacaggtaagagggtttatctttgtgaagtagaagtctttctcatccccttaagaggctacccacttctgcatataaagttaaactatatgagtttgtctccaaaatttataataactggattacctccttgatcccttcaaaatgaagtgtctgataaaaaaagagaattaaatttaaatgtgtcttatgaaagaacattatttaatcaaaagaaagataattattcttctattcttactctccttaaatataaaatgttttcattggttcagaacaatatagccaaaatcacagaattagaaatttattgtatttgaccttattctaaaatgtttattttttaaaacctcacaataaatttaaaaatattaaaatataaatactttggaggtgattattcaaccagtctagcaagttatttgacaatcgttctctgaatgtattatttttcatttctagataattctaaggcactgatagcatttctggcatttctgattattgtgacatcaatagccctgcttgttgttctctacaaaatctatgatctacataagaaaagatcctggtaagagttgattwtaaawttttaaataataatggtattagtaatggtgcaaacgcatatccatatggcagtgatggaaccagttaaatgaaatatgtgaactagagagaagacagcatacagcccacttcatgacacaacttttaatcaaaaacttttagtatggttttattggtttgaattaaacattaatattattttctaaatttactaataatgttgtggacttgtttaataataaccagtgaaaagaatrtgtgtggtttttagtacaaagtgggtcagagggatctaggagtgtcaaaagaaaaagaaaggagggagatgtctggggaagttaatgtgtttctttggtcagaaacaaccacatcttatgaaaaacagaagatttaaaataaaatcatttagctacttatgtgagtttagcagacaattcttggttgttttctttcctccctcaccctcctctctcctctctgactctgctttctcccatccttctgtcctccctctgctcaaggctcttcctcccttccctcctttcctcttctcctctcctctcttccccttttcttatccctgacttccttcctttgttccttcaatatattcattaaatataagtaaaataccaattgaattttgtgcttcttgagaatatagaaacttatttttcctattttcacagcaatttagatgaacagcaggagcttgttgaaaggggtaagtatgtatatttttgctgatgactattccttcccctgcatttgaatccattcattttatttatttatttatttatatttattttaagacagagtctcattctgtctcccaggctgaagtgtggtggtgcaatctctgcttattgcagcctccgcctccctgttgaagcaattctcatgtgcctcagcttcccaagtatctgggattacagacacacatcaccaggcccagctaatttttgtatttttagtagagatgggatatcaccatgctgcccaagctggtcttgaactgctggtctcaagtaatccacccaccttggcctcccaaagtgctgggattataggcatgaaccattgcgcccgtccccattcattttaaataagaattgggcatttttagtttaacttggacttttgttgatacagtgataaaacttaaattcctttactcactcagcacctgtgaagttcccagtgtacgccaagcattgtgccaggtactgagagtactacagtgacaggcacagactctgcccttaaagggtttagaatctaatagaggaaagcagatatctcaacaaatatgacggtaatttgatacatgccctagtagttgaatgtgtatagttctatagatatatggaagatagaaaactgtgtgcaagggcagaaatctggtctgttaagattgtggggaaccaatggacaaatgagggagtggtggagggacgagtggatggaagtcacagagatggggagatgggatgtctcctcaagtccctgccagggtggaatggtggctgctcccactaaagacacatttatggattggacaaagaacagcaatttgacttgggagaagaaaacacatttgtttatcttttttttcaacatttatattctttaattttttaaaaatgtgatttctgatccagtaaaaggggacaaagtttcagaaattgaacctttgtttacaataaagaaatgtacttgctttctcatgcttaagacaggaataatttcagaactcctttgtctgtgttaatctgtgttggaagtgtttccctctggtaatagcaggtaccaggtctctatgcagaaactttagggctgaatctttggagctccttaaaaggctttatttttctttgcagaatgtaacactatctgatcccttattacatatttattcatttggtcattgactatcctctcctaactagaatgtaagctttgtgaaagcgtggaggcttttttcttattcactgctttatgcccagtaccaaagtgagtacctaggatttgataaatattagtgaataaataacactgacatagggtatcgtgaggattcattttgataggctgagggaggaatgaagagtacaatcagtaataaacacctgagcagaacaggaaaatccatctcaaggagttaaggtggacttggaaagtgtcaatgaaatattttatctcaaaattggtacygattgcaccttggaacgcagtagaatttactcactcagaccccatgaaaccctgaatgtggccctcagttcagaatgaatgaataccaggcattcccaacaacctaaagaaacaattgcacatagccagtttgagagctgtgattgtatagaaagtttccatgggcaataagataaatgggtcaccctcatggataacttctttctttatctgataaactggtaaaattaatatgattactgaaagaaacactatcagtagtacatggaagagtaggagaaacataattttacatatgcgacagcttaaattctcttacctttctaaagctgttggttttcaagttccatatgcaattgtagctttttatggttagtatactttttaatcttcagtaagttatttcacaaacatggtatataatgtgtttcatatacttgaagcataacaaattaatacaacttgtttcaccatttagtgtaaacagatgatcaaattaagctgagtcatgggtataagggtattaatcatattgtcttatttcatttgcatgtttacagtatttcacaagttgaaaatgaaaatacaaagaaaaataatattgtattataaataaataattatagtaattgctataaaatgcatatagtcaaacgtgaatgtccttataatggtgatgtttggtctgggatcccttctcttaagcatagaaaatggggaagaacattctagtagagagaacaatataaagcccagaagagatctgaagtacaagattgaaaagtcattgatttataggtaaatgtttgtatgtgagtgagatttctcagatgaaatgtgtaygaggaggaaagaagctaaaggattgagtacacggtgtaaatttaatgaaatgtgtatgcccacctgaaagacacatgtaactagtattgaatctttaatatgtttccagatgatgaaaaacaactgatgaatgtggagccaatccatgcagatattttgttggaaacttataagaggaagattgctgatgaaggaagactttttctggctgaatttcaggtgtgtgttgcttttgttatatgatgataaattcgacatcaagacagttccactttaagtgtatttatattgccatttgcctttataatttatcccacttgatattgcaacataagcaaagtagatattattagcagatctctatgaaccagaagagagactcatagaggttgacgggattatagtgtagagctagtaaatattttaatgtagtgctttattgtattatgaagttgtgtcacaaaatgtatttggctgattttgtagttgtactctagatactcatccaagtatctgtttttaaatgaatttgatagtgacacaacaactaatcctaaatttgtccccactcaagagatttgttctgaaagttgtcaatcattaatttgtaagaaaaaagttttttttttaacataattcctgatcttaatttygattactctaagcaaatttttttatcaatatgaagaaaatattttacaggatatctcatttactcaaaacggtcattggtaagggggaaattatttttcctgaatctgctgtgatccaagaaatcgttgtttctttcagagcatcccgcgggtgttcagcaagtttcctataaaggaagctcgaaagccctttaaccagaataaaaaccgttatgttgacattcttccttgtgagtatttattgagtgctgaattcccatatattaggctacttgattattcactatttcacttgtttatttttcttttccttaaacagatgattataaccgtgttgaactctctgagataaacggagatgcagggtcaaactacataaatgccagctatattgatgtgagtaaaaatttgcatttttcttatacctacatatttcattcagctccttgtttgtcttggtaaaattttagaaatattattaaaaatattttgaagtgagcccatatgtcactgatataaacaaaaaattatcaatattagcaaggatagttatttattatgtgactattggtattaggtataacatagaattttcctctacaaacaaaattatattaagaattaatttaatatactctggtgtctattatgtgctagatattagactaaatattctatgcatatatttctcacaagaagtccacatttgcctcagccatgtgccgtataggtgaggactgggaggctcagtttagttaattaccttgttgttgttcacacaattggtaaatatttgagttgaaattcaaccagagtctgactgactccaaaatgttatgctttaatttcatcacactaaatttcagcagacattcctcatcaacatgatcatctatccattggatttatgcagaaatgtaaatgtccgtacgtggttaatttatttaaaatattttaaaatttaatttattatacaaatgttaattaatgtattacataggttaaataattttaaacagtataaaaatatatacagactgaaaaaattctttttgtctccccaaatctgccattttcccagtgtcctcacctaccagaaataactatattttctattcaaatatatatggtaattatggtatcaggttacttatgtttccccaatggaacttagagctccctgaaagcatgtgtcttctgcttttagataggtgattgacatattgtagctattcaataaatacttattaaataaatgaatgtatgcgcaataatgtgtcatgagatagaagtttcaggaagttacttaaattaatgttgaattcttgtgacccatgtttcaaatttaatccaatggcaaaggtcatccctytctgaagagctcctttagttactgaggtgaatttaggagtctgagataattctggaagaagccagtataatattttatctgcctctgtactcctttatcttggtaacaggagcagagaaagcagacatagtaggtaatgaaatgaaagttattatatctcttatctgaaatggcaaagaagtctagggaatcatattccagcagaagttaagaggtgaaaatgcgggtaaaatctaagaatgatttgtttaaagaaattgagtaaaaatcccaaaagtaactacatggctggtgagcttgtttaaatagtggtagatgatcctataagagttggcaggatataaaatgttgaaatgtctagagcactcttgtaaattaccacagcatcgcagatgaagatgaaacctagtattaaaattgtttgaagtttacagcaaagatacatgaaagtcatgaatattctttgcaaatgctaacatgtttagcacaattaaatgcctgaccaccaattaataagattcccttaatactttgaaactgcccagagaaattcacaatcacaaaatgatggatctgaagcaattcctctaactcacaatttttcctgttaatgagtaattgaatgttyagcaaatgacatatctytgcatgtgttttcaatagggtttcaaagaacccaggaaatacattgctgcacaaggtaatttctttgataatccaatattctttttgaaaaatttttatagcacttttaagaaaatttttcttatcagcttttatttgtttacctcctaggtcccagggatgaaactgttgatgatttctggaggatgatttgggaacagaaagccacagttattgtcatggtcactcgatgtgaagaaggaaacagggtaagaaccaagaagattcatagtgtgggtcttggggttaggaaaacaaggtgttgaatggcattttgaaaagccacatgtatctgcctgatgactaaaacagagagttctctattttaatcagtgttaacatttaatttaaaattttcatacatgtagaaaactaaaacttttaacatacaaatatatgtctatatgcataaaatttcaatgcttctgattaattgctagactcttaacttgattcctgtttctttgcagtattgttataagttcagtatatttcactgttttaacttcacaagaccttaatactcgaaacaaaactgaccttgggcagataggtggtgagtcatgtaatgtgactttaggaataaaagcctctctgtccccctacctaaaattaaccacaagcaatcatatcctttttgctgacaactgattatgtcctctcttaacatgcatctaagcctggaaagatcatcctgctaaaaagtatgaaggaaattcttcaggacacattagtgggaaatagaatatatttcaagcatcacagcttaaggtttatatgtgcttaaactatacaactgttttgagaatttcaaatgagtataggttttgttttcactgtttaaagaaagtttgataaaaaattggcttaaattaaaaattaaaatacttaataattttttaaaatgtagaacaagtgtgcagaatactggccgtcaatggaagagggyactcgggcttttggagatgttgttgtaaagatcaaccagcacaaaagatgtccagattacatcattcagaaattgaacattgtaaatgtgrgtttgctttttacataatttttgttttgatacttttttataaaaatataattatggaatattaaaagtgagaaaataaaatatatcaggaaaaattatttttgataacctttaggatgaaagctgtggttagaacaatgacaaaaatcaatagggtcaaatttaagtcactggtcaagacgtttttgtccaactcaaatcgaaagaattatactgtattaattaattatctgttttaattattaaaaaaagagggaaggtccattaaatgtgttgaaaatataatcaaattattaaaagaataagcaatttgtcttcattgtcagtgagttcctacttttatgaaaaaaaattatattatttccataagagaaatgacagcattagagaacactgtaagaagtataaagttctaactatgcagcagagatagaatgtttagttcagaaaataaggaggtcattgtggccttagataatagttaaaatagagatcgtcatgcatgttatataattccattatatgaaaaatccacaataggcaagtcaataaagacagaaagtagatcagtggttgcctggagctgaggaggtcaaacagaaatggggagtggctgcaaataagaacaggctttcattttgtgatggtgaaaatgttctataattagatattggtgatggttgtactatttagtgartgtaatatgaataccaaattgtacattttaaactggtgaactttatggtatgtaaaatgtgtatctcttatttccaacaaatgaattttatttttaattttttggggtacatggtaggtgtgtatattcatggggtaaatgagatgttttgattgaggcatacaatgcataacaatcacatcagggtaaatggggcatccatcatcccaagcatttatcttttctttgtgttacaaacaacccagttatactcttttggttattttgaaatgtataataaattattgttgaatagtcaccctgttgtgctatcaaatacaaggtcttattcattttatctaattatatttttgtacacattaaycatcaccatttccacccctgccatacccttccaatcctttggtaaccatcattctactctgtatatccaagagttcagttattttaaattttggctcccacaaataagtaacaacatatgaagtttgtatttctgtgtctggcttatttcacttaaygtaagtcctccaggtccatccatgttgttgcaaatgactagatcttacccctttttatggctgaataatacttcattgtatatatgtactacattttgtttatccattcatcagtcaactgatgcttaggttgtttccaaaagttgactactatgaatagtgctccaataaacgtgggagtgcagattatctcttcaatctactgtttcctttctttgcggtatatacctagcagtgggattgctggatcatatggtagtgctatttttagtttttttgagaaacctccaaacagttctacatagttgttgtactaatttactttctcaccaacattgtctgagggttttctttccttcacatccttgcaagcattcattcttggctatcttttatatataagttgttataactggagcatagtgataacttaatgtagttttgatttgcatttctctgatagtaaataatgttgaccacctttttatttatctgtttaccatttgtatgtcttcttttgagaaatgtctattcagatcttttgcctatttaaaaatcagattattagatttttcattataaagttctgtaagcttcttatgtattctggatattaatgctttgtcagatggatagttggcaaatattttccctcattctgtggcttgtctcttcactttgttgattgttttctttgctatacagaagctttctaacttgatgtaattctacttgttcatttttgctatggttgcctgtgcttgtggggtattgttgaataaaactttgcacaaaccaatgccctggagagtttccccaacattttcttttagtagtttcatagattaaggtcttagatctaagtctaatccattttttttatttaatgtttgtatacagcaagagatagggctttagtttcattcttccacatatgaatatccagttttcacagtacaatctattgtggagactgtcctttccccaatgcatattctgggtacctgtatcaaaaatgagtccactgtagagttgtttcattgctctatgtatgtttttatgccagtaccatgctgttctggttactatagctctgaagtataatttcaaattaggtattgtgattcctctagttttgttcttttcactcaggatggctttggctattctgggtcttttgtggtttcatataaatattaggattattttttctatttgtaaagaacattattggtattttgatagatattgcattgaatctgtagatagttttgagtagtatggacattttaayaatactgagtctttcaattcatgaacatggaatagctttccaktttttatgtcctcttcaatttcttgcatcaatgtttcatagttttcattgtagagatctttcacttctttggttaagtttattcctaggtatttatgttgtttttatctattgcaaacgagattactttcttgatttctttttcagattgttcaatgttagcatataaaaacactgcttgttttaatgttgattttatatctcatgaccttactgaatttgttaatcagttctaatagttttttggtggagtatttaggtttttccaaatataagatmatggaatgtgcaaacaagtataattggacttcttcctttccaatttggatgccttgtgtttctttctcttgtctgatggctctagctgggacttccagttgaacaacagtggtgaaagtgggcatccttgtctttatccagatcttagaagaaaggctttcagttttttctcatttaatatgatgctagctgtgggtgtgtcatatatgactttcattctgttgaggtatattccttcgttaccctgttttttgaggtttcttattatgaagagatgttgaattttatggcataatttttcagcatcaattgaaatgatcatgtcttttgtccttcattctgttgatataatgtatcacaataattgatttgtgtatgttgaaccatccttgcatcccttggataaatgccacttgatcaggatgaatgatctttttaaagtgttgttgaattcagtttgctagtattttgttgaggatttttgcatcagtattcatcagggatattgaccrgtagttttcttttttttgatgtgtctttgtctggttttggtatcagagtaatactggccttgcagaatgagtttggaagaattcctttctcttccattttttggaatagttagagtagaattggtactagttcttctttaaatgtttggtaaaatgtggtagtgaagccattaggtcccgggcttttctttgctgggaaacttttcatgacaacctccgtttcattacttgttgtctgttcaggttttgggtaccaaaaataatggcaacaacaacttttcaagacatggagagcaaaataacacatgaattgaaacaagaaaatggcaaaatgtggaggaatgaagttaaaatatagcattttcattatattacactttgcttgttagtttgtttacacaatgtctgttgtcttcagtgtaaaataatgcattataagatatgataaccccaaatccaaaagcattcaacagatacataaaaataaaaagcaagaaattaaaacagaccaccagagaaaatcaccttcacttaaaggaagacaggaagaaaagaaagaaggaagaggaggccacaaaacaaccataaaagacataacaaaatggcaggagtaagtctttatttatcagtaataacattgaatatcagtagactaaactctctaaacaaaatacatagagtggctgaatagatattaataaaacaagacccaacaatctgttgcttacaagaaacattcttcacctgtaaagacacaaatagacttaaaataagagatggaaaattatattctttgtaaatggaaacctaaaaagagaaggagtacctatacttatataacacaggtatatttcaacacaaaaactaataaaagagacaccgattgtctctacataatgataaaggagtcaattcagcaagaggatataacaattgtaaatatatatgcaactaatactggagcacacagatatataaagcaaatattgttagagctaaagagagagatagactccaatacaataatagttggagacttcaacactctactttcagcattaggcagatcacccaggaagaaaatcaacaaagaaacattggtcttaatgtgcattgtagaccaaatgaacctaatagacatttatagaacacttcaaccaatggctgaagaatacacattcttctcctcagcccatggatcattctcagggacataccttatgttatgctacaaaacaagtcttacaaaattaaaaaaaaattatataaacttttctttgactacagtagaactagaaatcaataacaagaataagtttggaaactatacaaactcatggagagtgaacaatatattcctcaatgaccactgattcaatgaggaaatcactaaggaaattttaaaatttttcaaaacaaatgaaaatggaaacacaacaaaccaaatcctgtgtgatacagtgaaagcagtactaagagaaaagtttgtaagagtaagcacctacattaaaaaagaaaaatttcaaataaacaacataatgatacatttcaaagaactagaaaagcaagagcaaactgaactgtaaattagaagaaaaaataataaagatcaaagtagaaataaatgaaactgaaataaaaaaatacaaagcatcaatgaaataaaatgttgtttttaaaaagagaaaattgacaggccaggtgcagtggctcatgcctgtaatcccagtactttaagaggacaagtcgggtgtatcatttgaggtcaggagtttgagaccagcctggccaatatggtgaaaccccgtctctactaaaaatacaaaaaaatrttagccaggtgtggtggcatgcacctgtaatcccagttacttgggagactgaggcagtagaatcacttgaacctgggaagccgaggttgcagtgagccaagattgcatcattacactcaagcctgggctttgcagtgagactttatctcaaaaaaaaagataaaattgacaaacctttagtcagactaaggaaaaaagagtggagactcaaatgcgtacagtcagagatgaaaaaagagacattgccactgatacttcagaaatttaaaagattatgagatgctactatgagcagttatatgctaatgaattggaaaacttagaagaaatggataaattcctagatacatgcaacctatcaagattgtaaaatgtctcttgatagagctgtttaaaaaactacaagtctttacatgggggttaagattttctcttaatttcatttattgtagggcttttagtaatctaaattttatttttgtatagtctagctatattttctacaggagaaacagacttagtctatatatctccgtaggtcttcttaggtttccatggtattactaattgttatgtctatagagtgctgtgaaacaatcctatcaatagtttctggccaaacacttgtttgactaagccacaaaggcacctgctccatagatatgaggatatatttctagattgatgcctatctggctacattctgtagtctgggtttactggtgttaattaactcagtttgtgtgtttcttttgttatctaaatgtagatggttctttatacctggccatagaattatgacttatgcatcttatggtggttaccttgaaattagaacaaacctgagctctaatctggggctgactttcctcagtcgtctctctacattctgtgttgacaatgctaccatgtgaaggcctaaggaatacaatgttcatcaaataattaatcagactttgctcacatatgaattagttctgtttgctggcctatcaagcagaagtattttaaacagttgtgagaatgacctttaccaaatcattttaaacacaaatccaaaaagcttccacccatgcaccccacttttatggtgtatgtttattttgggttttttttgcttgacagcatgcaagttcctagaaattttggttatacttttaaagaaagtattaccttacttaccttactgttaagttattgcttacagggtagtacatgcaagtcctgcacaatatcttaactactagttattgattagaaaggaaaacacaaccatggttgagaaaatatataagacacctgaggaaactatgaactcttttgagtagtttatgtttacacgaggagactttgtactggtactcccttccacttatttatgtttcatagtttgctttaaaaaaatcatctcaaagaaaatattatctcttgactagaaaaaagaaaaagcaactggaagagaggtgactcacattcagttcaccagctggccagaccacggggtgcctgaggatcctcacttgctcctcaaactgagaaggagagtgaatgccttcagcaatttcttcagtggtcccattgtggtgcactgcaggtaggaaaaacgaacaaaaaaaaaaaacaacaacaaaaaaactccaacagaatccacctgcctagggctgttagagacatctttccctttggcaattgctattttgggaaacaacctatgggagaagcttagattcttatattggcttcacacctgacagcttttccatgatcatgcctctgcttttttttgcttggtttgccagtgctggtgttgggcgcacaggaacctatatcggaattgatgccatgctagaaggcctggaagccgagaacaaagtggatgtttatggttatgttgtcaagctaaggcgacagagatgcctgatggttcaagtagaggtatgttctaacctttagtgattattctcactttggttttttggacttaaatcttttccaagtgataataatgatattttttaaaaatccaaattcttcacaacctcaaacagtagatgatttcctgaaaactaaaacgtggtaatcaccagaaatacttagaagcatttttcattagtgcctaaaagtactgtggaagaaagatgaccacaaaatatataatttttaaaataatgaactactgttaacatatatcagattggcaaaaaaagtaaaaatgctgaaaatagatttggcatcatctcataaaattaaactgaagagacagaatagtatagtaatcaacagctggttttagaaactacacttacaggtttcaaatcttgcttttaattattaatacgagggtgagtggtattgtttattaagtaattttagtctgactgcacctcagttaagtcatctgtaaaatggaracaatgataatacctcacagacttataaccacaaaagtaatacaaataaagcacttaaacaagtccctggcccatgctatgcatttggtgattgtaagtgatggtaattactgaaaatgtctgtatttgacccagcaaaatcacatatatgcatatacccaagagaagcatcaactagaaacatttgcaagaatgtgcattgcattcagcattgtcaaaatagcaaaaaaaaaaaaaaaaaaaaagtgaaatacatatcaatgaaagaatggaaacaccgtaaatatgtatcaataggggaataggaagacaaaatgtggacatgtgaactctctgtacaacaaatgctatgttgtggtagaaagcaatgatctaggtttgtgtctgtctgtttggagagatgctcagatgaaaacaatgagtgagtaaagctgccatacgaaacattcaagatataatttatgtgatttaaaaaaaacatgaaaatgtacaatgcktgtgattacagatacatagatagcagtgtagaaacataaaaacaaattgttaaccaggtaaaaagaaattatttacagtggaaaataaagtacagtggaaagacagtgccaaactcagggaactaaaggtggcggttaaagaggattatcagaagtataccatttccttgaaaatactggattcaaacaaaataagcagtaaagagtagttaaatctgggtttggcccattggattacaaaaaaataattttcttattaaaagaatacttttcttattttaagttctaaaaactataaaaaaaggttttctaaggaataacaacttgcttttttatctcttgaatatactgtgaaatttattatagttttacattcagtaatttggcttactgacccaataatcactaaaggaagtaacatacaatgttctttagtttttaggaataaaagttgtgcaatacagagtacatggataatctatttgcaaagtaattcttttctgaaaaaataatctgaaaatagaatttgctcatattccagaaaactctgagagtgaacttccagaatatttaaatattatagatatcaatttactttgccatgaattgttccaatatgagcaaatttatggggaatgtatattttatttaaatatgacttggaggactctagattatcagttaactatctgtatttgttcttgaaattgtaggcccagtacatcttgatccatcaggctttggtggaatacaatcagtttggagaaacagaagtgaatttgtctgaattacatccatatctacataacatgaagaaaagggatccacccagtgagccgtctccactagaggctgaattccaggtaatgatagtgacaacaataataataattacagataacttttattcagtgtcatctactttctaggtgtttgctatgcacttgacatagtgcttgcatttagtcttcaccagaaccaaaggagcacagatgagaaaactaggacacagtgagttaagagaaatgcctgaatctacacaactattacataggagatttctttagacccagaaatctgattctattgctaatacttttagccattcctcattaagctggtataaaatgaagtgtcaaaataatagtatatagccacaaaactggtctgccaaaggcaatacagcatatcacctttaaaaatcgtatctggttttggtttgtaaaggaaatcattagaagagtttatgactgcttaggaagttgaactggctggagctggtagacacacagtaaaggataagtacatgtgtcttaacctatttattaggcaattattctcacagctaacctagcatgtagttcactataatttcagagagtttgcatagctgtcctcaaattgctcagttgtcaaaaaaatgttttgtgttttttttgttccacctatgatttccaggttactgagtcattccataatctaccaaactggtaaattcagagtttctaaagaccaggagtgtgcttttaatcacatgcagaaccatttaatgtttaggatcaaagtggggttaaggtgggggtggaggtggagcatgcaataatgaccaagtgactcaatcccccagaagacctgtacttataatggaagaactagcagacacagggtagtctcaaacagagtagtgttttattgttgttttcttgcttttctagctgataaattaaccttattcaatatacctgccctactaatccacataaacacataagctgttagagacagttatacatttaagttaaacattcttatgaatgtttatttactatagaaaagacagacaatttttttcactaaataaatgtgcttgagtttctgctatgtgccaagtacaattctaggcacaagagtcaaaatgatctgcaagtggacatgggaagaaggatgagaggatgtgatccagatcacagatggaagctgtgaaattattccatttaagcagacagtaagacagaagatgagagtagaaatgcaagtcggttggtaaatttggtattgggaagttgaggcagctcttgcctgatgatctttcatttttcaagaaaatgtgaggctaggtcatcagttgagagttgagagatacaagggcgagtagggcaaagaagagctcaatgcttgaagggtataaactagttacctcaaagtataaaaacaatctccctaggcagaggcagtaagattgccagaagttatcatttgatcacctgaaatttatgattataagtttaaagaggaattagtcagttggttgtattgttttctatggcagcattgagctctttgggggtagaggctgtgtatgcagatagttgagttaaacctatctaggttttgaaaagtgactatttgaaaatagtgaggcaaacgagttgagggtgtttacaaatgaatgatgactgaggtggaaaataaaaagcaaattggccacatgagggaggtgagagaaagtagtaaggataataagttggagactttgatagaattacagattgctaggttgaacatatcagaataaatgactaggaataataggggtaattttcaatagcacagatagttgaacttatgattttagaggtgatgtaatatttggaatgaaacctacaaaggtggaatgatgaaagtggatgactgggaagtggagggaaagtcatgggaggtgaagaagctaagaaatgaagagactagagtcttggatagattattcttgtcaatgttgaattaaccaaaaatgatgacagaccttggaaagaagagaatatacttagccaagcctaaaactaaatgaggtggagtgattcagaaatcaatacctgacacttcccagtgaagccggtggatagaagctagtatagtatgatggcaggaatatcaaagtgcttggttgatttgaaagcaaatgagtagaaatggtttgcaagtagaatcagggatcaaggagaacacgtatcttttcttgaagctgtgaggtaaatggggtgtgaggaggaaagtcaactttttcttaaaagggctgctgagttattggtggtgtccttagctgacatccaggttttaattggtggaaagaaaaaaaaaagggtgaagtgactgttgggagaagatgattaagataaatgggagttcacagatgacagacgatgggcatcakagggcagggaggaaggcactgatgggttagatgtaagagactgggttgtatctgaggatacaaataaccattcaggaataaaaatctggggaatgtggatgcactgggaagcttagacttgtgatggcaagtgaaacaggtagagatttaagagtgacagatcctttgtgtcttagatgaaggtgagccattaattccacctataatcctgagtattgctacagggcataggctgcctcggtgactacactcacaagagcacaaggtgttgtaacagtttccaaaacatctggtccttcatgcagctcatggtggtgttcaagtggcctaaaattcagtgatgatattttctttcactcaattacgtagcaaagaatgaggtttgaaacagggtgccataattagtttgaatgagggtactatgctgaaaaaatatatgtctatatacacacacgtatctacatgcgtgtgtgtgtatataaaatcttaccgaattgtacatgaggagccttctcagtttcagttatttgtaacattatctattatcattaaatattattcacttgacaaatacttatttaaggactagtggaaagactgtaggcaggggtgtcttccagaagaaattggtatttaaactgatacctagagggtaagaaaagttattagagcaaccaaaaggggaaagggtagttcaagcaagaaaaaaaaaaaaagtgtttatgtgccaagagttgaagaacagcttggcccttccaagaattgaggaagctggtttggtagaagtattgagggacccagtaaggtgtaaggctggagaaayagtcaggggcgtatcaataaagactttttatgctattttgaggaggtttgttgtcctcttatagtgatggaaagctgttcatcttcagaagagcatcttctgttttgtgttttagaaggattagagcaggcgagattgaagacaaagaggccagttaggaaattgttgatgttttacaagcgagaaatgaaggcagactggattaagtaggaagaaagaaaactaaaaggatttgtgtatagaaatgatggatcttttctgactaattaggaactgtgggtgagaggaaagcaatctggaaggtgtaaacaaattaagaatgaactttcaaaacatgtgccaagtctcctaagaatgtgttgtctccaaagtttatttctgatcatttaaaataacttaccattgcttttgcaatatagatcaacatcggtctagtggtttcaatttatataagaacaaactatattatttttctatcaagcagctctgaagaaggagacatagtctgttacatatatatctttagtgcatactagccctgtcaaaaggactaaatgcctgagcaatttaaagaaaaaaaatcagaggcaaaccgaaaaattatggcctatagggagcatatgcaaatttcacaaaaattaatgaaatgcttttccttagggagcatcttatgatgcaataagccaatatttacattttaaaggagtttttctgtttttttttttttttttcagagacttccttcatataggagctggaggacacagcacattggaaatcaagaagaaaataaaagtaaaaacaggaattctaatgtcatcccatgtatgtagtttatttttttattttttgtatcagataaagttaagctcttttggatttgtttaatgtgggacacacagtcatataaattatcttgaagcaagttttcaacatttggttgttaatagggaagaagttactaggtattaaaatactagttattgcaagaacttataatcctgaacatttacaatgggctttggagggtagactgtattcagtgttttctttttaccaattatttcagaaatgggttgtcataaaagagaaatatataaagctgggagaaaaaagagcaagtctcttttacccattttctttcatttttagtttatttcagttatttactccagggtaattgacaaatagtaaaaattacatccatttgttctctatatgtttcctttttatcccttataactgggaggttgaaagtaaggggaaaatactctataaattctaaatcttcaaatttaacagatcaaaatatgcacagtttcaatacttgaattctactatttaagcatattaaaatgatcacatatggtaattttattcagctgcataaactaaaattagcatggataaaatataacacaagttgataaattagatgaccaaataaatcagatcagtgcatggttgacctagttaattttcataggagtccttatgaatgtagtttaaaatatggaattgatggtgatatggttaatcaaatcatttgaccaagttattataaattatagaaattaagaaacagtgagaaattataggtcaaataattttctgggctaaataattaatcaaagctacccatataagattgttaatttaatattactggagtataattgagggaaaaaatctacgctatgtattttgtaaacttatatcaagcagaattataatagtccatgggaaattaaagtatatgtatcaaagattaaataatcatatataatgatatgatatctctttgttgtttgacatggaattatgttccatgttttttcctggaatcctttttcttagacttttgttgtataatttgtttatcgacaagtactgaattttatataggatcttatttcatgtagatcagtaagttttcataatacaatctgtccctttttaaatactttcaaatttccacatgacaatgaagaagaaatttaattttttcaaggaagacttactactgatttatttcacatagatgactataacagagtgccacttaaacatgagctggaaatgagtaaagagagtgagcatgattcagatgaatcctctgatgatgacagtgattcagaggaaccaagcaaatacatcaatgcatcttttataatggtaggtacttaaaytgccaaaacccaagatccaaacattttaaaataatatctatgttattagggccattcattaagcgattttataaaagaataatgagcttggtcataactacatatagattgacatgagagtttcaatttcaatgctacaatttaacttaatgaaagatttaaaaatactataacctaataacctgagacaaaataagataatgctattggttatattttatgacaaatatagctataatcacatcaattttaaaaatagtaaaatttgagcaaatacaagtatttgaaaatgtttatacatactcagatacccaaattgtaggcaatgacaaatttgtatatttgtatggttagaaacttttcattcagataaactgaattattaggtgagtctgtgtcatatccccccacttttttaattaactgagaattcaaacaatgaaactttagtcatttattaaatatttattatttatacactgttggatttacttattttccaaagtttcctaaagcacacattcayagaatattagtttaattaggaaatataataagaatgtaaagacactaattaaaattagtatagacacgatgaaggtaatttgaaatgcttaagtaattcctttttacaatcacattaacctttatagagaaacaaaaatgtgtgtcttttgtggaaaggaaaatttgtttcgcaagatatgttgtaatcttgatttcacattattagctaagaattactattatctgtataattattttacatatagctattacattgtttcttgtaagaaacataagaatattactatttgtatgtaacagcattgatatcaaactgactatatttccaaatggttactttaagaatctactgagctctcttctgtagtaacgaagtcccaccctttttttgtctaaaaagagctactggaaacctgaagtgatgattgctgctcagggaccactgaaggagaccattggtgacttttggcagatgatcttccaaagaaaagtcaaagttattgttatgctgacagaactgaaacatggagaccaggtttgtacttttgaggattttcttttaagcctttctgtcataaaacgtcattctctagtcttggattgcttgcttcatcgccatacccacgtctttttttatccctccatcacataattctgtctgctcagtcttacccctttcaccctggtgttggcctccatcagctgtgtctggattctgacagtctctcctgtttgtcccctccagtcttgcaygctgctcacagattagccaggatgcagcaatgtcagcgtcacagcaaataacagctacattttcacgctgttttcctcattttctcaagataaaagccaagatctttttgtgatatccagcaccctggacaatcaccccctcaygtgtctttcatcttcctcccatttttatgttttccatcctctccactctggacaagcaggtttcatgcccaagcctaaacacgccatttgcattgtcatcactgagtctaaacttattgatattccatgtaactaaatgtgtgctgtcttccagttttgaccctattcttttaacaagaccaaactcctgaaaaatgtatctatatcatcctttctttattcccatataatatttattgccataaaagtctatagttgaaggtgaatctaagctataatttgatttttttacttaatgcttgtgacagatattttatccttttcttaatgtcttcagttattattaaaatttccctggtggtagatctcactcagctttagcaccaaccacattatctgacatatgttcaagcctattcagtgaataaccttataagtatgcaaaagatttatgcttttttatgcccctctctctcccctaaatctcactctttctcaccctcacctggtccccttcccctgtacatggaaagttgctttttatgttttttgttttaaaggaatataagtccagatttctagcatggaattcccacaatcctttccttcatataaattgtgaaagctgggaaacaggatggaagtaccggcaggactccctgtctttgtcagaaattgtggggttgtagttggtagacaacagtttgtagtaagaagaaacacttttgtggttcatctactcttcaatctggccctttccttagctatgtagacaaaatatataaagctgcttatggtgttggtcaacaagatgacagagacaaagctccaaaagatgcagcctccttcctcaagaaccactgaagggacagtgggacctgagttattgaaagggtcatgaataacattgactcatgccagccataaatattgaagaggtcatgataagcatgtggaaaagaggagcaaacctcaaagacctacactaaggaaaacagctgttccgggggtgtcccagtcacctcgattgtgctcagcttcccttttcttacacaaggaaacaccacatatttaytaaatgggtcgccagcacttaaatagattctggatttttataagtaggtttcaattttagaacacaataattttcatttaatagaaaagaggcacagacagagaaagaaagggagaaagagggagactgatcctttgcatatttcaaataggaaacaaattgttgaattgtcttcttttatctaggaaatctgtgctcagtactggggagaaggaaagcaaacatatggagatattgaagttgacctgaaagacacagacaaatcttcaacttatacccttcgtgtctttgaactgagacattccaaggtatggaaacaatttggggagtatatttctttgatataatggatctggtagcaaaatgaatataaattactctatgcaggcaaggccatcatataaataatgtttcagaataacattttaaaattatttaaatagaagtaactgtgaagaaaatatgactatcaaattagaaaataagctgaacttcactccagttaatgctctcttcaattctgattttagaggaaagactctcgaactgtgtaccagtaccaatatacaaactggagtgtggagcagcttcctgcagaacccaaggaattaatctctatgattcaggtcgtcaaacaaaaacttccccagaagaattcctctgaagggaacaagcatcacaagagtacacctctactcattcactgcaggtgcgtgggatttggtagaatgtgctctcaaaatcataatgcttgacttctcggttcacatgttgtcttatctagttatcctcatatatgaaacacataaccacagtaaaaacttcttatggagtcggtcactctcttggttgtttccacaacacaactattgtagaaatataatagaagtgattatattatagtgcaataattttaagttgtgttttttaatacttggtgtcatgtcatctttgattccttggtagctaacattgagccaggaatgtcatttgtgtgaatgaattaatgaatggaagggtgtgtgaacagataggtagatgggtatcaccttacacatatacccatatacattgatctactctattaggtgtcacaaagacacctaatatgtttaatgaacacaaagtttattaaacatattttaagttaaatattaactgaaatcacaaagcttagcaattttgatttgaaactcattatttaattttctaaactgaaccaaaggcaaagattgtggtaatatcaataatactactagattttattagtttcttcatctgtgataggtgcttacatattcaccttaaataagcaatataattgaaagaaagatatataatataaaagtttacatgaaaaagaatattgaagtaaatgagaaacgaaaaatagtaaagtaaaatgagaaatgtttatctagtgaaaaacttttggaatttttgaaaaagtctaattgttattattggaattgcatatactagaatcaagccttaagaaatatatgaattttcagcatttatgtggaaagaaagctgaggaagggaagtttacactgtaaaactatatatgtttcttagaatatgatttatgtacaataactaaagtgtcctgctgataacatattgtttaaattgaatctttatgatartgctttatacttctcattgtttggtaaactatttgattgccctctttttagtgaataattctactaggtattacttttctactgatgcagaagtgaaaacatttgtgaaacgtggtagagaggcagaagagtgaagaagagcatgtgttctagtaatttacaaaatattaggtctaatatttctgattacatcagctttctcttctccaaatcttggtttccttatctatcatactggcattctgatattggtttcaacaacttcagatgtaaataaaaatgcattaaaatccataaaatactaaataaaagaaaatatatttgtaaagtcgaagacaaataagttttcaattccaggattatcacactcttaaattgaaaaatttgcctaaaaatgcatttagcgtaaataatttggttcttgaaagaggttggaataagataattatgataaacatgaagcaaaaaatatattctctctcttcctgtttttattctaatatcaccctttttggtgagaagtaggattattttctatcttttctttcttttatagggatggatctcagcaaacgggaatattttgtgctttgttaaatctcttagaaagtgcggaaacagaagaggtagtggatatttttcaagtggtaaaagctctacgcaaagctaggccaggcatggtttccacattcgtaagtatccttcaccattgcttttaacatgctcggaattttttttttctttttgacggtttccttttttcttttctcctctcctttcctctcgtttgttcttttttcccctttccttttctcttctctattttctttcctattcttttagcttttctacttttacatgataattcacattaaattattadaagtctaaataagagcctaaagtttactagcactttgttgtgacagttcatgaagagcctttccctaaatgctcatgaatttcttaattttctttccttcactcctgtatcgatttgtgttgtgtaacaaaccacccccaaatttgggagcctaaacaaataacatttattatggttcagtagtctaatgatatgctggaatgttctgctggtgccctcaggctcaggcaatagagaccaggctgactcatgtgtctgccttcagctgatgtgtgccctacagtttggctggtctaaagtgacctacactgccagtaggctggcatgtggctgccatttagctatggcaacaacagtgagtgggccacatgtccctcctcatccagaagactagcccaggcctattcacattaaagcagcaagttccacaagggaaagaagacttgtgtgagaccacttgaggcccaggcttaaaagtgacacacatgtcttcttctgtatgttattagccaaataaataagtcataaagcctgcccagattcaaggggtagggaaatagactccacttcttgagagggcctgcaaattcacattgcaaagaaatgtggatacaggaaggaaaataagttttatattcttgtaatcgatctatcgtgtataccctctatgtggtagtaactgtagatggtcatctgggaattaatccttattcacagtgtaaacttaattactcactaaaatatataaagcttttaatcatgtatgatattgagatttcatatcttggtacttaaaaatgtatcaaatgcttgctatgtgctcttgctataaagagctaattggtatgagggaaagccaggtatttactaatcaatgtagtgagtaaaatgacagaaaaattataagaagaacatgaatgagggcatttaatttaaactttaggaatcaagaaacgcttctcgaagcagtgattcctgccctgattcttaaataatgtgtaggcattagacaggaggataagtacaaaacgtggcatcatgagcaaaggcatggaaatggcccatgagcggagtgaacactggtttggggttgctccaaggtaaagttcaaaaagtatcctgcagtcaaccctttagcaccataaagaaactaaattatttagatgtttttatgagaacatatcaaaaagtacttttctgtcatccaatacttccacaaataaatcattagttcttgctaatcttcatctggcataaaaataatgacatcaactttcttcatgtaatttcccacttaattcctttactaggagcaatatcaattcctatatgacgtcattgccagcacctaccctgctcagaatggacaagtaaagaaaaacaaccatcaagaagataaaattgaatttgataatgaagtggacaaagtaaagcaggatgctaaytgtgttaatccacttggtgccccagaaaagctccctgaagcaaaggaacaggctgaaggttctgaacccacgmgtggcactgaggggccagaacattctgtcaatggtcctgcaagtccagctttaaatcaaggttcataggaaaagacataaatgaggaaactccaamcctcctgttagctgttatttctatttttgtagaagtaggaagtgaaaataggtatacagtggattaattaaatgcagcgaaccaatatttgtagaagggttatattttactactgtggaaaaatatttaagatagttttgccagaacagtttgtacagacgtatgcttattttaaaattttatctcttattcagtaaaaaacaacttctttgtaatcgttatgtgtgtatatgtatgtgtgtatgggtgtgtgtttgtgtgagagacagagaaagagagagaattctttcaagtgaatctaaaagcttttgcttttcctttgtttttatgaagaaaaaatacattttatattagaagtgttaacttagcttgaaggatctgtttttaaaaatcataaactgtgtgcagactcaataaaatcatgtacatttctgaaatgacctcaagatgtcctccttgttctactcatatatatctatcttatatagtttactattttacttctagagatagtacataaaggtggtatgtgtgtgtatgctactacaaaaaagttgttaactaaattaacattgggaaatcttatattccatatattagcatttagtccaatgtctttttaagcttatttaattaaaaaatttccagtgagcttatcatgctgtctttacatggggttttcaattttgcatgctcgattattccctgtacaatatttaaaatttattgcttgatacttttgacaacaaattaggttttgtacaattgaacttaaataaatgtcattaaaataaataaatgcaatatgtattaatattcattgtataaaaatagaagaatacaaacatatttgttaaatatttacatatgaaatttaatatagctatttttatggaatttttcattgatatgaaaaatatgatattgcatatgcatagttcccatgttaaatcccattcataactttcattaaagcatttactttgaatttctccaatgcttagaatgtttttaccaggaatggatgtcgctaatcataataaaattcaaccattatttttttcttgtttataatacattgtgttatatgttcaaatatgaaatgtgtatgcacctattgaaatatgtttaatgcatttattaacatttgcaggacacttttacaggccccaattatccaatagtctaataattgtttaagatctagaaaaaaaaaatcaagaatagtggtatttttcatgaagtaataaaaactcgttttggtgaattctgtaatagcttmtcatgaaggtcaaacacaacctttagattggtttggttttctatatctttactcttttgtctgattttatatgtcttaactatacagcaccgattattgtccattcaactcacatttattttgtgtccctacttctaattatttcactattgtaacatataaaattaacaattaacccttatagtagtatatagatccttgtgcttatttaacagatgaaaagaagtaaattttacaatgaagccacagtttctaatttatattaaggttacttattacatctttacttattaatgagaaaaggggattagaatcaccaattatgggcacaaaaaataaagtttgctttcacttacctcttcagtcactcaaactattatgcattcttttcttttattgaaacttgatcagttgccattttctagataatgtagttaaaatttgcagttctcatgttcaatagaacattatgatgtatgcctactttatctgttaattgcttcaaaatacaaatagcagaaagtctaaataatctacaagcaaagtttttcttcagaagtttcaattgcaagtaacatcttccaaatgtagttgtgtgttttaaatgtgttttccacctgacactatcttttgaaagattaaaaactacttagaaaatagagcaataataatttctattagtttaagaatcaagcttgagactttttttctacatatgggaatttgttgtaaagaaagagatgaaatagtggctcagaaagcccactactttgtgagaacatatactaaaccgaaggtgagacccatggcactagaacatggaattatatgtctatgatttttacctgtagaaagaaataatatgtgaattataggtctatgtctatggccatgggttgcattaatggggatctgttacaaggtataaaagatttatttgctaaagtttggcactgccattattaattctaggatccagtcagaaatattaagcaaaaagttttgacttacaaaagcctggtacactgtagggataatgttatgaatccagaacattacatttattgggcaaaaagaaacttctaggtttcttttaaagttgtttgctttattcctggtattagaattcaatgggaataaaagatacatttagtaagcctaaacttcaggtcccaagctattaattgtgtacataagtgacaaataaatattttcatttaagagatatatatattttaatattttcttgcaagaggaaaactgtgtaaagtgattagctgaacatctgtctttgcaaagataattttaaatgcgttaagcttcccctcagaattcttatatttgtacagagaaattttcctgtttttttccctctaaaatattaaacataaaatttatttttacaactaactaggactgatcttaattttagatttataccagatattggttataagatgatttcataacaccatattagatctgaataagtgaatgctatttgctcctagctaattgcagcatgtttcttgatatgaagaccttaaaatatatcacttcaaaggaaatgaatatctgttaaaatgagtagaaaaggctatgctttcaatctcctacacaaattttacatctggaatgatctgaaggttcttcaaagacattcaaaattaggcttttttatgtcctgttttaagtgaaaatatttattcttctaagggtccattttatttgtattcattcttttgtaaacctctttacatttctctttacattttattctttgcccaaatcaaaagtgattcctaaattttaattatatttgtaggacaattaaaagcttttgataacttacaacaaatgaattcttgttttttgctaagatcccgtaaagaaaactcttcttctttattcaaactatccatgattactttcttcaaaatgacatgaaatttgattgtcagataaaatacaaggcattgggttacattcgaattttaaatgaaacaagaatagttttttagtgcaagtatgtctcatgcagtatttgggacatatttgcaccaaaaattgtttcttgtttattagaaatttaaatttaacttggcatcctattttttttaatctcgcagctttaacatgaaagaatcaactatatctacttcacttaaaagaacatttgtagttctccttgcagagagagacttcacctctctagttagctgtattcctaagcattttattatttttgtggcaattgtgaatgggagtttgcctctcagcttggctattgttggttatagcaatgctagtgatttttgcacattgattttgtatcctgagactttgctaaagttattcattatcctgagaagcttttgggctgagactataggattttctagatacaggatcatgacggctacaagcaggaatagtttgacttcctctcttcctatttgcatgcccttgctttctttctcttgcctgattgccctggccagaacttccaatactatgttggacagtagtggcgagagagggcatccttgtcttgtggcggttttcaatgggaatacttccagcttttactcatttagtatgatggtagctgtgggtttatcatatgtggcrctcattattttgaggtatgtttcttcaatacctagattatcaagagatttcaacatgaatggatgttgaatttgatcaaaaatcttttctgcagctattgagataatcatgtagtttttgtctttagttctgtttctgtgatgaatcacatttattgatttgtgtttgttgaaccaaccttgcatcccagggataaagtctacttgatcatggtggataagctttttgatgtactgctggatttggtttgctagtattttgttgagaatttttgcatcaacatttgtcaaggatattggcctgatgttttctttttttgttgtatctccgtcaggttttggtatcaagatgatgctggcctcactgaatgagttaaaaaggagttccaccttttcagtttttttttggaatagtttcaataggaatggtaccagctattctttgtacatatggtagaattcagctgtgaatccactgggtcctgggctttttttattgttggtggtggtggtaggcttttattactgcctcaatttcagaatttattattgttttgttcagggattcattttcttcctgcttcagtcttgggagggtgtatgtgtccaggaatttatcgatttcttttaaattttctagttaatgtgcataggggtgtttataatattctgtaatagttatttgtatttctgtggggtcaatggtaatatcccccttatcgtttctgaccgtgtttatttgaatcttctctcttttcttctttattagtctagctagtagcctattttattaatttttttttcaaaaatccagctcctgaattcattgatcttttgaattttttcatgtgtttcaatatccttcagttcagctctgattttggttatttcttgtcttctgctagctttgggatttgtttgctcttggttctctagttgttttagtacaaatcactgctcaaagaaatcagagatgacataaataaatggaaaaacagtccatgctcttggacaggaagaagcaatattgttaaaatggccatactgcccaaagcaatttatagattcagtgctattccttattaaactaccattgatattcttcacataactaaaaaacaaacaaacaaacaaacaaacaaaaaagccattctaaaattcacagaaaaccaaaaaaaaaaaaaagcctgaatagccaaggcaatcctaagcaaaaagaacacacttgtaggcatcatgctacaccacttcgaactatgccacagggccacagtaaccaaaacagcatggtacagatacaaaaacagacacatagaccaattgaacggaatagagaacccataagtaagattgcacagctacaactgtctgatcttcaacaaatctgacaaaaaacaacaatgggaaaaaggttcccttttcaataaatggtgctgggataactggctagccatatgcagaagattaaaactggactctttccttataccatatacaaaaattgacttgagatggattaaagacttaaatgtaaaactcaaaactataaaaactctggaaagcaacctaggtaatacctaccattcaggacataggaactggcaaaggttttatgatgaagatgccaaaagcaatagcaacaaaagtacaaattgacaaatggtatctaattaaactaaggagcttctgcacagcaaaagaaactatcaacagagcaaacaggcagcttacagaatgggagaaaatgtttgcaaactatgaatctgacaaatgtctaatatccagaatctatatggaacttaaatttacaagaaaaaaaaaacccttaaacagtgtacaaaggacatgaaaagatatttttcaaaagaagacatacatgtggccaataatcatgtgacaaaaagctcagcatcactgatcattagagaagtgcaaatcaaaaccacaatgagataatatctcatgccaatcagaaaggctgttactaaaaagtcaaaaaacaacagacgctggcaaggttgtggcaaaaaaggagcacttatacactgttggtgggagtgtaaattagttcaactattgtggaagacagtgtagagattcctcaaagacctaaagatggaattaccattcgacccagcaatcctactagtgggtatacacccaaagggatataaatcattctattataaagatacatggacacatgcagcactattcacaatagcaaagacatggaatcaacttaaatgcccatcagttatagactgggcaaagaaaatgtggtatatatacaccatgatatactatgcagccataaaaagaatgagatcatatcttctgcagggacacgggtggagctggaggccattatccttagcaaactaatgcaggaacagaaaatcaaatatcacatgttctcacttataagtgggagataaatgatgagaacacgtggacacatagaggggaacaacacactggggcctactggagggagagagaacagagaggatccggaaaaataactaatggatactaggctcaatgcctgaatgatgaaataatctgtacaaaaaacccgcacaacaaaagttttcctatgtaacaaacctgcacatgtacccctgaacttaaaagttaaagatatttagaagaacatttgagagttcagctttgtaagatcctgagatgaaaagattaaatgaaactatttacattagtgtgcaaataggaactttaaaaatactgactcaatcaagaatatgtatctcatatcattacttataaataaaaaataattattataattaacatttattgagataaacacatgccaggtatttatcccttgttttatacctgcattggtttcataagacaaatcctatgccacatatattcttttttccattttatatggggtagagggttagaaaagttcagtatctggtctgttacagcaagtgacagagccaggacttgaaccagctcttacaaacactgtaggctgtgctcctaatccaccttgcaaatatcagtgtcatgtgctttgaaaaactggtgaagaaaacaacctgaaattgttttctgtctcttctttatttcatgattaaaacaaaaacaaaaccgtgtgtaatatatgctctcaacaacactgcacaacatagtgagcttagatgaactcacagcattgaagttattatataaaaataaacacactcttaaacacccatgggaaaggattgttctcataatttgtatgagcaaagatcacctcattgctgaagtgagtgccaggaaataaaacactacaataaataacaaatgtcattgttccattgtcccacaattt

SEQ ID NO: 8719 - DNA, 104595 bp, Homo sapiens
  misc_feature (1)...(104595): n = A,T,C or G, or insertion/deletion polymorphism (see Tables 1-2)
tgtagatacacggtctcaatatgttgcccaagctgatcttgagctcctaggttcaagcaatccttctgccctggcctcccaaagtgctaggattacaggcatgaagccaccgtggctggcccaatgtggggattttgctgactttttttttttttttttgagacagagtcttgctgtgtcacccaggctggagtgcaatggctcaatcttggctcactgcaacctccacctcccaggttcaagtgattctcctgcctcagcctccctattagctgggattacaggcacgcaccaccacgcctggctaatttttgtatttttagtagagacagggtttcaccatgttggccaggttggtctcaaactcctgacctcaggtgatctgcctgcctcagcctcccaacatgctgggattacaggcttgagccactgtgcccggccagctgacttttttttttttttttgccatttagatgagtaggtagtggtggttttaatatgcacttctctaatagctaatgatgctgaacctctttctatgggcttatttgatacctgtatatcctcttcagtgaaatatctcttcatatcttttgtttattttctatttggattttttttactgtttatttttggtaattctttatatattcttgatatgagtcctttgttagatccatgatttgtaaatattttctcccagtctgtagcttgtctttttatacttttttttttttttttttttagacagagttccagttttgttgcccaggcttgagtgcagtggcatgatctgggctcactgcaacctctgtctctgtctctgtctcccaggttcaagcaattctcttgcctcggcctcccgagtagctgggattacaagggcctaccaccacgcccagctaatttttgtaattttagtagagacgaggtttcaccatattggccaagctggtctcgaactcctgacctcaggtgattcatctgcctcggtctcccaaagtgctgggattacaggtgtgagccaccatgcctggctgtctttttatacttcttaacaaggtattttgtagagcacaagttttaattttgatgaagtccaatttatcacttttttcttttttttttttttgttttttttttttgaggtgaggtcttgctctgtcactcatggctgcctcaatctcctgggctgaagccatcttccagcatcaatctcctgagtagctgggactacaggtgtgcaccaccacacctggctaatttttttaaaaaatattggtgtagagacaccgtctacctttgttgctcaggctggtctcagactgttgggctcaagtgatcttcctgtttcggcctcccaaagtgctgggattccaggcataagccactgcacctggcatcaagtttttcttttatggattgcatttttggtgccatgtctaagaacttatcaccaggtcgtaggtcccaaagattttctcctattttatcttctaaaagttttgtagttttacattttatatgtaaatctaggatccattttgagttcatttttgtataaggtgtgaggattgggttgaggttttttgtttggtttcggcctatggacgtccagttgctacagtttgttgaaaagactatccttcctccatcgaattgcttttgcacctttgtcaaaaaccagttggacgaatttatgtgagcctatctccaggctctctattccgtaccatttatctatatgtctatcctttcaccaatacaaaaagttttgattactgtagctttataataagccttgaaatcgtataaagagatttatgtgttgaccttgtatcctgcaaccttgcaaaactcacttattagttttgggagttgtttttgcatattccttgagattttctaaggagacaattatcttctgcaaattgagacattttcttcccaatctttatgccatttgtttctttttcttatcttattgtactgaactaggacttttagtactatgttgaatacaagtggtgagagtggatatccttgccttgttcccagtcttaggaggaaagtgtccaggttttcaccagcaagtatgatgttacctgtaggtcttctgcagatgttctttaataaattgaggaaattcccccattttctgagagttttctgagagtttttgtcatgagttctgtcaaatgctcgttctgcatcaactgataaatcatgtgatttttcttcttttgtctgttaatgtactgtattgcattaattggttttcaaatattgaacaagccttgcatctctgagatgcatggtgtataattatttttatgtatttgtggattctatttgctagtatttttctaaggatttttgtgtctatattcatgaggcatattggcatgtagccttctttttttaactttttctggttttggaagtatcagagtaatactggctttatagaatgaattgagaagtgtttgatttggacttatgacaacaattttgtgcaatctcttatttatttagagatgaggtcttcctatgttgctcaggctggtctcaaactcctgagctcaagggatcctcctgcctcatcctcccacagggctgggattacaggtgtgaatcaccatacctgaccaattttgggcaattttaaatacaacaataatggatatgatgaaagactatcactgataataataaagtcaaatttcatattccacatgaaaattagatgattttaactcatagagaagtcgtttatggatgcctatagaggaaaaagagtgttcccctatctgaacttgtgccatggcactccaggcctttaattcacatacttcttagatttattaaatcaagaggtgggtgggaggtgggagatataggaaggtgcagtccttttcctcattactgactctcacacacatttgaagctgtttcccctgcctgtctatgatccagagttttcttttcaaattttcttttcatagcaaataagttagatgcatagtcactttgactcatcatgatgaaattgagatagaaactcttctgtaatagtaggcatttattttcacaagtttgtagttataagatttacagaagttaatgaactgtgaaacaaagtgtattttaaacaaaaaataaatggggaagccacaaagggaatgcaggtgccaaaaatcacttgctattcaaattctctcctctccccaggctagagtgcagagaagctaagatgggtttccatgaaaggaacaatttcgatttctctggcagtgagaacagggtaccctaaaagatacgggaatagttactcatatcacatctttatttaacccatctggctagtctggagattagtagtgggtaattgtagaattaatcaggctgtgattcgaactgaagctgctattccagatgatgctgttttcctacagcaaatcaacatagccccctggcacctgggatacagctattcctttgccaaatgttattttttcccattcagcagagaacactagaagcagcttactttcatctagcgggaacagaagtacaaccttaggactatatctattctctggctcactgtcataatccacgttgaatggagcttgattgttgtgaatgttgtgctggtttattacactgatgacatatgtactggacctgatgatctagaggtagcgaatactctagatgctttattaagatacaagtacaccacagggcaggagataagccccatgaaaactcaagagcctgaacctcagcaaagtttttagatggtctggaccacgttgggtattcaacatgttgttgtaccgcttaccacctaccactcagaaagaggcacggcatttggtgtggatgtttgaattttgtaggcaacatatgctacatttaattgtgccgcaccaatgcactcagcaagtcatctgtagggttgcatgttttcggggagagatccagggcaagaaaaggctctgtgacaggtccaggccacttgacccttatgaccatgtagattcaacaggtacaggacctttgacacactgggaggctacacggagcctctggcaagtcccagtaggagaaacacacagcaaagccctagagttttgaagtaaaccatgccctctaccacaaaagaagtattttccttttgaccaacagcttccagcttgctcctgggctgtggcaaagtctgaatgcttgaccatggggcaccaaagaaccatggaacttcagctgccactgataaatttggtgctatttcatcctcttttggaagtggaatatttgagaccagactcaagcaggtctggaaggtacaggaaagttgctagagcaggtggctcacatctttgtggcccctgctgctgcatgatcaccattccctggacttacacccagaatgtcgtagggagttcctcatgaccaggtctatcggtcaaggtttcaaaaggaagcaaacagtagactcaaggggttgaaatgaggaaagtataattaagggattttttttttaacagaggtgtaagcaagacttagagaattagcaatgcatagtggggctctcagggactggcaacagttgatatggccacagccactgctaagtgctcaagctgcccacaggcagagacaaacaatgaacccttaataacagcattccctggggggaccagacagccacctggactgccatctggaaggggcagcaattttttctcacttgaacaggtactaattttgtacatggattcgcttttttaaaattcacatttctgctggcactcctgcccattgacttactgaacccattattcacactgacattatctcacacaagaaaatcattataagccagtgtgcgcatgctgatggactccactggtgttaccatgttagctcatcaccctgaagcatctggcctgataggatgggaggttggtcattctgttgaagatgctagcaaacgtcacatagatgatacccacaaaaagcagagggtggtgcttaagtggatgggctcttgacacagctctggctgcctatggatgattttctcgtgtggctctcgacaagtgacactgtcatcctgtttttcattttagtaacctgcaaaattgagataataataagagccctttgacagggtgttgtgtggattcaatgagataacgcctggaaagtgcttagcacaatcgctggcatggtgttagcttggcagtaaggaaggtcacaagtgttaggtgctcatgattgttatttttacttagcgtggtcagcacactagttggcacaatcgactttagatccatcttttaaaaccttcgagtcaaagagattgcaaacagcactaccttttgagtttgggtcatttgggttcattaagacatttagaccgtttagccggcaaagcttatcactgaatacaacgatctttgggggagggacatagaaaacacactactgtgcaagcaatcaagtggaatagggaagtccaagaggagtcttgcttttgtttctccgtgaactatgcacatggcagatgcaggtggtacttgggtttcagctccagggtccctgagacccagggaccagcccgtttggcgtggcggattggggatggggcatgagggcaacaggttccaggctgtgctcccattaggtcgcagggctccttccgagcgctttctcgtgaccctgggtgagagtggcaggcgccctgctgcgtaggctcccccccccacaccccccccccgggcacagccgctggcggagctgcagttgctcgaaggggcttcccaggcttcgctgcttgcttttcccgccgtcttgggttgcgggcggcgtcggttccctccccgggggccgcggcggccggaggcgggggtcgcagcggccgctcggggcggcgctgggcgggcgggcgctgggcccgccccgccggcatccttggcccgacttccttctgccgcgggcggctggcccagctggaggaagcggcggcggcggccacgatgagtgcgggcgacgcagtgtgcaccggctggctcgttaagtcgccccccgagaggaagctacagcgctacgtgagtaggggcgccgccacccgcccggccttcgcgtcccggggcacccgcccgcggggcggccgcggggagccgctgggctccgggcgcgccaggcgcagccgctcccagcgcccgggactgcgggcgaggccgacggacggaaaccgaaatcgcacgtcgagccagcttcgccgctgtgctaggcagcgggccggagaccaggtggcgcctgcccgcggggctcagggactccagaccgccgctgactctagcggagggaggcgggttggggctgaaacctcaggcgccactctccgtacaggagcggccagggagacatctcgaaagcgtgcccctttctttggctgggggtggctctgagacccatcgccccgcgaaggagacgcggcaggggatagggagactgacagccagaggggaattgcctgcattccccctggaccgtaaggagtaaggagtgctgctcttgtagctgtcatcggacactgctgtctggaaccctacacagtgtaactcgtttctcatcgtgtaactcctttcagcttcttcttaatgctgacaccgcgcttttatagtgccagctggacaactgacttttactaatatgaaattaggaatacttggaagagcgaatcttcctacctattccattaccgttttaagatgtactatcgacacctcaaacgttcattatctccatcagcgtcctcacgataaggtcttaaaaacattctgcttaaagacctgattgctactcagtgtttttcagccattaggaagaaccacttcagtccccagggagttgcatataaatagctattaggacttcttgctttttttaggctgggagtagctggatggattcatcttgttcttaattcctaatttctctgcaacttcactgcacggtggtaggaacaaactcgcgcatgtctgcgctcatccaaagcagcccaccccaaatgtggttcagccttgtgctcttgtctatacagtgctctcaaactgctgtcctcttctggccaaatttcacaactgtttttgttcccacatagatgaggcacatattgtgtggaagttcaagaggtgggattataaaaagactttaataatgtatgaatacttccagaatgtgtggcaggagattttcctgaacatagagttgctcaagccctctttccccattcacatcgggctagacagtgtgtgtttctctcttaggggtctttgaaaagatttttgttgtttgttctgcagaacagaactttagaggaaggttgttctatttagcacgtgaatatcaggagtgcataaatactgagatttctctaagtgccagtgtgtccctacatcatttgcttttgagtccaggagtccataagcacagggtccaatatctcttggcctctgcattatccagctgcttccttaactgtgaagctactcaaaggaggcaagagaagaaaacctgctcccatcacctgcatgagcaggtgaggcttttgtcacacagtagtgcttgcagtgttgactcaggatgggtttccttgttgtcctttggaatgacagacattttaaaggttcactatacaatttcagtagatgatacagaaagatgcccctggagggcaaagattatagaatattttatttcccagtctttttttgtatcttaagcagactggcttagggaagtttattagtatttcatcaactttgggaaggcatgagtgtgtgtgcctattatcacacgcggttcattcctttaggggatgtggcaagagtggacactgcgcagcttagagatatgtggggcgtgtgatgatggggcagtgactagacttaagacacaagagtacctaggtgtcatcttaccaacactccaagacataaaccttgatgtttgggaactgtctctaagaaagatcatatctagtcaatgcttttttcgctgacaggcatctgtccctggaacacaccacagaaagaattctttttcctctcatagctaaattctgcaggaatctttttcaccactagatggtgatcatgtgtcacttcgacggggcctggatagggctgttacagctgcttaaattcaattcctgtcactccctcccgttaacggagcgctaactccgaactaggccctgtgttacaggctgggaagacagaaaaaaaagacttgattccagtttatagtttaacatttataatagtaacatagcaaaactagttattggcacaaccaggacaataactcagttattcgtgctgccaggccagcaagcagcactccatcaatgtttgctgttacaaatggaagctcaggcagtttttaggtaaacctttcagtccaaagtaggcttgtacttcatccacttgaatccatcagtgaagacaatcagaaagttattttttatcactggtcttttaaaagatagttattttcatctgtattttttgtttcacaagaaatatattcttatgttaataaatagaatgaaaagtgaagaccccctttaaatttcccctaccccgctaccttccctttgctctcctccttattccactccccaacccagggataacaactgtgagccgttcagtgagtaccattctacaaaatttttcagaaaatatataattttctttttgcacaactgggatcatattctactaacggtcctgcaatttgctttgttcacaaacatcctggacatctttccaggttagtacatatagatttacttcattcgttaaagcattgtcaaatattccttgtaatacatataatataacaatttctctattggtgaacatttggcttgcatctatttttatccattttaaagagtcctataataacagtgataataaagctataatagttcacttttattgaatgtttatatgtgccaggcactacactaagaacttgtattaactcatttagttttcaaaacaatgccaagagccaggcactgtttttgtccctggatataggttctctggatataggttctttgttgcatatttaatttgcaaatattttctagcagcccatagtttttgtcttttcatcctcttttgaagaactaaaatttaaaaattttaatgaaatccccaatacaatttttcttttatgaatcatggatttaatgttaaatctaacaactcttcatctagcctaagatcctttgtcacccagccttgacctcttgggctcaagtgatcctcccacctcagtctcctgagtagctggcactatagctgctccccaccatgcactgctaattgtattttttgtagagaggacaggatttctccatgttgcccgcaggctggtctccaactcttggcctcaagtgatccttccaccttggccttctaaagtgctgggattacaggcgtgagccaatgtacctggcctctgaaagttttataattttatattttatatttagatattttatatttagatctatgatccattttgagtaaattttataaaagctgtgaggtttgtatcatggtttcttttcttgcataccgatttcatttgttccagtactatttattgagtagactgcctttattccattgatttacttttgaaacatcatcaaaaaccaatttacctgaagggcacagtggctcacgcctataatcccagcactttgggaggctgaggctggaggatctcctgaggtcaggagttcaagaccagcctggccaacatggtgaaactctgtctctactaaaaacacaaaaaaaattagccaggcatggtggtgggcacctgtaatcccagctacttgggaggctgagacaggagaattgcttgaaccccagaggtggaggttgcagtgagctgagatcacaccattgcactccagcctgggcgacaagagcaaaactatctaaaaaaaaatccatttaccatatccatgtagatctatttctggattctctagtctgttccattgatctatttgttttatgccaacaacatgctgtttaatgactaatgactgtagctttacaataattcttgaaatcaggttattttagccctcaaactttttctttctcagagttgttttggctattttaggtcctttgtttttctatggcaattttaggattggtttgtcaattgatttcactgacctcatatcccatagccttgctaaactcacttattagttctaatagccttgtctgtagttgcaacctgcaatactataaatgttgcatagaaatgacgagagcagacatccttgactttttcttgattttagagggaaagcattccatttttcaccttttaagtatgttagctgtaggctttttgtaggcaccttttaccaaattgaggaagctcccccatcttgctagtttgctgaggcttcttctcatgagttggattttgttgtgtttcctgcatctataaaaatgatgatatgttttttattttttagtctgttactatggtgaattacactgcttgattttaaatgttgaaccaacctcgaacttmtgggataaacttcagttggttgtaacatattattcttttcatatatttctggatttgctttgctgatagtttggctgaagatatttgtctctgtccatgagggatatcggtctgcagttttccttttttatgctatctttggttttgatattagcataatgctggcatcataaaatgaaatcagaagttctccctcctcttgtattttctgaaagatgttgtgtagaattggtattccttcttccttaaatgattggtagaactcaccattgaaaacatctgggcctatacttttctttttgggaaggctatcaactacaaattttctttctttcttttttttttttttttttttgagatggagtttcactcttgtcacccaggctgaagtgcagtggcacgatcttggctcgctgcaacctccacctcctgggttcaagagattctccagcttcagcctcccgggtagctgggattacaggtgcccaccaccatgcctggctaatttttgtatttttagtagagacagggttttgccatgttggccaggctggtctcgaactcctgacctcaggtgatccacccgcttcggcctcccaaagtgctaggattacaggtgtgagccactgggcctggccaaattttatttctttaatagatatagggctatgtgggttatccatatcttcttgaatgagtgtcgttagtgtctttcaaggcttttctctattttgtctaagttcttgaatttattggcagaaagttgttcattatgttcccttattatcctttaaatgcctgtatgatttgtagtgatgcctcagttttcatttattacattagtttttaggaaccatcctttggtttcgtttattttctctactttctccctgctttcaatttcattaatttatcctcttatctttattattttcctccttttgattgcattgggtttaatttaatcacttctttatctagttccttagggaggaaacttaaattactgatttgagacctttcttattttctaatataagcatttagtgctataatcttcctttttttttttttctgagactgagtctcgcattgtcacccaggctggagtgcagtgacacaatcttagctcactgcaacctctgcctcctgggttcaagcaattctcctgcctcagcctcctgagtaggtgggattacaggcacctgccaccatgcctggctaatttttgaatttttagtagagatgcggtttcaccatattggccaggctggtcttgaactcttgacctcaagtgatccagcccaccttggcctcccaaagtgctgggattacaggcgtgagccaccacacctggccaatcttccttctaagcactactttaggtgcatcccacaaaattggatatgttgcattttcattttaattcatttcaaagtattatttaattttcccctgagatttcctctttgatccaagggttttctggaagtttatgtaatttcccaatattggaatttctagatatctttctattattaatttctagttaaattccattatgatctaagaacaaactctatatgatttatattctttaaaatttgttaaatgtatatcatggcccacaatatagtttcacttcatgtacataagcacttgaaaaaatatgtattcttctgtcattgggtaaagtgttctataaatgttaattaggccaggttggttgataatgttattcagttcttctgtatccttactgattttctgttcacttttactctcagttactgagggaggaatgtgaaagtttctatctgtaattgtagatttgtccacagtgtccacatttctacctccagttctatttgtttttacttcacatattttgatgctccatttctagttatacacatttggaactactatgttttcttggggaatagaagcctttttcattatttaatgtcttgctttgtccctgatgctattccttgttttgaagtctattttcttctttctattgtctttttgataatagctttcttttgatatgtgcttgcacggtgtatctttttccattcttttacttctaacctctctgtgtctatatttgatgtaggtttcttatatacagcatagagttgggtcttgctttttaacgccttttttttttttttttttgagatggaatctcactctgtcaccaggctggagtgcagtggcacgatctcggctcactgcaacccccgcctcctgggttcacaaagttctcctgcctcagcctcctgagtagctgggattacaggcacgcgccaccacatctggctaatttttgtatttttagtagagatggggtttcaccatgttggccaggatgatctcgatctcttgacctcgtgatccgcctgtcttggcctcccaaagtgctgggattacaggtgtgagccaccacacccagcctctcaccttgttttaattggcatatttagttcattcacataaagtatgattattgaaatgtttatattaaaatacaccatcttgctagctgttattcatttgttctatctgttctttgtttcttttctcctcagtttctgccttctcttgggctaatagagccttttttattattccattttatctccattgttaacttacatttcataacttcatatttttgcagttaccctggagtgtaaattatacatctttaattagttgcagacttcctttaaataatattatatcattataatattagtagtataaggacattggaatagtatattcccaattccattcttatattctttgtgctgttgtcatgcattttacttttacatgtgctataaacgtatgatacactactactaattttgctttagacaaccagttatcttttcagtcaattaaaacaaagagaaaaaactaaacttttatttttcttttatttattccatttccgtcactcttcatttctttatgtaggttcaagtttctgtctgctatcatattccttctgcctgaagaacttccttcagcatttcatgtagtttaggtctgctggcagtgacttctctgttttgtttgtctgagaaagtctatttctccctcattttaaaaaatattttcactgggcatagaattatgggttgacagtttaaaaattttgttttgttttgttttgtttttcttttcagcaccttaaagatgtcactttatcaatcaggaaatacacacacacacacattaatacatttagcttgatccaatattatattctgtcttccttggcttaacatcctgggaacccattccacagatttcagtggtttttaaagacagctttattgaggtatgtgtgtgtgtatgtgtgtgtacatatatatatatatatatatatatgtacacacactatagaattcacccatcataagtgtacagttggttgactttgagtaaatttatacagttatgcaaccatcactgtggtctagctttagaccatttctatccccacaaaaaattcccttagcctatttgcagtcactcctcactcctatctctagccccaggcagcaactgatctgctttctgtctctatagatttgccttttctggaaatttcatataagtggaatgatagactatgtggtccttttatgtctggcttctttcccttagcattgaccccacagcagccagtgtactttctgaaattcatttaaagtagaagctgtggccattgatatgagatctttcttattttctaatacagatggttcctgacttacgatggtttgacttatgactttttttgctttacgatggcatgaaagcaacactcattagtagaaactatacttcaaattttgaattttgattcaaaattccttataactattataaaataggctttgtgtgagatgattttgcccaactgtaggctaatgtaagtgttctgagcacatgtaaggtaggctaggctaagctatgaagttcaataggttaggtgtattaaatgcatttttgacttagggtatattcaacttatgatgggtttcttgggatgtaactccactgtaagttgaggatcaactgcatagacatttagtgctacaaatttcccccttggcactgctttaatggcattccacaaattctggtgatatgttgtatttttggttttattcacttcaagatatcttctaatttcccttgtagtttttttctgtgacctgcgggttatttagaaatgtattgtgtaatttccaaatatttgggaattacctagatatctttctgttttttacttctaatttcaatttgtggttggttgaacctatggttgatggaacccacgagatatggtttggctctgtgtttccacccaaatctcaccttgaattgtaatccccataatccccacatgtcaagggcaggaccaagtggaggtaattgataatcagattatgggggcagtttcccccatgcttctcatgctatcgagtgaatctcacgagatatgatggttttataaaggtctggcatttcccctgcttgcactcacttcatcctgctgccctgtgaagagggtacctgtttctcctttgccttctgccatgattgtacatttcctgaggcctccccagcaatgtggaactgtgagtcaattaaaccttttcctcttttcctttttttttttttttttttttgagatggagtcttgctctgttgcccaggctagagtgcagtgacatgacctcggctcacggcaagctccgcctcccaggttcaaacaattctcctgcctcagcctcccgagtagctgggattacaggcgcctgccactgcacccggctcatttctgtatttttagcagagatggggtttcaccatgttggctaggctggtcttgaactcctgacctcgtgatccacccgcctcggcctcccaaagtgctgggattacaggtgtgagccaccatgcccggcccaacctttttcctttataaattacccagtcttgggtatgtcttcatggcagtgtgagaacggactaatacaccacatatattagtctgttttcacactgctaatacagacataccagagactgggcaatttacaaaagaaagaggtttaatgggctcaaagttccacgtggcggcggaggcttcacaatcatggtggaaggtgaaaggcacgtctcacatggcagcagacaagagaaagaacttgtgcagggaaactcccctttataaaaccatcagatcttgtgagacttatttgctatcgtgagaatagcatgggaaagacctgcctccatgattcagttatctcccactggtccctcccacaacatgtgggaattatagtataggagctacaattcaagatgaagtttgcatggagacacagccaaaccatatctccgtggatgcattctctagtaggtagaggccagggatgctgctaaatgttctgcaatgcacaggacggtcctccaccacaatgaatttggcccaaatgggtccaagtggtgccaagagggagaaattctgttccagattgaacagtgaattccttcagcttaagtgagaattctgttgatagatatctactttaattctttcctgttatggtgaagaggaaggccagggacctgggttggctatacaggtagcttgttttctgggtcgtgggctacctcagcaactggaagtctctgtgcttaggatcaccactaagggagggatctcctccatgagtcctatataccgtgggaagggattgtcatccctctktggaagtcagatcacttgggcgccttgtgacctccactctctgatgggctcaagaaaatgaagattttgtgttttgtccagcttttctcgtcatagtgggaaggatgttctttgcatctttttacattcctagaagcggagaacccttatatttcttttctgagacaagtttcttgattttcttttcagatatattccatgcatatacaagcacatatacttccccattttttgcacaaatggtagcacactatactcactattttgtaacctcctttcttagtaatgtattttggagattggtccatatcagtccataacagcttcataatatttcactatgtggagatactatgatagaacttctcttgtttccagtctcatgctgctgtaaacaatactgtggtaaatatctttgtacattggtctttgtggttatgtgcaattatgcttgtaaaaaaaactcttagaagttgaattgctgagttgaagtgcatgtaaacgtataatgccaatttttactctcagcaacagagtatgaaagtgcttgtcctcaaatacagtgtactgttaaatgtttttatctttgaaaaatcaatagatgataaatggtatcttgttttaattaaatttctttgtgagtgaggttgaacatctcttcaagtataaaagccatttatatttctgtttctagaaaattatcttaaatgtaacctaaatcttaaatccttcattgggtctgttttggggcagttttgttgatcttcctgtcaattcttctacttttgacttagttttaaaaattgctaccaaataggtaatgcagtcatgtttcaaaaattaaaaaatatattttaaatgtttgatgaaaacttcttccacctctgtcttcatccaccctatttacccttacccccaaataaccattttttaatttttttctttaatcttttcagtatttctttatatgaacacaaggaaatacatatacagcttcttattcctccttttcttacacaaaagatacacaatgttctgtacattagtctgttcatttaaaaatttatcctagaattgtctccatgtcagtggccagagttcatcttttttcttttattgatttcacttaatataataacctccagttccatccgtgttgctgtgaatgacaggatttcattcttttttatggctgaattgtattccattgtgtgtatgtactacattttctttttccattcatccattaatggacacttaggttgattctgtagcttggctattgtgaatagtgctgcaatacacatggatgacgtgagtatactttaagtatggtgtaaatatgtaaaagcagcttctgttaatgagtttcagggcatggtactgagaagctttgtttttttaaatcatatatctttaataaaaactttaatttttgacactgggctcccactccccactccctcaaaaccttatctttagtgggcatgtcatttcaggtaactagatgatgatttaattaggcagataaaaaatactgttgtgggatctgccgaagcaatcttgaggttaaactgtcaggaaagacgatcagaatctgtaccttcattgtaatggagactggaaaagaaaggatccatcatttcttgcttctataactggagttgggaattccccaaatatagaaaaaggtgcagatgctgggtggccaaaacaactgacaatgttactccagattgccacttagattctggaagtcaggttgattgggatggtatttgaagatatcctttttaaaaaaatctttcctaggcaaggcgacttagtccagggtaataatgtgaatgcagcagaagggaaaatatgagaatattttagagaaataatcaatgggaaatgttgattgcttaattataaggtatgtgagagagggcgtaattaaagattttgaacttgacaggagtagggacgaggagaagggtgattagcccaagatgaattacagcaactccaatgctggccacatttttgccagccatttgttatctggacacttccaatgacaggaaaccggttacataatatgctgcccaaataatcgtgtgatagttctgactgcaagaaattggtcctggtgttaacctccttagaatatacagaacacctctaattctttttcaatttgagagccctgcaaatatccaatctaaatgttgccagcttactcagtcattccttaggatagaacagagttctgagttccctcactgtcctgtatatttcctctgaactggtaccagaactaaataaactcctccaggaccatcattgctcatctggacatcgtgcttctgagaaagcagctggagattccattagctttgttctggcagccacgccacaccgttgactcacactgagcttcctgtcaaacggacttagatttcctctgtgtttcagctaagctatcttttctccagtctgttcttgtgctattgctgttttgcttaagcccaggaacaggacctacattattactgttgaatttcatcttttatttatttatttttgtaattgattcttttttatttttttgaaacaggatctcactctgttgcccaggctggagtgcagtggtgcaatctcagctcattgcaacctccacctcccaggttcaagcagttctcctgcctcagcctcctgaaaagctgggattactggcgcctgccaccatgcccggctaatttttgtatttttagtagagacggggcttcaccatgttgcccaggctcgaactcctgacctcaggtcatcctcctgcctcggcctcccaaagtgctgggattacactgcgcctggcctgtaattgattttttacgccacatctttctggacactgactatgtcatacaaacactgtgagcaagagcatgggagaaaagacccagtttgggggcaagccagtgagactggtacgttcaggctggcacataccgagtttgaagtaaccgtgggtaaatttgtctagagctgaggggagggacctgggctccagatggagttttggtggttactggggtataggaagtagttaaagttatcggggtggatgagattatccaaggagggtgtgatgagtaagaaggaaaaggacctagggcagaattttgggagataccgcagttagagagtaagaggaaaagtgtcagcaaaactgagaagagataagaggagagaccattagaggcgatggataaccctaaataccttgcagtggtaatgccagtcacccgcctttcctcccagggctctgactgatagggcacagagaaggaatggacaaggggcacaagataaggaagatggatgcaaaacagctgtttcatcactgaaaaagctgaattggagacagctacttgggcctgaagtctaagtggggcttccgagtctttctggtgaagtggattcccaatattaatggtttaggaagaaatgggtagcaacgacagcaagaagtgtggcagtggaagagaaaggagatgagatggtagttaaaagtgaaagacacaaatgggaggaaagtatttattcatttgcagtgtcaaccagaaaaccagtgacccaggctatcagacccaggcctgataaagaaagaaatacaaccaagtgatgagatggactcgaagtcaacaattttccaaagggctaactacatctttagggcctgaagtgtgtgttttagatgagttctgccaataggtatttgtgagattgaggataaagtgcacaggttagaagtcttaataggaaaaatccttggactggttcctccacaggccaaatgctttgggacaagctctctaaatggcagagaggtcactcaggtccaaccctggcttattctccctgcccctgcatttgatgaataccttaaacctttaccgtgaatcggatacaagactttaagatcttagcaccaaaatacgtacacaccacagaaaagcagaaagaaaacttcaagtctagcattttactctttttaaattggaagatggcagtatgtggatccacttggctctagatgataacagtcagcactcaaatatgttgttattttctgagagaataatataatgaactcttcctaggtggtattattgtacttccattaggaggaaaatcgtatctggttgtctccctttttgtgattgtagcagccactgatgcttaatgcttaaattgattaattcattaaggattacaaatggtgagattctatttctcattcgctcctaatcaagtgtttactccaccactccatcaaaactgctcttgtcaaggttgactaatgtcctgcgtcatgggtttgttgtgaggatgaagtgagttatatgtaatgcacttcataagtagccaataaaggtgaccaattcatattgtattactagcaccgctagtactagtaccacggaaagatattggaggatgtgctcctcttcccccactttggggggctttcacttccaacagcggcagctcctgtttgggagattgctattggcctactagagaccattttgcttgcatgttagagagctgaaagtgtctgggaatggcataccccactccttaatcatgggaggggatggacaatgtacagcctctgaagcaggaacacgcctggaatgttccaagagcagtgagcttggctgcagcccagggagtaaggaatggagcaaatgaggtcagagtggtgatgtgagtagaggccttactttagcctttggcttttcgtctgagtaarggaggaagacaccagagggttctgagaacagaactgacatgatttgatgtgaattgtaacaggatcactctggcagctgcctgcaagctgtaggggccagggcagaagcagggagaccaggtgaggggctagtgcagtgatacaggtgagatgcgtggagaggggtatattctaaaggtagaaccggtaagattttctgatggattggttattctatgcaagagaaagaaaggagtcgagaattccagtgtcttggcctgagcagctggaaggatagasttgccatgtactgagatgtgraagccccaactacccccatgggctccattctgggaagatgtcttgtgaacagtctgcatttaattgttttgaaaatttgcttttggagttatagacttttcatttcactccgacttgtaaatgggatgaagggaatggcactcaaataatcacagcacatgagagtgcggagattgccaaaatataagcgtagactggggtggaggggcttatgtgtgtggtttgcttattcataccataatttattcaaccttttgatagatatttagtttctttctgatttttagttattatgaagaatgacattaagatacattgcacatgtttgaacatttttgccaggcttatatacaaagatgtctcatttaaaattagatatggatatatagtttggggccatttctgtttctttttctgtgaaatactgattcatatattttgcccatgtttttctattaggtcattcatatttatcttaacgtctcatagaagctctttttgtgctttgtttattacatacacatttatgtgtaattcaacatagaagattaaaagaaaacataggaaaatattttgataatcttggagtggagaaggcttccagatcgcataataggaggttagcccccacttcagtcagactggatgtgctcaaagcatgctgggaagccttggctggggtggctccagatctgctgtctctgtagctaagggcaagcgttagagtggaaacagcgatcaaagtcagtttccttcccttgcaaagcagcccctctgtttacttgtctgtctccctccctgagcgccttgctcagcgctgtctccccagggcctgcagtgtgctacatcaaagtcggggttccttcccttgtgggttgtgcccagtgcctgaaaacacagtgtcttcctgccaagtagagccttgtaagaacgtcccactgacctgcaaagtgtgtgggcgaaaaccttcccatcctccctcttaggccctggacttccctctgttacaacattagcattctgcacagtgattatttgtttgacttactcatatttgtagcctttcactggagaatttctatccaagtaattcagcctattttgccttctttgcacataagaacgtcaccatgctctagaccaagctaaagctttggctattacttactaaaaggcaacagcagcaaagtgacagctaggcccccaaaggggaatggctgcttttctgtcccctccttttctttagttatttcaccactaagtcatgacttcctgttagaggcttccagttctggcagtatttggttcctatttcacaagaagccagtctgttacattgtggcttttagtgctaacaagaaatcagtggtttagggtctttggccaggagaacagtgtaattagaagttaaactgaggtttaaacagtaatttaaccccacccaaattttcacaccaaatgagaattctaacatcaccttgccaaaaaaaaggtacactcttcaaagtgttagcccctaaaatgttagactgatcaacattgtaagtaaatataagagatgaaagttattgtcagataattacctccaggacagataactgactcggaaagtctttagatttgagatctcttgagctatgacccttataccaaattaggtaaagagcttacggtacaaaaaagaaaattgtagatcaatctcacttaacgcagatatgagagacaaattctagatatatgttgtatttaaatgtaaagaaaacgaaataatataatttctagaagggacaatgttattgaatctcaatctgatcgtggggttgggaaaacctttctaaacatgatagcagaggaaaaaccataaaggaggagagaaggatttttgctacatgaaaataaaacatatctctttgctcatttatttattcagtcggttctccaacaaataatctagtgagtgtctcctatatgctgaacactattttaggtacttcaaaaacaataccaacttataaggcaaatgacaaaatgcgaaagtttttcacatcatacgaggcaagcaaagagttcatattcttcacttttatgagtaatcctgatcaatgattagaaaaagatcagcatcacaattggaaaatgggcaacatacatgaacagcagttcacagacagttcacagcagttcacaaagggacgtgacacataaaaaatagcatacattgaattgcaaatgagactggttggtgttgttgtatctgagtgtgcatattgacatattctggaccagtgctcactgattcattcagcaaacattttctgaaccctaacttgcacatgtattcttgggaggaaagaaagggcatttgggtcaacagtgaagaggccaagagtttgtctggaactgtaagcaataaagagttcttccttctagcagatgtgctttgagccaagcaagtaatgaaaccaagttgaaattgagagtgttcttttcctctccaagtacctggggataagtcagcaggcagatgccctctggggtcttaacttctcccacgckgagacaggagcttaagtaaacactggtgccctgtggtctctgatggagcagcttctattgactcaaggttatgtgctggccgggggctcggaggtggttttggcaacttcctccagccagaggagtacttagaactgatgaaccaccctgaaaaaattcatttggggctgtagctgactgctgggtttcccactgaccctggggtgctgggaccctttctagaacggctcactccttcccctgtcatctcttttcttccctctcacccttagactcacacacaacacttaggtgtttcaagcatttctactttttaggaattcatatatggttagaaagccttcccagctgccagtattacgtaagtgtccacctctattttttcagtactgtcagtttctttatttcaatgtaaatgtttaatccaggaagaatttatttttattatatgtggaatgagatagagattcattaattamttcaacaagatttactgagtccctgttaggcaccaggcactgttgggacatttgagaaagactttcttcagtattaaacgtcagattatattatgtccgataacaccagatacaaggttttctgaatgctttccaaattcatgtattttaggaaaaaaaataggaggacctcttgctagactatgagctcatttttacaaaatgatgttgtatttttctcctctcctagaccttttaacctgaatacacactcttccacaatcccagtcattcagctcatgcttttcttcatgtggaatgaggttcctctttgactcctcacccactgctcactcttctgatgtgctaagctctttgacctacatagctctagtcagcggatgacagcttctcgacatcacacatagtctgtgattaggaaccagaccgaagcagacgatctgatttcatggccacctctgctacatattcgctcttgcccgaccgcaacttgctcaacctctgtgtgcctcagtttctgcatatgtatagaatgccctaaaaagagtattcactcacatggggtctgtgtgagcgtcaaatgatttaatttaatttaaagcatttagaataattcctgggatatacgtgttagctattaatattgctattgcatattttgagggatctgtgttacttcatgtttgtctgtgactctggtactgatatcttctcattgttaatggactcctttagagacaatcccaggagccaccacacctgtgcactcagcttgggcaatggggaatgtccctagcggacacccatgggtgtgagggtaacatttttcattacttttcttgtgggaaaagatgcataacataatattgaccattttaatcacgcgtaaggggacagttcagtggcattaactactgtaccttcataatgttgtgtaaccatcaccactaattatacctaacactttggagttattcttaatgttttgcaagtacctctgcttagaagagcctcccctcaaccacattggtctcacacaactggtgagttcagctgcgccgtcacttcctctatattgcaccttccttgattctccatccagacttgattacctccactgcacctcagacacttaatgtatcacagaacttaccagagtttaaaataactttattcctgagttggttttggcccatggtttcaacccgtaattttgcatcctgatcctgacctaacatattagtgaccctcccaggtttgtaaacacttgcagatttgattagctggtcttaatgacctcaaagattctgccacacaagaaataatgagaaactggccaggatattcagtggcactttggttgacaatacatgaggaaggtcaagtccatgtcatgtatgtacttgaacacagacctcttggtgtacttatctttgctgaacatttctcctcaggattctcccttccaaggcccaccatactgtagagatacaggacttttctgcttctgttgacaagctatagaagcagatcctgtgggccaggccatcttcaggacaatcacaggaagttattccacgccttggacaagtcccaactctatctggcagggagcagaaggttacaggccatcaggctgaaaggtcaccggcaatcccagggctagtggcattgagccaggatagagaggagaagtgtgtaacctgctcctggaaactcccaacctttgtggccccccttggcaaggaagtagaaggtggagggaaagggccctcttgagtaaagctcagcagaaaatagaaaattaaccagatttctgtttctttaatgatgcttaccttttgcaacacataaacaacccccagcctcgtgagtgcgttcaaggtgtagctactgggcagagaacgggagatcagcttagaggagcaggtcttgggaggttaccaaaaatctctaagttgttaccaaatgctttatttcatttcatgttctgggaccacatccaaaattcctaggggccttgcaagtggcagtcagtaattgagttgttaggttttctaaacagtaactagaatctactaagtatatgtcaatagcaacacaagaacaagaaaaacacggtaggggaaagttgtccatagtcagaggaacaggggtgaggaagggtgtcaaaggaaatgaaaagtcagtaaatcagacaagagcaattcttattcctctttccttcttttcctctgtgtcttctggactccaaagaatgtttgcacatgaagggacagaaatatccaactttgcaatacagagctaaatcagaggaaataactttgacagttccatgtgatagaacagtgcccaaagtgctctagcacatgactgtttccctgcagatacccccacagcaaactgcagagcgtggcaggagcaaccagcttgaaaacttgcctggtaaagttctaagctatcttgaagggtcatcaaccaacttgaacgggcacataccctctccttactgtggctctgttttctctcttctttaatttcaaataatttgaaacaatgttgttgaacactgaatgggggagccatgggttcagattcactgttactcagtgagaaagccacttcatctgtctgagtaccagtttctttttctggaaagttagggtagtagctgccctgaccactgcacgagattaggaatgtcaattgataaaaacttgtaggagaaagaaatgtcatcagtgaaagctcatttgcccttgttccatgaggccctgatagcatgttacacaatagtattatctgctaattgcaaaccagaaccctgtgattcagtctgaatcctttcctctccctggtggcccacatgcatttggtgacccagtcctgttaattctccttgcaacttgtctgctactgccacatctctagcttcatcttccgtcactccaaacctctggcagttacgaactcatccaggtggcactcattaacagcatttggcccagttcttggttcattgcaccgagcatcataggagcagggcctgggtcatattcttcgctgtttcccttgcaaccaaccgggcttggttcacagtaggcattggataaatgtcttttcacaagagcattgagtccatttacatttaaagtaatcatgggtgcctttggattaaagtcaagcatcttattgtgctttttatttgccctatcttttctaggtttctttttctgcacttttaaaatttcctttggattgagtgtctttttgtaaacttactattttgaaatcactagattcacaggaagttgtaaagaaatgtccaggaaaccagtgcaccttttccccccagttccctcagtgtcgccatctagcataattctagttcggtctcacaacagcaaatgacattgataccctctaagagcagctgtagatgtcaccccttacacgtgcatgtgtgtgcatgtgtagctctgtgtgatttcatcacctgtgtagagtcatgtacccaccactgaaaccaatactgaactgttccatcacaaagatcccctgtgttgcccctttatagccatactttagtcagtcatgctgtccacaacaacacattgagtacgtattgtatgccaagactgttaaagatgttggaggtactttagggaccaagatgggcaacgtccttgccttcacagagcatacagtttaggtcagcacaggctaagatcccagggaaagttggagccagttgctgtttactgggtgtggcttggtttccaggatttctgtgttctatctgtaactccaactgctccccaagctagttccatctccaacgtctcatcaatttacattcaacttgaaagcctttcacagttggttcaggtaggatcttagcaacatttttttttctccttgttgtcttttaatctgaggcatctcctatacctggtcaataaggccactgaaaaagcagcgcagaaggagaccaacacctgtaagcaatcagaacaatcagaatctgagcaccaaaatcctggcgctctaggcgctcttggccaggacagtatgaagcacgtccatgggtcaggaggggaagagscccacacaattccttttggcagattcagtcaaaaagtgtcattgctgaaatgacagcagtattgaaggatcaaaacgtagagctccaaatgcagataggtataggttctcctccctcagcctgagttggaaagcctggctctgaaggcaggttgctgacccctcctgtgcacatgtgaaggaaatgatttcacagctttgggatttcaccaccgcagagggggcagagggccaattctgctgaaacaaagggacaataatcactctcaccagaaaagtagtttaaatcagaggtgtctctttacagcctcagagattttcaggatgtttctcagttcatttctgtgtcttttgacaatggatacaatccaggcgggccacttcaattttattggagtgaattctggagccaaagaagtgaaacttgctataacccagccaggtttattttactgtgcaagtagaattgagtgcaggaggaacgtgtccaaacttctaagccttgttcgttgttcagtttaatcctgaacaacatgctgcaatatctggatagagtatttgctggttttgagttaaaactctggtatgatgccttgcctgacagcctaagttccagcttggagactgtgtctatctggttcactgttacatctccagctcctagcacataaatatgtgatgagtacattctggtgattaggtttgctataaactacaatactagtcttgttcctcaagagtagtgttttaaacctaggtctatgatatcatgaaatcacatgtacaattcattcattcaacaagtatttactgagcaactatcctgtgccaggcactactaggcccagaggataaaacagtgatcaagacagacaaagtctctactgtccgggagctcacattctagtgctggaggcagagaatgactgtggctggccacttcaatatggatgatcagagagggtctctctgagagatgacaattaagttcaggtgtcaataacaggaagcagagatctgcatggcagccatgcaaggatctgtgtgacagagtattccatggagaaggaacaagtaaggcaaagcccccaagatggagaggagattctacatgttcaggaacagcaaaaagaccagtgtggaagagcaagagagtggctgagatgtgaagtgggagagacaggcagagccagttcatgtgggacgttctaggctatgtgaaagagtttgggttttgttattaatttattgggaagcctttggagggtgctaaccaagggaacaacatgatctgatttatgattttaaaatgttattgacttctttgttaagaatgaatttatggggggagttgagagtggatgtgggaagacaagaggctatttcaattactcaggtgaaagacaatggtgacttggactagggtggttgtggggcaggggtggtgcatggagagaagtggattgatttggaatgttttgaaagtagagtcaacagaactcactagtggtttggatatggagagtggaagcaaagatcactccaaagtttttgtatttacagaatggaaggatggcgataccattgggaggtactgagaggctgggagaggagagggttaagtggccatgaaataaaagctgcattttggccctgttaagtttgacagacctcttagatatgtaagtggagatgtcagttagatggttggctatatgggtctgaagttcatgggaaagatccagattggaaacataattttgtaaaccatcatcaaatagatggtagttaagggaaatgagactggatgaagcctcttttattttcatctgtggccgcttacttttatgcatcgtgatctgcacctctgcaccaagtcaggcctggtgaattaggatctctggaggtgaggtccaggaatgtgcatttttaacagctctctgggtgattctggttattcctctcttcccaggcttttctatctgtgcttcaggtttgatgatcacttcttcagagtctgagatgttattatgcccatctagtgtattttttttgtttcagatattgtattttttacctacacatgttccatttttttcttgtctgtaacttccatttctctcattatgttcgtattttcctttaaatctcaaatgttataatagctgtttcaaagttgtctgcttattctatcatctctgttatttctaggtttctttctattgactgatttttcctttggttatgagtcatatttttatgcttctttgcatatttagtaatttcttgggtgttttcattgtaaatattatattgttgagtgtctgcttttgtctttccttaragtgttgaatttttgttttggccagcaattcattaccttgctgatgaacttgatcattccaagccttctttttaagctttcttagggcaagtctagagcagcctgtactctagggctagtttggccttactcctgcttctaagatgtggcctctctttgagtctctactgaatgttccaggtctctccattatggctgatcagcactcaaacatctcccagccctgtgtgagctctggcagttgtttagattgggggtcttcagtagttgttttaggatgcacctcatagggtttcactctacacacatgaatgttagtattcagccaaagtctcatggggaaacacctatgtagatttgtagagctctttctctacataactgtgttctctgtggtcctttgtcctgcaaattctagccacctcaaccacccagaattccgatctctgctttctcaactctgtgagatagccatggttgagaaagtgcttacaggatgaaagccagggtgatcagggactcacctcttttgctttcctttttatagaggccatagctctgcactgactgccatctaatgtctatttcatgtatttatttggtctagttttctaattggttttatgggtaggaggcaagttcagtgtccagtacactaatgtggctggaagtggaagtccttccaggtgattcagatgcataataaaggttgcagagtgtattagtttcccagggctgctgtaacaaagtaccacagactgggtggcttagacaagagaggtcattatagtctcacagttctggaggctggacatctgaaattgagctgtcagcagatttggttccttctcaaggctgtgagggaaggatgtgttccaggcttctctccttgacttgtagatggccatcttctctctgtgtcttttyacgatgtcttccttctatgcatctctgtgttccaatttcccctttttatgaagacaccagtcatatttgattatgaccccactttaacttgctaaagactatttccatataagtttatattcggggatactgggggcttaggagtttaacatatgaatttgggggggcggtgacacctgccattgcataggacccacttcagccttgcaggtactcgcacctttgttcactccattaagaaacaaacttggagatgtttgttaactatgtaatcagcaagttggattgttttaagatgagaacaatgtgtagcttttactctcagaagaatgggattaaactgttctctaacaattttttaaaaactaacaagcctgtgacctaaacacaccttcctggaggagactagaaattagcacaaacacctttccacaaggttacaggatattgcagggttttgttgttagagatgatactggtcggtggtaatgagtcagcttggttgctgtggcaggaaaggctgatgggaagtggatctttcgatggtcagagctggaaaagccctcagagctcatcattgtatagtatggagacatgggctccagaaggggagaagcagtttccccaaggcaagtgatgccatgagccctgggggccaacagtcacattgtcattttatttttatttatttatttatttatttatttatttatttatttatttaagatgaagtctcactctgttgcccaggctggagtgcagtggcccaatctcggctaactgcaacctccacatactgggttcaagcaattctgcctcagcctcctgagtagttgggattacaggtgcgtgccatcacacctggctaatttttgtatttttagtagagacggggtttcaccatgttggtcaggctggtctcgaattccagacttcaagtgatccacccgtctcggtctcccaaactgctgggataacaggcgtgagccaccgcacccagcccacattgtcgttttataagttacttttacattgataatgttttgccattgtttctcattggttcactacaatcataccataagggtgacaggccagggtttactatttacatttacagatgacaggactgaggtttgcagaagttgagttactcaagtactgtgtgctcaaagtcacacagaaagtagaatcrgaattcaaattcaggtctcctgactttcaattcagtgcctccccctgcccatttttgtactccatttctctaagttactgttatggatacttgtttgcatagtgattccgctttctatatcctcttgacccaggctcatcttcacagtctatcgtgaactcttgacctcacccttttccatcttggcttcccaagctgctcatgacctacccagcagagaaggcctgaggggagaaggtgaagtccagtgcagctacttgaagccagcaagcctgcaattttatgtttccataaaatgcaaacatctcagtaagaagagagggcagccctcaggtcctaacatccccacaccctctattctgaagtgttcaccatcatcttttgtactctttacttcctgacccatctctgaacttcttaggttcagacccctctacttatctcttatttatactctgactccctctcctcacatctggtagttgatgctggacattgagcataaacctctgctttccttcctcatcctgtgagcttacgaactccctgataaacatagcaccctttttctttacatgcacagtgtctggcacatagtggacactcggtaaatattgattgaatgaatccacaaatgtgccctgtacagaggaattgttttaagattttttttgtcataaaagaaaacacaaggccgggcacggtggttcacgcctgtaatcccagcactttgggaggctgaggcaggcaggtcacctgaggtcaggagttcgagaccagcctgaccaacatggcgaaaccccatttctactaaagatacaaaaaattagccgggcatggtggtgcatgcctgtaatcccagctacttgggaggctgaggcaggagaatcgcttgaaactgggaggtggaggttgcagtgagccaagatcacaccactgccctccagcctgggcgacaagagcaaaaaactctgtcaaaaaaaaagaaagaaaagaaaacacaaatattgcaaaccacataaaacaaatgtattgacaaatagaactttgccacccacaacagaagtccctccatgtgtccttctcgatcataacctccttcttctccccataaataactaccatcctgacatgtatagaaatatcttctttgcatttttaatgtttttatcactcaaatgagtatctgctaggcacacttaaacattttgatgtgtcttttaagtatcatttaatccatagatatctcctctgtccctttttcttttctttttaaaagtaaattttattgtatataatttggagtttacaacatgaccttataggataccaatggatagtaaatggttactatagtgaaggaaattaacatacaatctcacatgtttactttgtgtgtgtcaatagcagcaaaaatctacttatttcacagaaatccctaaggcaatacaattgcattagatgctggttggatctttagctgcagtcctcatgctgtacattggatctctmgacttgctcctcttacatatttgctactttgtatcctttgacctacatcttcccatttcctcccatcttgtccctggtaaccagttttttttwtatatatttataaatataccacagtacatttgaccttttccccccacgtacaaaacagatcattcagtatttgtctttctgtgtctggcctgtttcacttaacataatgtcctctagatccatctatctttttgcaaatggcaggatctccttcctttttaaggatgaataatatttcatagtgtgatgcgatgcacatgccacaatatctttatccacttatctgtcaacagacacctaggttgtttccatatcttggccattgtaaattaatgctgcactgatcatgggagtgcagatatctttatgagagggtgatttcacttcctttgggtctatactcagaagagggtctgctgggtcagggtctgctgggtcatgtggtaggtctaatttcaacttccttaggaacctccatagtgttttccataagggttgtatgaatctacattcccaccaacagtatactagggtttccttttctccacaccctcaccaacacttgttatcgcttgtctttttgataattgccattctgatgaatatgaagtgatatctcattgtggttttcatttgcatttccttggtgattagtgatatcgagcatcttttcatatacctgttgctatacttgaatgtgtcctccaaagttcatgtgttggaaacttaatccctaatgcaacagtgttgggaggtgggacctttaagagatggttaggtcatgaagtcagccctcatgaatgggtttmtgtcagtgtcaagggagtgggtttgttatcaagagagtgggtttgttctaaaagtaagttcagctctctcttgctcttgcgtgcactcgcttgcccttctgccttctgctatggggtgacacagcaagcagatcctcaccagatgctgagcagatgctggtgctatgcctttggacttsccagtctccagaaccatgagcaaaataaactaatattgttataaattatccaatctcagatattctgttatggcaaaagaaaatggactaagatacctgctagacatttttatgtcttcattggagaaatgtctgttcagatccttcacccattttttgtttctttttccgcaattgacttgtaagagttctttgtaaattttgaatattaaccccttaatgtagtttgcaaacattttttcccagtacataggttgccttttcattttattgattgcttcctttcctgtgcttttctttttcttataacctatccattgaagaacctgggcttttgacctgtagagttttctacaggctggcttctgctgattgcaccctcatatcaggctatcaraggcacaaaatgtctgattgtttcttttcccaagttagcagctgttgatgcttaatggctatacctattaattcactggggctagcaaatagggatattctaattctgtcatttgtttttccattactgatcagaatacattcataaagagacattcccttcatctacccaagtgggacagttcacgtagaggaaaggttggataatgcttgattcttcccttttacttaagtagttttcaaggaaatgaagtagttcccttacatcctctgaagatgacaaattcttttgctttttttttttttttttttttttgagacggagtctcgctctgtcgcccaggctggagtgcagtggcgcgatctcggctcactgcaggctccgccccccggggttcacgccattctcctgcctcagcctcccgagtagctgggactacaggcgcccactacctcgcccggctaattttttgtatttttattagagacggggtttcactgtgttagccaggatggtctcgatctcctgaygacaaattatttttctaatatcataatgaactcatggatttaagtgtatttgatggatttcaagctactataattattacacaatcatgcatcattcaatgacgggcatatgttctgagaaatgtgtcattaggtgatttagtcactttgcaaacatcacagggtgtacttacacaaacctagcttactacacacctaggctatatgttatagcctgttgcttctgggctacaaacctgtacagtatggtactatattgaatactgtaggcaattgtaacacaatggtaggtatttgtgtatctaaacatagaaaaggtacaataaaaatatggtattaaatcttttgggattcagatgtctcggaggattgaaaaaaaatcttataggaccaccattgtatatttggttcattgttactattatgtcatgcagcatatgactatttatgaaagcaaaaattctttcatatatggccagtggtagcctcttcaggttagcccctaagtccttttgacatggccctcatcattccttgtggcattgtttcactgtaaaaagcttcactttagtgctggcagactgactgctttcaggggctttgtcacatgtcttccattttccagaagcctgtaagcctggtggaacagaactatatgtggcctctggttttacctacttagcaaagagctccaagaacacctcatttctgtttttgcataatcaaaactcttatgtagagatttaaaaacctaagggatgacacactggcgattttgcatgattcagcatcaagactatgctacgtcctatttaagttactgtgtgactgttctttttcctttccaccctcatgcctgccttccagccctgctgaactacttacgcaaagttttgagcctttccaccttaatgcctttgtgcacgctgcttcctcctgccccactttagccttagcttagtcaccacttcttcctggaagcctccccagacaactgatctgagagagatgtctcttttgtttgttcccatagcatcttggttttgccttatcgtagcacttatctcactgattgcaatcgtctgtttatccatctgctcactcccttgttgcccatgagactgtgagtggcagggcatgtggcttgctcacttcatcttccccagtatctgcacagtgtccagcatattagtgggctatcaacaggtaattgttgaatgaatggataaagcccaaacttcttcatgtcactcttcccattgcactcccaccactcctggttcattcttctgctagaccgctcactacgctgagttgaaatctacccatatcataattctacccttctccctatcccagctagagagtgaggtcttttagggaccagctctaatccccttttctagcttcattgtctagcaggatgcacagtgcagagtaggcactcaaataaactcttggtgttacttctcttccaatattgttattaaaagataagaaatctattgtctccataacactaagagcggttaatgtgaaacttgtttctgtgcttagtttgacttcctcttttagaatcatttttgggaagtgcaacaaagttcctctttacatttcccccaccaaagtggcttttggaaagtttggagcaccccatgctccctccccatgaaagctttcctcagcaggcacaaatggcattctctcatcccctgagccccttccctggactaggccttatgttcctgtttgcctcagttgatgccagaagcccaggtttcccactttcaaaccccacagcaaracttgagctccttctcttatgtttagtggctctactcccatccagtgccacgtttttgcaacaggaatttactgaatcaatttttctctccctcttgggtcacccccacgagcatacaaacatgctgttatttttcctgtcttaaaaacatggacttaatcacaccacgttgtttgtctcctgagatggtctccttgtttgactcatggccagacctcttttcaaagctttatactgtctgtaaaggcaggagcaaaccagggttcacctgccccaacctgacatggagtgactgccttccttctgcttgctgccccttgcctcagtcctggaagggctttttattctaaggcataattggaggtcagtgcttctttggattctctgccatctcagattcatgttctctgagcagggagggagctgagaatactccaaatagtgtcttttcctttttccctggcctcttggtcaaagctggtgggcttaaaaagtatcacacataaatgaagctagagatacaaaagacttcctgtcccaggggtcgctgtacctcctggcagaaccccacacttcctgctgtcacacatgctaccgcatgggagagaaaaaccacagagctataaatctccctgcggtcagccgtcatccttctctgtgctcaattcccaactggggctaatgccatagttccctaccgcagaaagtaaggatacgctatccatgcaggctggcctatctggcccttcgatgaacaaagggcacctaaatgtaagacaaggaactcaaacatttccttccccctggctccatgagagggcagggaggtttacagatccaggggactccctagggctttggtcaattgtaaatacctctttccccaggccagagatctgcaccctttctttgtactgagccaagatggtactgtctacatcaaaaattctaagtcaatggtgagtgggaagccaaggagccctaggtcattctcagttgttctcagggcacaaaaagagacctgtcaaatcttggcactggtttctgtggaatatcattctcttttcttttctgagcatggactgagctttacctgttcatctgacttccaggcttggctctttccaagattcctattccattaaggaaaattcctttttgtttttacagtgtttcaaaacaggggcactgatagctttaggccaatcctgccatgccccaccccccactccatctccagcctttataacaagcaaaacccacatattttcagatgctccygagaggaattataccatccctggttgaaaaacactgtgacttagggggtgaatgcttaagagtctcccatctttaaaaaatcccttgaccccagagctttccccctttacagtcagatgtttctggagagctggctacacttcctctctctctttattttttaacttcacatccattaccgatccttccatcccaacctgagttcaaattcattcctacagttgtttagctatgtgaccttgagcacattacttaatctctctgaacctcaattttatcagacataagatggagatagtaatagttacccctcccatagtatagttttagggattaaatgggttacagtaaagcgcttagacaagggtctcttacataggaagtgtaactagccaagctagttaattctctgagaattctattagtgttttaatcatcattgggggttttatggaagacaatttgtcaccttcagacactggcaatcttctctcctcctctccaatgtgtatgattttccttcttggccagttgtgtagaacttaaatagcaatgttggaagatactggggcagtggtgagcatttgtgattttcatctgattttaatgtatgatattggctcttgaactgagatacataatagtaagaaagcttccttctagttctttattgctaagattcttttaaagcttcagcatatgttaaatttgtactacattcctttgctgcatcaatttcaatgattgtataattctggcccttcaaactgtgggtgtgaatcccattactagactctccaatcctgacccgtccttaaaatcatccaataaagcggacttgaagatgggcactagtcctgtaatacaaagcgtttcatcattagaatggctgatttgtttccttcctgctgtccttgtcatgacatgggttcttggcatagcctgagaaacaagagaaattggtccagtaactccttattgaattgcctttctgcaggcctggcgcaagcgctggtttgtcctccggcgaggccgcatgagcggcaaccccgatgtcttggagtactacaggaacaagcactccagcaagcccatccgggtgatagacctcagcgagtgtgcagtgtggaagcatgtgggccccagctttgttcggaaggaatttcagaataatttcgtgttcattgtcaagactacttcccgtacattctacctggtggccaaaactgagcaagaaatgcaggtgtgggtgcacagcatcagtcaggtctgcaaccttggccacctggaggatggtgcaggtaagagcggagttggggctcccatgtgctaaggggtatcccaggactggagggttactgcagaaaaacarttcaagatgccaagcctgcctccttgagggtgttttggcaggctaatttatatcagaactgttcctaccaaatacaatactggaaattgccctcttttacccagtccaaatgtgggaaggcagagtccatgagcacactgagcattgcaggttactttaatggctttaaaaccccttcatgtctttgctctcattcagccacagtgaaagtcaaatgtggatgaggatgtcttcccatgatgctgacactcatgaccttctagaaatatcaaatattgccatacttcaaaatattgtggaactccagcatttctggtgcctattgggttgttcatcactaaatggtagaaagagagaacttggctacttatcgtaggcaagaaagatttcctgatacctccaaatgtctcaagttctctgcagaggaaattagttgtaagtttgctctgggccatttctgggcagtgggagcaattgacccatgaagagtaccccagagtctctctctctctctctctctctctctgccacacgcacacacgcacacacgcacacacacacaactcatcctatgtaattttccaggtatattgtaacctagggttacaattaacttcccttcatggattttgttgttgagcccctgacattattgcaacatgtcctattcctcaaaatatgagattttgaatctggtttcttttagcctcttagtctagtagacaaaactttgcccctaaatcctgtaatctatagttgcttcaacattttaagagttactgcatggtttccaccatctgccactgaaatatccacactctaacgctaggtggcaatggagagtcagaattgaatctccctccaggacaggcacaagagtgtgctttctgagaacacattccttttcgtttcatgaaccagggaagcatattaagtgaggctattcaataatattgctgagcattgggagcactcaaataaaaggaaatgaagtgatggcaagttctttatccttggtacaatggacaaaacttaattggaaaagcagcattaagtaggttctggctagagtctgacattatgcaaatcaagcagaacctccctgaccaactaacttctccagccttgctgctggctctttaccaccctgttgtgcaccttcagccttaactaggtatatcgtcgtatactgtgttatatatctcctctgtttctttccttatccaggagttatcctaaaacatacatatataatatgtttcccaataacccaagagcaccaggaatgagtaaggcaccaggccgaaactggagagcctgtcccggcatgaagttggaggaagccagaaaactcacctatgaccctttccattctctgtagccccccgcctcagtttttagaaccacataagagcagggtcctcttcatctgagaattacacccaaagggctttcttgtgacttttcacagagtgtttggttctgtctccagcaaccatatagtagtcaacacattgtgtgtgtaccctggccaggatctctgttgaaatgcttttgtatattaacttgtctcatccccacagcagttctatggcctatgtgtgattactatctccactttatagaaaaggaaacttggagaaggcaggccatgtagtaatggctatgtagtagagcctggacttgaacctagttagttctgggtcatcctgactcaggaatcctggactattaacttggttcaaaagggaaataaaagcaggcttttcattggctgtttctgatctggagttctcattgattcctgattcaaattcatcttaaggaccatgttctcaggtgatggggagaatgttatgctccttgagaaaaagaaatggacttttccagccaccacagcactgtgtttctttccttccctttacttataacagtgatgaacaggactctttatttatgtgttatttgtctgtcttctctgctagaatctaaacttcaataagggcaggatctttgtcttggctgtattgagggttagtggcattctgggcacatggtagatgtaataggtattctatatagacatatacctatataataaacatgtataggtatacatacatatatgcacaagtacatatataactatatgcatgtacttgttatgcatatatatatatatatatatatatatatatatatatatatatatgtttgttagttgagtgaaaaaacaatgaggcaaggctgctgctgagggccataaagaagctgtgcgtagattaactgcagatttttgggccaagaatgctgggttttttactcttaattgattcaacactttgctcttgaaacattggccttctttcccagacattgtttatagcttggggaaatggtcttctccatcagtacaaacaccagctgtgatttgcatcttctgtttggcttctttgatgctgttggagaaattttgagtgcgtgttatagccattcttaaacattaacctgggaaatgatttctccagcagattccatggagagcctctcttacacgccctcctccctgcagccatcctctgccagctcccttcttaccgcccatgctgccagctcctctttgccaagagatgacccaaacactaatgccgtagccactgaggaaaccagaagtgagtcagagcttctcttccttccagattatctggttttgtccaactgcgagactggaagactgcaccataccaggtatgcttatgcccaggactctgtctgagctgggcctgctagcatgctctctagagtcacactgcctcctcttgcagtccgtagctgagatgtgttcagtgtgcttcaccaaattagtccatttagtggtagcattttctagtgggtgtgtctgctgtcacctctcttcctgccaatgtcaaggcaggaacagattgctatgaaccactgtgaaagatgaagcatgtagtatactaaacagaatgagtcatgcttttcagcattgtggttttcacttctagccttgcattttcatgtgtatctgatgcttagaggatgaaaaaatcaacaaaccatttttcttttgccacaccaaggggttggtgtaactgagtgttgtagagggaatgtggctatgcaagtagcaagcaaggtggtactggggagatgggaatgaggccagcgttggttttgtggtgggtggatggctgcattttagtccaacttacatgcttttcttccccagtctacccaccagatgtgatagctggtcaaactcagaccgttcrttggaacaggcttcatttgatgatgtttttgttgactgcctgcagccgctcccctccagtcatttggtccacycctcatgccatggcagtggagctcaggaggtgccatcctcgaggcctcaggctgccctgatctggagtagagaaatcaatgggccacccagggaccacttgtcttcttcaccattgctggaaagttccttaagttccaccattcaggtagataaaaatcaaggttccttaccctgtggagcaaaagaactagacattatgtccaacactccacctccccgcccccctaagccaagccatctgtctgaacggcgccaagaggagtggagtacacacagtggtagcaagaagccagaatgcactctggttccaagaagaatctccctctctggtttagacaacatgagaacctggaaaggtaagtgttgggtcctaagattcaggcgccaagaaaacccgggctcctcttcactctttgtgcccatgtgaggtcatgccaatggaccaaaacratggggctgggttagaattaccttgatgtgtgcagcttggtaaaaagccacatcagtagtgtgtacttgtgtacatatgtgcttgtcccttgttcaggctggcctgatcttctaatggggctggatccttggtggaagcatataccctgaaagcagcactcttctgttcctggatccccccaacccctcctttgagcctgaccaccaggagagacatttaggtccccatagatgctgcaataggttggaaccctggtcccttgtgatgggcttgcccatgcaagtccttgcccatgtggtaagcttcccacctgagtctgagctcctagtgttttttggagtcactcagggacccacttggtacaaaagttgatgtcttttgtcttaactcagtcccattcccttctttgcctctctctcacatacatagagagtcctgagaccacagaccatcactgccttctattttttagcaatcccatcaacctcattcatcatcccactagacttgttctttccaaattctaagtggctgtacaaagggccctcccacagccctcttttgcccttttctataaggccatttatcctcacgaggttatcttgcaattctgcttgcagttccatcttcctccacctgtttctttccacctgggcctctctggccttcagaagctgtttggtgaaagccaattcaagcccattcattgtggtttttcagtaacctcttctttactgctttgctgrgccacctcatctttctgccatgagccaaccaaccttagcattttgctcttctttcttacatcagtctgtatctctcagatacacagacagacacaaaaactagttgtctatctctgtgtctttctccttttttctttcttctctctctttctttctctctccattgaaatataatcacccacacatcactacttatttaggccatgttttcaaggaattatggaaagtggaaggagtgcaaatttattttcaaattgtacgaatctctcattctgactgagaattaagtcactagtaaaaaccttccctaatgtccctaatgatgttaccattatgtatgttgcttccttttgacagtccttatgaaatagatgtatactgattacacaaatgatctggatatgctaacatgtgtgaacagttgacaaaaagggaaaaatgaaagtggttaagcagattttaggaagtgaaatgaataaaaccagtagaataataacatatgaaaatgaattaaaagtcttaaattgaagaacaaaaacttgaaataatttgaaatttcaacacaaacataaaacaattaggttgtgttcttttacatgaaggcaaacaaagattaaaactaagtaaaatagaggttttgaccatgaaacaaagaccaaacaacagtggtgcctagaagcaaaatggctctgataaagctgagggaatgcataaagtttattgttctgcctttcccactgagatttgcctggaatctgtgttggtacgtggtggcagagtgaggtcaaggttcgtttttgtccatctggatctccatccgatgaccctgcaaggctgtcctgtccccatggctctccagcgccccctstgccatagatgaagtgcccatgtatgtgagggtctgagtttcctttctgctttctatcccttggagcctacttgtccagcttgcaccagtgccacactctcttaattactgtaccattctgtcttaatatccagtaggacaagtcctcctgcctttgggaatataatggctattctagggtcaattttacagtcagctggtcaggttctagacacacatatataaatatattggggatttgaggaggattgcatccgatctgtagatcggtttgtgaagatttgactacaatgttgaattttccaatccatgaataggaaatatgcttccatttctgtaggtcttatttttgtattttaaaatatttaattgacaaataaagattgcacatattcaaggtgtgaatgcatatgcatcagaacatgatgatttgatatgcatatgcattatgtactgattattrcaatcaaactaattaacacatccatggccacccatgctgtacattggatcccccagacttgttcacttatcactgaaagtttgtaccttttgaccaacatattctcatttacctgcattccccagtccctgacaaccaccattttactattgccatgagtttgacttttttagattccacatataagtgaaatcgtgcagtatttttttttctgtgcccagctcatttcactgaacataatctcatcctggtttacccatgttgtcacaaatgacaggataccattcctttttaaggctgagtaatattccattctgaatatataccacattttttatatccattatatcctttatccattcatccagtgatggacacaaattgactacatgttgtattagtccattctcagtatgagaatggactaaagaactatttgaggctgggtgcggtggctcagactgtaatcccagcactttgggaggcgggggcgggcagatcacaaggttagaggttcaagaccagcctggccaatatggtggaaccctgtctctactaaaaatacaaaaattacccagtgtggtggcgggtgcctgtggtcccagctactcgggaggctgaggcaggagaatcgcttgaacctgggaggcagagtttgcagtgagccaagatcacaccactgcactccagtctgggcgacagagcaagacttcgtctcaaaaaaaaaaaaaaactgccggagactgggtaatttgggtaatttataaagcaaagagatttaattgactcactcacagttccacaggctgtacaggaagcatggctagggaggcctcaggaaacttacaatcatggaagaagacaaagaggaaggaagcatgtcttacatggctggagcaggaggaagagagtgaagggggaggtgctacacacttttaaacaaccagatctcgtgagagctctatcacaagacagcactagggggatggtgctgaaccattagaaaccacccccatgatccaatcacctcccaccaggccctacttccaacattgggaattacaattcaacatgagatttgtgggggacacagggccaaaccatatcacatgttgtggctattgtgaatagtgctgcaacaaacacaggagggcaagtatctctttgacatactgatttcatttcttttggatatgtatccagaagagagattgctggatcataaggtagttatatttttagtttctgaggaacctccatactgttttccataatggctataccaatttacattcccaccaacagtgtacaagggttctcttctctacatgctctccaacacttgtatttcttgtcttttttgatattagccatcctcacaggtgtgggccgataccttgtgtggttctgatttgcatttccatgatggttagtgatgtcgagcattttttcatatacctgttggccatttgagaaatgtctattcggatctttgcccattttaaaattgggtcatttagtttttttgctactcagttatgtgagttccttatatatttttactgttaaccccttttatatgatttgcaaatattttctctcattctctaggttgccttttcattttgttgattgtttcctttgctgagcagacacttgttagtttgatgtagctccgcttgtttatttttgctatttttgcctgtgcatttggaatcatatccaaaatatcattgtcaatcaataccaatgtcaatgagctttccccctatattttcttctaggggctaaatggttttagattttagattgaagtctataatccatttcaagttaattttttgtatatggtataagaaaagggcccaagttcattcttttgcgtgtggatatccagttttcccaacacaatttattgaagagactctcctttctccattgtgtattctttgctctcttgtcaaagcatagttgaccatgtacatgtgggtgtatttctggcctctctattctgttcttttggtttatgtatctgtttttatgccagtacaacgtagattttatttaatttgtgtatataatgttttatagtttttagtgtagaaattttacatatctcttattaatacatttccgtgtatttgctattttttatgttattgtcaactgttttttgctgttgtatgaaaacttaaattgagttttggattttgattttatatccagctttttaaaactatggattattttgtcttttctttgcatataattatattgcctgcaaataataatagctttgttttttctttaacaacccttgtatttttcattactttttcttatgtcactgcatgggataagaagtccaggacgttactgaatagtcctggtgacaatacggatccttgtatcattcctgatctcagatagaaagcttctaatatttcaccgttacaatgtggtttgctgyggaatattgtagatatcattcattagattaaagtcattcacatattttctactttgctaactgttattttctaaagtcatgaatagatgtatttcttttatttttaactgacaaataattgtatacatttatgggatacaatatgatgttttgatatacatctatatcatggaatgattaaaatcaagctaattaacaaacattacctaatataattatcattttttgtggttgaagcactttataatcatattatttttatcatgttaatgtcaagaaattcactggataatttttttagtgctaaactaaccttggcatttctggaataaacccaactttatcatgatacctatcctttttataaattactagatttgttttgctcatattttgtttagaacttcaaaaaaaatctgtgttcatgagggagattgtcctgtaactttcttttatcatgacgtctttggttttggtaaaaatgttatgctgacgtcataaaatatggatttatttctgggttctctattctgttccattggtctatgtgtctgttttcataccaatatcatcatgctgtttgggttattgtaattttgtatattttgaattgacgtagtttgatgcctccagctttgttctttctaattttttttttttttttcagaaacaaggtctcattctgtcacccaggcttcagtgcagtggtgtgatcatagatcactacagcctcaaacttctgggcttaaataatcctcccacctcagtcccccaagctgctgggactacaggctcacgccaccacacttgactaatttgaaaaaaaatttttttttttagaggcagggtcttgctatgttgcccaggctgatctcaacctcctgacctcaagcgatcctcccacctcagcttcccaacgtactgggattacaggcataagccactatgtccagcccagatttgttctttttgctcagtattgctttggatgttcaaggtcttttgtggttccatatacattttaagattgttttttctatttctgtgaagaacgtaattgatatactgatattttgatagagagtgcattaaatctgtagataactttggatagcatgttcattttaacaatgttaattcttctgatccatgagcatttttttttttttgagatggagtcttgcactatcgcccaggctggagtgcagtggtgcgatcttggctcactgcaacctctgccttccaggttcaagcgattctcctgcctcagcctcccgagtagctgggattacacgcatgccccaccatgcccagctaatttttgtattattagtagagatggggtttcaccatattgatcaggctggtctcgaactcccaacctaaggtgatctgcctgcctcggcctcccaaagtgccaggattacaggtgcgagccactgtgcccggccagatccagaagaatattaattcttctttccatttgtttgtgtcctcttcaattctttttatcagtgttttgtagtttagttttcattgtacaggtctttcacctctttcattaaatttatccctgggaaattttttgtagctattgtaaatgggattgctttcttcctttctttttcagctagctcattgtttgatgtatagaaatgctacagatttttgtatgttgattttgtatcctgcaaacttactaaattcatttatcagttctaagagttttttggtagcatctttaaattttcctgtatttaatattatgtcatgtgcaaatagagagaatttgtcttcctcttttccaatttggatatctttatttctttcttttgcctgattgctctggccaggacttccagtaatatgttgaataaaagtggtgaaagtgggcattcttttcttcttctagttcttggaggaaaggctttcagcatttccccattctctatgatgttgtctgtgggtttgtcatatatagcctttattattttgaggtatgttccttatatgcctagtttgttgatagtttttttaatcatgaagggatgttgaattttatcaaatgctttttatgcatctattgagatgatcatatggtttttatccttgattctgttgatgtgatgtgtctcattcttgcatctctgagattaatcccacttgatcatggtgtattatctttatgatgtattgtttgactcaggttgctagtattttttaattttttaattttttaaacttttattttaggttttgggtacatgtgcaggtttgttacatagggaaatgcatgtcactgggtttgttgtacagattatttcataacctaggtactaaacctggtattttgttgaagattttgcatctatgttcatcagagatactggcctgtagttttcttttttttcttgtgtccttgtctggttttggtatcagggtgatgctggtctcgtagaatgagagggaattccctcttcattttgtgggggatagtttgagaagcattggtgtcacctcttcttcattttgtgggggatagtttgagaagcattggtgtcacctcttcttcaaatgtttggtagaattcagcagtaaagccatcaagtttctgggctttactttgttggaagacctttttttattattgattcaatctcattactcattattggtttgttcaggttttctagttctttctgattcaatcttggtaggttttacgtgtccaggaatttatccttttcctctgggttttcaaatttgttaatgtataattgttcaaaacaatctctaataaccgtttgtatttctttggtaactattgtaatgcctcctttttcagttctaattttatttatctgagcattcttcgctttttcttactctagttactgactaagtgactaaaccacttagtctagtggtttattgattttgtttatctttttgaagaacgaactttttctgtagttctgatgtgatctttattatttatttccttatactatttttcagtttggtttgctcttgcttttatagtttcttatttctttttaatttttgtgggtacatggtaggcgtatatatttacagggtacatgagatgttttgatacaggcatacaatgtgaaataatcacatcatgcatttgttcttcatgttacaaacaatccaattacactctttttgttatttaaaaatgtacaattaagttattattgactatagtcaccctgttgtgtggtcaaatattaggtcttattctgtctaatgaatttgtgtatctattaaccatccccacttcccccacagccccccaccctggctacctttcccagcctctggcaaccattcttccactctttatgcccataagttcaattgttttgatttttagattccacaaataagtgaggacatgtgacatttgtctttctgtacctggcttctttcacttaacctccttaatgacctccagttcaatccgtgttgttgcaaatgatgggatctcattcttttttatggctgaagagtactctatcgtatatatgtaccacattttctttatctatttatctgtcgatgggcactttggttgcttccaaatcttggctactgcgaatactgctgcagcaaacataggagtgcaggtatctctttgatacactgatttccttcctttggggtatatacccagcagtgggattgctggatctatggtagctcgatttttagttttctgaggaacctccaaacttctccatagtggttgtactaatttacattcctgccaacagtgtacaaaggttcccttttctccacatcctcacaagcatttgttattgcctgtcttttggatataagccatattaactggggtgagatgataatctcattgcagtttttaaatatattttttattttaacttttgttttaagttcaggggtacatgtgtaggtttattaaataggtaaacttgtgtcataggggtttgttgactatttcatcacccaggtattaagcctcgtatccattggttattttttctgatcctttccctcttaccattctctgccctccaataggccccagtgtctattgctcccctctatgtgtccatgtgttctcatcatttagctctgacttttataagtgagagcatgtggtattgggttttctgttattgcgttagtttgctaagaacagtggcctccagctctgtatatgttcctgcaaaggacatgatctcattattttttatggctgcatagtatgccatggtgtatatggaccacattttctttatccaatctgtcatcgatgggcatttaggttgattccatgtctttgctattgtgaatagtgctgaaatgaacatatgcgtgcatgtgtctttatgttagaatgatttatattcctttgagtatatatccagtgatgggactgctgggttgagtggtatttctgtttttaggtctttgaggaatcaccacactgttttccacaatggttgaactaatttacattcccaaaaacagtttataagcattcccttttctctgcaacctcaccagcatctgttattttttgactttttaataataaccattctgactggtgtgggatggcatgttattgtggttttgatttacatttctttagtgatcaatgatgttgagcttttttgtatccttgttggctgcatgtatgtctcttttgagacagttttgatttgcatttctctgatgatcagtaacattgagcaccttttcatatgcctgtttgtcatatgtttgtcttcttttgagaaatgtgtattcaaatctttgttccatcttttaatcagattattagacttttttcctatagagttgtttgagcttcttaaatattctgtttattaatcccttgtcagatgggtagtttgcaaatattttctcccattctgtgggttgtctcttcactctgttgattgtattctttgctgtgcagaagtttttcaagttcatgtgatcccatttgtccatttttgctttggttgtctgtacttttggtgtactgctgaagaatttttttgtccaggcaaatgtcttcgagattttccctaatgttttcttgtagtagttttatagtttgatgccttagcgttttttccctaatgttttcttgtagtagttttatagttcgatgtcttagatttaagtgtttaatccatttagatttgatttttgtatatggtgagagataggggtcttagtttaattattctgtgtatggatatccagttttcccaacaccatttatttatgtgcctatctttttcccagtgtatgttcttggcacctttgtcaaaaatgagttcactgtaggtgtgtggatttgtttctgagttccctattctgttccattggtctatgtgtctgtttttatgccagcaccatgctgtttggttaccatagctctgtagtataatttgaagtcaggtaatgtgattcttccagttttgttctttttgcttaggatagctttggctattctgggtctttcatggttccatacaaattttaggattttttttctatttctgtgaagactttaataggtattttggtagggattgcattgaatctgtagattgctttgggtagtatggacatttaaataatgttgattcttccagtacatgaacatggaatatttttctattttttggtgtactcttcaatttccctcaatattgtctcatagttttcattatagaggtctttcacttctttggttaagttaattcctaggtatttaagtttttgtgtggctattgtatatgggattactttttaatttcttttacagattgttcactgttggcatatagaaatgctactgatttttctatgttgattttgtggcctgcaactttactgaatttgtgtattagttctaatagttttcttgtgtagtgtttaggtttttcccaatataaggcagaggagcctcactccatagctatcaccaccccaggccatggggagtactgtctgcccatgttcccttaaggcccaagggcatttcaggaagcttgcaatgaatgctgtcatataagagaaaaagtgccttcctttactctgatcccatctgcattctatctgtcacaaatctcttaaattatctggcacatggattatacctatgtctttgattcagagttttctctatatttatgttatttgatggctttaaaagggtctggtagtggaaagggagttaagggcttgtgctcacacatgcaagtcccacaatgagaaattattccataatagtttctaagaattattaagtactttctgtgttctaggcagtgttctatgtcctttccagaagtcctatgaaataggttatattattggcttcactttacaaataggaaactgagacatagagagggtaagtaacttgtctagtgccatacagctaatacatggtggtgtagggatttataactagacagtctgacttcagagtagtttttaaccagtacttgtacatctttaaacatatgtaagcatagatatatacatatatacatacacatatatgtatatataatatatatgcttaattccatcagtctctgtcacatcttttctgagctgggagttgtccttgcattttaagatgttgtcgaattttaagtttatttcttagaggcctcctgacttttcacacctccaagctcttgagggctgagggctgagggccactttgctctggccaccacatgctgggagcacttgctgaacttctctgcaccactcaacactgttggccattctttccttcctgaggctttcatggcaccatacccccaagtttcctcattaatctatggttgctctttctcaagatacttcactgacttatctcttagttctttgagtcttaggattctctagagttttgtatttttctcaacacttgcaacctagatagtttcatctactcttatggtctaaattattctaaattttaatatcacactgtttcttgcatccatctgatgagtttctaatcctggataactccaaatgtcctttctctccatgcgtctacctgagtagcttttctggtcacagacctcaattgggcccttaatgctgctccacaaggcaatcgtttctctgttcaccctgttctcctgctcgttacaaggaatatttcaaacctctctcctctcctcaaacctccagttctgcctccagttcagaagatttatgtaataaatgcaataagaatttgttaattacttgctatgtctcctcctatttcacagagagaactcaaaccattggctagaaacttcttcaaaatctggtctgatttttcatctgttggggaaatgtgttctgactgcccagctagactctaatagcaactgttgtgttatgcttctctgcctctctggactctagtttcagttgatattgttctgcatttctcaccaccttggcttatttcttgcagctgatgtagaaggccaatccttaagacaccgagacaagcggcttagtttgaatttggtaagttcaacattcaggttcttttaagcatcaattttaccaaaaacagcttgatctatrtatattcccttgaaatctttaagattcagcactctgagtctctgaggaatcttccagtctcccctgaagacttgaacttgcttgggaactacaggacttggtgttctataagggccttattggttctaatggttcagacacttgctcaacttggtatagctacttaaggcatcactttatgcttaaarcatttgcataaactcataaccctctgtcttccagtgtcagatcttggagacttatcgcctatactaaaacgataagtccagaggcagaacttgagctagaggcttgtctgactttgctgaggaagttcagagttatacttggataatttggaactgaaaccatatgtacagctttggccgccctctgatagcagtttccatgactggtctgtggttcccaatctgtatctattcttttgcagccatgcaggttctccccgatgtaccccacagcttcagccagtatcgaagacagctatgtgcccatgagcccccaggctggtgcctctggtcttggaccccactgcagccctgatgactacattccaatgaactcaggaagcatctcaagcccgttgcctgagctgcctgcaaacctggaacctcccccagtgaatagagatctcaagcctcagaggaaatgtaagcacttgaccaggcctgctgtacaggggtaggggagcaaggttccggtggttgcatagaaaaggtttctgtaaaggaagacctagagaaaccaccccagagggccggaaagtgtaaggtcaggaaagaagtggctgggwtggaataggaagggctggggcaccttgctgccccagattgtcatgataataggagtcaggagacttacaggcactgtggccttgcaaatacagctgacaaagccaagttcattccagagggctcgtctttggctgtttccctaacaaaggcccaggaataagtgatggtggattagaatggaatcccacctggcatctcctcattagacagcacttgaatgtaatcatagtgccagcctctgtaaggcagtcaggaatagcctttgacaccaattcctgaaggtcagacccagtcacatgcagtttatcactcatcgttctgtgcatgcccgtcagcagaggtattcagggatagaagaggattttggcaatgagcaggctgactcctctgtgcacggggtgccttgcagcttctgtcttactcccaggcagcttctctggtttgctaagcagcacagacagacagagagatagataggaaaagagggaaagaggaagagcaggtcagagtgactttttaacttcattcttgctcatcctccccttcccagttggctgtgtgattacaaggaagcattggtagaatgactgatctctcgtgcattccaacttctctttgccctttagaaagcaaaaaaagtcacttcaggtggctgtgcccaaagctgccaactaagacccctactcatgcctggtctactccaggcatattcccttaaatttcagtcaaaatacatttatacatttacaatgcatgcgctgcatatgtattgctgtggtgggcactgggtgggatacaaagatgagggagcaaggagggttcttcagtctgagggggaggaagatatgtaaaatccacctggaccatgaaatagaattatgaaatcagtgctaaataggagaacagaccctgtcttatgaggttcagaggaaatagccattaattctggtcagaaacaattaaacaacaacagaactttctgtgatgttggagatartggctattgaacccttgaaatttggctaatgtgactgaggaactacattttaaattgtatttaattttaataaatgtacatatatgtctaaatgggcacgtgtggctagttgtcacgacaatggacagtgcagctctgcaggaccttgtgataggcaacagaagatgtctgacagactcagggttggagatttaatgagtggatgcaaaggtggatacctgagccaggactaactcaagaagatgggccactgaggtggaataagggttggggcagataccaagtgcttttctaggtgctgagactactgcagtgaacaaaccagatacacccctattctcctggagcacagtttaggtccagataaatcatagatgagtgtattatcacaaactggggctgtgctgtgaagggtaagtacaagaacttgagagcccaggctgtggggcctgatcttgtctagaggcaaagagatgggatagaatgttctaggcagaaggatcatcaggtggacaatggattgtaggtggggaagactaggacctgggtgatcatctctgcctgtgataagaaaggtaacatttccacttcagacacatcgggtgtgaggtaatagatgttgcaattccacaaggtcagagactttcatctgctttattcatcctgtgccttcgacacctagaagcacgcgtgatatacagagacttcttaataatgccttgccacgttgttacctccagcaggtaatgtgaccatttgctcagtatttgtctttactcccagtgaggcagggaagaggaggacagtgaaattcaccctcatcatcagtgctgcctgttagtaaatgtggatttggtgtgctgggaaagtgaaatgtcatagttttacagtctttagactctggccttgacctcctggatgttgcacactgtcttgtagcacggccacctcctctggacctgagaaacctctcgatcatccgggaacatgcatctcttaccaggacccgcactgtgccttggtaagactgattgctcaaaagagcctcatccagcacagacaccccggtgtgtgttaggcctctgattaaatgtagttgaagcccatctgatctagcttaagccaaaggaggggtgaggtttattatcgagagcaagagctgttttatggatcacaaaggaaggaatatgtctgggtctcccaggatcctggaatcaggaactagtgtgctgttgggaacccaaggaatctactcacttctgcttcactcttcacatctgtgcattcctttgtctttgcagtattcttttctattgcacaatcctcatggtcaaagatagctgtaccataccccctgaacttgtttgcatgctacaactccagtaccaacagatgggctctttttcagtgccaattcagatttcctggggagagagaattgtgttccccagtctcagtggaactggctatggcccaagcccaactttgtgaatggggtaggacaagggagttcccaggttcacgggctgggtagacagacttcaaaatgtaattgcaccctttcatctcaccttttagaagttgcatttttagtcctgagcttggctcaggagtttctcggttcactctaaatgccacaaaacacaattgcattgtaaagcagaattctgcaatgagctgtatttccagccaagactgtgactcagctcatgcttctgactcaggagaaggatgggagttgattggcagtcttgtgtcctatcagaggaatggccatacttcctcacttttccttacattgaatagaaacaagaaggccccaaaggagtattttttttttttttttttttttttgctaaatgatatgatgccctcgtccgtttaraaagctcatgagctgtgtcacatagagggcctgagaaaaagcagcctttgtgaattgggagccatttgccccaaagtggagcagaaactgttgggcattttgtgcctcttcaggaattgctttggccggaaggaagttgtgtctggaagaggagggctgaaaccccatgagggccatgttagttcctggccagctttcagagcagctgtaagacattgctttgacctcatctatatttttattcttagcagtcgaaccagctttctctctccagaaagaaatggtattaattctgcaagattttttgctaatcctgtttccagagaagacgaagaaagctacatcgaaatggtaatcttatatttttcacactcttcttatccttcaccccaatctgtagtcttatgagctcattgtaaaggaaacacatccttcagtaagccctgtgcaattttaaaacaaccacttgatcgtaaaaccaggccacaagcttttctagacttggaacaaatcaatttgaagttggctttctttcctgcaacattcaactcctcataccattttgagattgcagtatttcaagatagctcagggctgaggcttgcttaatttgaaaatggaaatgccagcaattcttttcaccaaggctgtgatgtcctgtttgaccccaataggtttgtagttctctggatgtccagagttcaaattgtaaaaactcaacatattacatggtcccttccaccagaacacctggtggccctgtcctgactgcttctgaaccttcctggaggatgaatcacttagagtcccattgggaaaggtacagtgccctggactgtgagtgtatcttagcctctggaagattcctattatgggtctttctatagacctgagtggatggagacttgattaaccatttgcagttaaagagtcctgatgtttcccttctagcctgttgttccttctattctcttcatcttggatgctattgagaacatgggctttttgaagatggagaggaacttttagcacctctggcaattagcagacactttagccatgacagtgcctgttctgcaatttagaaatgtagggaactcaagagagagcttctgtttgaactacgaaattttgaaaagagatcttagaaggacaatgttcaaggctctgtgacaatatactcttgagaagacaattctgccttcctatatgcaaggataatcagcaactgaaaatctaaaaatagtaatctccagttaagctataattaaatgcttcattttaccttcttattttattcaaatcatgctgtaagtgcacttaaccgtatgcagatgcaaagtgactcatatacaaatctgttatggtcttcccaatatttctgacacttagtaatggcccttgggaaatttctagaagaaaacactcttataaaacgatgcttaacagctgtgctctgtctccagagaacagaaaaaggaagtgaatctaaaacccaatggaagcaagtacagagtcattccagataccaacagttcatttctgatctttgatgttgtgagaaagatcagtgttggctgggcgcggtggctcacgcctgtaatcccagcactttgggaggctgaggcgggcggatcacaaggtcaggagatcgagaccatcctggctaacacggtgaaaccccttctctactaaaaatacaaaatacaaaaaattagccaggcgtggtggcgggcgcctgtagtcccagctacttgggaggctgaggcaggagaatggcaggaacccgggaggcagagcttgcagtgagtcgagataacgccactgcactccagcctgggcgacagagccagactctgtctcaaaaaaaaaaaaacagagaaagatcagtgtttcattaacaacaaagctaagaatcgtttgtttacctaggtttataatcactgatcaatgactgtctctgtgtattagtaggcaacatgacacagcagattaagaacccagaacactggctgatagtagctatgatctgggaactgtcgtataaaaatgtttaaaggctatcccatcttgttcaattgtgtttttttaaactttagtaataagacagtttcacatgactttgatttacgttatttcacttgtgccacataacagcccaatatggtagtcaaacctagtatgatttgactttgattttgtgcataagtatatatgttaatttttttttttctctttaagggcaagttctgatctgaatgtagtgattaaggccaggggctgaaacacggttttgctttactgaaatacaagttttgccatatatccttctttaaatgtttgtgaaattatagaaaatttagaagaataaacataattttattatatgggatttcttctctatcactttttcaagccctttgatttcaacagctttgtaaggcttttatagtagagttctagcctcttaaatctcacattaattttttgattatggtattacaatacttttacatttttagatcatttttacatcatacagtgaaattgactttctcttggtgtgcagttctatgagtttgaacatatatagagatttgcgtaaccaccaccatgatcagagtacacaacggttccaaaatccctcatgctacctctttagagccacatcctcccttcacctgtaacccctagcaaccattgatctgttcttcatgactatagtattgtcctttcaagaatgccacaaaaatagaatcatacggtaccttttaaaactggcttctttcactcagaatggtttttttgaaattcatccattgttacatgtattaacagctctttccattttattgctgagcagtgttcaagcatatggatgtgtcatatcttgtttgtcccctcacccatggaagacatttggatttttttcaagtttttaggcaattagaactgttagatgctttcttttacagtttttgaaaaatatttttcttgtagtaaagctctactttctgtctctatgaacttacctgttctaggtacctcatataagtgaagtcatacaatatttgtccttttgtgtttgtcttctttcatttcatctagtgttttcaagattcatccatattgtaggatccaacagaatttcatttctttttaaggctgaccacattttgttcatccattcatctgctaatgggcatttagggttgttcctaccattgtctattatgaataatgctgctataaacattggcatacaagtgtatgcttgacttcctgctttcaatttgtttgtatatatatatgtagaagtggaatttctggatcatatggtaattctatgcttaactttttaaggaaccaccaaacttgttttccacagtgactgcaccattttacattactgccagtaacgcacaagggttccaatttctccacatcctcactaacaatttttatttatctttttttttggagacagagtctcgctctgttgcccaggctggagtgcagtggcgcaagctcggctcactgcaacctctgcctcccaggttcaagcaatcctcctgcctcagcctcctgagtagctggaattacaggcgtgtaccaccatgcccggctaatttttgcatttttagtagagatggggtttcaccatgttggcaaggctggtctcgaactcctgacctcatgtgatccgcctgccttggactcccaaagtgctgagattacaggcgtgagccatcacacccgacctatttatcattttttataatgggtatcctaacgggtgtgaattggtatctcattgtggttttcatttgcatttccctaatgattaatgaacatctttttatgtacttattggccatttatatatcttctttggagaactgtctattcaagtcctttgcatatttttaagttaggttgtttctttttttgttgttgagttataggaatttttaaaatatattctggatgttaaccccttatcagatacatgatttccaaatattttctctcattctgtgggttgtcttttcattctcttgatagtgtcctttgatgcgcagaagttttttattttgatgaagtcaaaattttctttccttttattgccttgcttttggcgtcatatccatgaaatcattgccaaatccaatgtcatgaagattctctcctatgttttcttctaaaagttttatagttttagctcttatgtttagatctttgatcttttttgagttaatttttgtatgtggtataaagttagagkccaacgtcattcttttgcttgtggacattcagttttcccagcaccatttgttggaaagtctagactatcctttccatgtcgaatggtcctggcgctctcattgaaaatctcgttgaaaatcaatatatgcaagggtttatttcttggtctatatgtctatccttatgccagtaccacaatgttttgattagtgtagctttgtagtaagctttgaaatcagaaagtatgagtcttccaactttgttcttcttttttatgattgatttgtcatttaagggtcacttaatattacacgtgaactttaaggacagggttttttatttctgcaaaaaaagaccattggaattctgatggggaatgctttgaatctgcaaaccgttttgcataatattatcatgttaacaatattaagtctttcaattcatgaacacagatatcttttcatttacttatgtctcctttactttctttcttacagttttcaatgtataagtctttgcctccttggttaaatttattcctaagtattttgttcttttttttcttttttatttatttattattattatactttaagttttagggtacatgtgcacaatgtgcaggttagttacatatgtatacatgtgccatgctggtgcgctgcacccactaactcatcatctagcattaggtatatctcccaatgctatccctcccccctccccccaccccacaacagtccccagagtgtgaagttccccttcctgtgtccatgtgttctcattgttcaattcccatctatgagtgagaacatgcggtgtttggttttttgtccttgcgatagtttactgagaatgatgatttccaatttcatccatgtccctacaaaggacatgaactcatcattttttatggctgcatagtgttccatggcgtatatgtgccacattttcttaatccagtctgtcattgttggacatttggcttggttccaagtctttgctattgtgaataatgctgcaataaacatacgtgtgcatgtgtctttatagcagcatgatttatagtcctttgggtatatacccagtaatgggatsrctgggtcaaatggtatttctagttctagatccctgaggaatcgccacactgacttccacaatggttgaactagtttacagtcccaccaacagtgtaaaagtgttcctatttctccacatcctctccagcacctattgtttcctgactttttaatgattgccattctaactggtgtgagatggtatctcattgtggttttgatttgcatttctctgatggccagtgatggtgagcattttttcatgtgttttttagctgcataaatatcttcttttgcgaagtgtctgttcatgtcctttgcccattttttgatggggttgtttgttttttccttgtaaatttgtttgagttctttgtagattctggatattagcccattgtcagatgagtaggttgcgaaagttttctcccattttgtaggttgcctgttcactctgatggtagtttcttttgctgtgcagaagctctttagtttaattagttccgatttgtcaattttggctttggttgccattgcttttggtgttttagacatgaagtccttgcccatgcctgtgtcctgaatggtaatgcctaggttttcttctagggcttttatggttttaggtctaacgcttaagtctttaatccatcttgaattaatttttgtataaggtgtaaggaagggatccagtttcagctttctacatatggctagccagttttcccagcaccatttattaaatagggaatcctttccccattgcttgtttttctcaggtttgtcaaagatcagatagttgtagatatgcggcgttgtttctgagggctctgttctgttccattgatctatatctctgttttggtaccagtaccatgctgttttggttactgtagctttgtagtacagtttgaagtcaggtagcgtgatgcctccagctttgttcttttggctcaggattgacttggcgatgcaggctcttttttggttccatatgaactttaaagtagttttttccaattctgtgaagaaagtcattggtagcttgatggggatggcattgaatctgtaaattaccttgggcagtatggccattttcacgatattgattcttcctacccatgagcatggaatgttcttccatttgtttgtatcctcttttatttccttgagcagtggtttgtagttctccctgaagaggtccttcataccccttgtaagttggattcctaggtattttattctctttgaagcagttgtgaatgggagttcactcatgatttggctctccgtttgtctgttgttggtgtataagaatgcttgtgatttttgcacattgattttgtatcctgagactttgctgaagttgcttatcagcttaaggagattttgggctgagacaatggggttttctagatatacaatcatgtcgtctgcaaacagggacaatttgacttcctcttttcctaattgaatagcctttatttccttctcctgcctaactgccctggcaagaacttccaacactatgttgaataggagtggtgagagagggcatccctgtcttgtaccagttttcaaagggaatgcttccagtttttgcccattcagtatgatattggctgtgggtttgtcatagatagctcttattattttgagatacgtcccatcaatacctaatttattgagagattttagcatgaagggctgttgaattttgtcaaaggccttttctgcatctattgagataatcatgtggtttttgtctttggttctgtttatatgctggattacatttactgatttgcgtatattgaaccagccttgcatcccagggatgaagcccacttgatcatggtggataagctttttgatgtgctgctggattcgttttgccagtattttattgaggatttttgcatcaatgttcatcaaggatattggtctaaaattctctttttttgttgtgtctctgcccggctttggtatcaggatgatgctggcctcataaaatgagttagggaggattccctctttttctattaattggaatagtttcagaaggaatggtaccagctcctccttgtacctctggtattactagatttttaaattttctaccttctgatggatgtatattggtatctcagtgtggctctaacatgtactttcctaatggtaaattatgttggacatattttggtgtgtttacttgccatccatatattttctttggtggagtatctgttcaatctttttgccaatttttaaatcaggttgtttgttttcttacattgagttttgagagttctttatatattctgtgtacaagtcctccaaaggggccagccatggtggctcacgcctgtagtcccagcactttgggaggctgaggtgggaggatcatctgagggcaggagttcgagaccagcctggccaacatggtgaaaccctgtctctactaaaaatacaaaaattagctgggcttggtagcacgtgcctgtagtcctagctactcgggaggcagaggcaggagaattgcttgaacccgggaggcagaggttgcagtgggccaagatcatgccactgcactccagcctgggtgacagagtaagactctgtctcaaaaaaaaaaaacaaaaacaaaacaaaaaaaacccaagtcctccaatggatatatagtttgcaaatattttctccgtatctggagcttgtctttccattctcttctgtcttttgcagagcaaacatttaaaaatttaattaagtccaatttattgattttgtttccttaatggattgttatgtctaagaactctgcctaaccttagttcattagaattttctcctttatttccttctaaaagaattatggttttacatttaggtctatgatccattttaagtttatttttgtatgagatgtgaggtgaagtcgaagctgacattttgcatatggatgtccaaatgtttcagtannnnnnnnnnnnnnnnnnnnatcagttggacatatttgtgtagattttctattctgttccattgtctctttgcctatgccatacagtcttgattattgtagctttggagtaaattttaaaatcaggaagtttattttctctaacatcattcttgtttttaaaacttgtttttgttattctacttcctttgcctttccatgtataattagagtcagatgttctttatctacaaaaatatcctgctaagacttttttttttttttttttttttttgagacagagtctcgctctgtcacccaggctggagtgcagtggcgccatctcggctcactgcaagctccgccccccaggttcatgctgttctcctgcctcagcttcctgagtagctgggactacaggcgcccgccaccacacctggctaaatttttgtatcttttttagtagagacggggtttcaccgtgttagccaggatggtcttgatctcctgaccttgtgatccgcccgcctcagcctcccaaagtgctgggattacaggcgtgagccaccacgcctggcctaacacttttttttttagttggaattgcattaaatctatacatacatttgagaattgagtctttactattctgaatcttccaattactgagcacagtatatctttccatttactcagattggtttttgttttttttgttttgtttttttcttttttttgagatagagtcttgctctgtcacccaggttggagtgcagtggcacaatctcgactcactgcaacctccccttctcgggttcaagtgattgtcatgtcttagccacccaagtagctgggattacaggcacacgccaccatgcctggcttacttttttgtatttttagtagagacagggattcaccatgttggccaggctggtctcgaacccccgacctcaagtgatccgtctgcctcagcctcccaaagtgctgggaatacaggcatgagccatcgcgcctggctcatttattcagattttctttgatnnnnnnnnnnnnnnnnnnnnagcctcccaagtagctgagactacaggcatgcaccatcatgcccagcaaatttttgggttttgtgtagatacacggtctcaatatgttgcccaagctgatcttgagctcctaggttcaagcaatccttctgccctggcctcccaaagtgctaggattacaggcatgaagccaccgtggctggcccaatgtggggattttgctgactttttttttttttttttgagacagagtcttgctgtgtcacccaggctggagtgcaatggctcaatcttggctcactgcaacctccacctcccaggttcaagtgattctcctgcctcagcctccctattagctgggattacaggcacgcaccaccacgcctggctaatttttgtatttttagtagagacagggtttcaccatgttggccaggttggtctcaaactcctgacctcaggtgatctgcctgcctcagcctcccaacagtgctgggattacaggcttgagccactcgtgcccggctcagatacttccgattttttttttttttgccatttagatgagtaggtagtggtggttttagatgctcgatgtgtgtcctattagatttatatctaagtatttcatttttggaactattataaatagtattttttaaatttcagcttccaatgacccattggtggtatatagaaatatgattggctgagttcagtggctcgcacctgtaatcccaggactttgtggaggctgatgtgggagaatggcttgagcccaagagttcaagaccagcctgggcaacaaagtgagaccctgtctctacaaaaatgttattaaaaattaaccatgcatagtagctgtgcctatagtcccagctaatcaggaggctgagacaggaagatcccttgagcccaagagtttgagattgctgaattaacttattaattataggaggtttttattttcctcagatttcttgggatttttttttttttttggtagagacagggtcttactatgttgcccaggctggtcttgaacttctgagctcaagccatcctcccacctcagcctcctaaaatgctgggattataggcatgagccactgtaccaggctttaagccagtcttgtattctctagataaaccccatttggtcatggtgtattatttccttgtatatattgctgcatttcatctgctaatattttgttgaggattttcatgtctgtgttcctaatgggtgttgatctttaggtttttgtagtgtctttgtgtggttttggtattaaggtcatgccgggctcctcaggaagtgttctctcctcttctagtttctggaacagatcgtgtagaattagttttgtttattctttaaatttttggtataattcaccagtgaaaccctctgggtgaattcaatttctttaatacaggatcattatctatttgatctcgggtgaattatggttatttcctaggagttttctagttttaccttcacatttggattataccaccttgaattaacttgtgtgtgctgtgagataggggtcaagactcatttttccccatatgtttatctaattggttggcaccatttatgtaaaatgactatcatttactgacaattcggcagtgccatctttgccataaatcaaatatccatatatgtacgggttttttatggactcttaattctattctgttggtttccctgtctatctttgaacaatacaaactcccttagttgctgtagctttataagactcaatatcaaggaaagtaagtcctgctttgtttaccttcctctaggttttttttgttttttttctttgacttttctactcccataaaaattttagaaacaattttttaatttctaccaaaaaaggaaaaaaatattgttctcagcaggaagggtgatcaaaattactttattcaacattactggaggtgaaactacatttattctatttttaaaatttgatggaacactttggtaggcaagatagcatgaaaaacacctcttattataaatatgatacatttttaagtctaaaactcagctgacaagaagggaagggaaaagaaatctctggggccaaaaatattgagaaacagcaaccccccaaattaataagaattacaaacaatagaatcaaatatggaagtaggcagtttttggaaacactggattttgaatataaaataagtagttttactatatttaaagaaataaatgagaaattgaaagttggattaagtaatgagatactattaaaaatggccaagtagattgtaaaagaccatttacaacttgtagaaataaaaaccaagaatgaaattagaaactcaatggatgagataaacagactaagcacaaagagtgatttagtgagctggaagataatttatgaataagttactaataaatcagaacgaggagttaaaaacatggagaatatgaaagaaatttgggacatggaagatagaataagaaggtcaaatatttgtatagtcagagttgctgaagaagattatagaaccataggagagaggcaatatgtcaagggataatgctagagttgctcacagttcatgaaaggtaccattcctccacaagcccaaagacttacaagcaggttagtataataaaatgttagtggagtatacatggtgggtatattttctttaatttggctgattgctggaaaaattttataataataagtttagaaaaaccctacaaaagtgaaagaataaaggcaaaagcagaaactaacaaaataacaaaatcagagaggatcaatacagctgtaattggctctttaaaaagactaaaatttaacaaaactaatacaaaagatatgaatacaaataagtaatattaagaatgaagaacagataataattacaaatacatgagagattaactacctaagagaattttgtgaacaactctgtaccaataaatttgaaaacttttgtgataggcaaattctctggattaaaaaaaaatcagaaattgactcaagtagaattagaaaacctgaatgtttatgtacctattaaagacactgaatcagtaggaaaatttgtactacaaaggatcataaggcccaaaaaactttacagatagtttcgaccaaaaagaagagataagtgcaatcttatataaacacctaccaggaatgggagaagagaatattacccaccttactttatgaggctaaaataatttgataaaacaaatagcaattacataagtagaaagctgtaggccaatgttactggtggatgcggattttaaaatcccaaagaagaatatgtctaaccaaatactcgtacacaaatgttcatagaagcattttttcataatagccagaaagggaaaacaactcaaatgatcatcgactgatgaatgtgtgaataaaatgtagtataatatataataaaatgtagtataatattccattgtattatgcagccacaaaaagaaataaagtgctgacacatgaacctcaaatggaagattgaccgcaagcttccaatttctctccatccccaaacaccctctaaaataacagtaaagaaatctgttaaaggcataaacccacaaagatatgaagaattggagaagaaaatagcagtaacatattggaaactagaatgcaggtagatatgtagtaaatgacttacaagacccctcccccccacaaaaaaattaaatcttaaatgtggtggaaggaaggcaagaagcaacttgacttatactgcagactacccaaagagttcaggaattgtccacagtaggtagttctgaagtagggttgaagggaaagtaaaagaagcagtaatggtcaaaggcatcaggtaaattccaagatcccttccctcactccatggaggtgaaacactgtgactttccatcccccatctcatagaaaagttgaagttcagtctctctggagagagtaaaacaaaaggtctctgcactgggggatactagacatatttgaccacgaatactatactaacgacaaggtgattaagtaaataggcataatggatatgagaaccattctcaagcccttttccagaatgttgacaaccagaccattacaattgagtttggagattagaaaatatttctctgggctatttgagcagcccaagtggcaaaacgtagttcctaatattgggggttactcaagataaccacccaatgggatcaccctgcagaaaactccagagctgacaaacaccatccatgtacacaaagctccacgttagctttttggtctttcgctcgtaagtataagcaacagtcagtgatttcatgtgacatttcaggagaactctagcatgaaagattgaaatcaaaacagattggaggaaataagaactatgccagaaggaaaagtctttttatttatttattattttatttttttgtgaggcggagtctcactctttcacccaggctggagtgcagtggtgcaatctcagctcactgcaacctctgcctcccgggttcaagcaattctcctgcctcagcctccgaagtagctgggactacaggcatgcgccaccatgcctggcagatttttgtatttttagtagagacagagtttcaccatgttggccaggctggtcttgaactcctgaccccaagtgatccgctcgcctcggcctcccaaagtgctgggattaaaggtgtgagccactgcgcccagctaggaaaagcctttttaaaactctattattaccaatattctcagagagatgagctattacaaccataaaccaggaatatctattaagtcaaccaagcacattaacagattaaaggagaaaaatgatatattatcttactagatgcagaaaaagcatttgatagaactcaacatctattcatgaaaaaatctattagtaaacaaggaatagaggaattttctctaacctcataacaaatgaaaaatgaatcttatagaacctgtagtagatatcatactcagtggttaaaagctaaaaacatctcctaaagaaacaaaatgaataagaattggaaaggaaggaagaagacaaagagtgattattcttagatgaagcgataactcaaaataatctgcttatatgaatgataactcgaaataatctacttagaaataattagaattactaagttagtaaaataaataattacaattaataaaagatatcaagattgatggatataaaatcaatatacacaatccagttcactgtctagataatggtaacaaacagaaaaaagaatttaaacaaaacttaccatttacagtaacaacaaactctaggcatttagcgataaacctaacaaaaaatattgtggagaaaattattaaaacttattgaaagacattaaggagaatgaaataagtggaaaagtagaccatgttcctgaataggaagactcaaatattaaagacattatctaaccaattccctaacagagatttttgaggaactttgaagctgattctaaaagggtcaagatcacgcaagacattctgggggaaaccaggttatccatgttgagtaaaaacaacaacaaaaatggaatgaattttatttctattgcaccaccatatacaatattaaaatccattcaagtgagattattgcttaaacgtgaagcaaattattgcaaaacattataatttcaggaaaaatatagagaaataaattatgacctcagcatagggaaggattccttaaacataatgtaagccatacaggaaaagatcgacattacattaaaagtatttcttagtcaaaagaaataccataaaaagaaatgaaaagacaagaagctagactgtgatgagctatctgcaacatacatgatagcaaatgattactctccagggcagaggaaaaagtactaagggtaagtaagaaaaatatacaaataattcaatacaaaaattaaccagaaacaaggcaaaaaaaaaacccaaaaaacaaaacaaacccaaacaggcaattcacagaggagaaataaacaaatgacctttcaacatatgaacaggtgctcatactaattaataatcaggggaatggaaaatcaaaccacagtaagataccattttacctgtctcaggtaggaaaaatgttaaaaactctgacaataccaagtgttggccaggatgggaagcaatagaaattcttatacactcctggtacacgtgtagattggttcactctggaaaatagtttggtgatatttagtaaagttgaagatactcatatcctataacccagtgattctattcccaagtaaatgccctagaatttctcccacaggtgcatgaatgcccatggcagcattgcttacaatagcccccaaactgggagcaactcaaatatcctttgatggcagaatgattaaataagtcatgcaatggaatatctgacccactgcaaatgagtgaaatagggctaatgcttcgacacaagtgaatgtggagtacctaatattgaacacaaaactgaagccgcccaaaatgcatacaatgtgattctgttgatatgacattcaaaaacaggcaaaatgaaatagtctgttatttaaggatacttgcatactcataaaactatatttaaaagtaaaaggagtggtaagcacaaaattcaagatagtgctttacctcttgggaggagaaggaaagatggtacaggggaaacagcttcaaagatatggattggtagcattgcacttctgaagctgggccctgattttcatctgtgttataactgtttgtattgtgcaaactatatttaagtgcatttgggatgccttcacgagaactttaataagtatagttgatcttgtyagggtttaatctctgaagtatcacaggcctgtcagattcgtgaagcaaattcctttttgagtgaattttggcaaactgttcccatggtgaataatggtatggtttcattgcgaaggccaaattggctatattctgtttgaaattacagttctcactcagatatgcaggctgattgactcaggtctcatcagactattctgttacgatctgatggcagctgcttgggtgaagccacaacttgccctccttcccttgagcaaccaagatagacatcattaacctgactcctgtgatgttggttcctaggaggagcaccgaacagccagttccctgagcagtggtgcccttacgtggacaaagaaattcagcctagattatttggccctggacttcaattcagcatcaccagcccccatgcagcaggtaggaagggctttgtgtctaagaattcccaggtgattccatctctgcctagacttttctgattatcaaaccatgcatattctccttagaaagtgttaaaaatgcagacatgtataatgaagaatattaaaatcggccctcatcctgcctcccagagagaatgaaatcttggtgtatttccttctagggtgtgttctttgtgtgtgtatgtataaatagatgtgatattcacacttcaaaatttggaccaaaaagtttatagaaaaatatctcaggcagaaatgagggtcgggtagaggaccctccaggtgtaggaacatcctgtttagggaacaagtaatagtctagtttggttagacttgagggagcagtggaaagaactgtaagttggaagtaaggggccttgaatgctgagttgggcagctacccctttgggtagaattctcatctgaaaaatgggaatcagaaatgacaacacttatgtcaagggctgttgtgaggattaattgagttaatacatgtaagttatcatatctgtgaactagtatcacccactgtacagcgtaaggaatgagtgcatgggaaacaactgaggactttcctcctcttttgctgaggtaactcctacttgttttctacttttaatatcgttccaaaaayctgatatgagactggagaaaagctggtaagaagggtgggagcaataagtataaaaggagcattagtcagttttggtagacaaacaacccccaaatctcatctgctttcaacacaaaggctcttttattgcaggccagagcctttgtgttccaggtcatctccagtccagggccgaggcaagagaagcagcccccatctgaagtgtgctggcctcctggcagaggaaaaagagagattgcagaatcacagaatacctctttctccttaggattggaacatgtcacttcctttttgttattattgttttgttttcttgagtcaagatctcactctgtcactcaggctggagtgcagtggcatggtcatagctcactgcagcctcgatctcctgggctaaagttatcctcccatctcagcctcccaagtagctggtactacagttgcacatcatcacccacggctgttttttattttttaataaaaaatgatcttgatctcctgggctcaagtgatcctcctgccttggcctctgtattagtccattctcacactgctatgaagaaatacctgagactgggtaatttataaaggaaagaggtttaattgactcacaattcagcgtggctggggaagcctcaagaaacttacaatcatggtggaaggggaaggaaacacatcctttttcacatggyggcaggaaagagaagtgcagaatgaaatggggaaagccccttataaaactatcagatctcttgagaacttactatcatgagaacagcatgagggtaactatccccttgattcaattacctcccaccaggtccttcccagggcacatggggattatgggaactacaattcaagatgagatttgagtgggggcacagccaaaccacatcccagcctctcaaagtgctgggattacaggcacgtgccgccatgccaggccatgtcacttccacttacattatattgatcaaagcaagtcaagtggctagagcaaagttgagggaagcagaagcacgtgcgtgcacacacacaagcacacatacaaagtacaaagtttccacacagaggaaagggcaacaaatatttaacaatttaatacaaaagggtaaacattttcctgacattttaagttagatgtaatgaaaacctttttgttctcctccttcagaaacttctcctttcagaagaacaaagagtagactatgtccaagtggatgagcagaagacacaggctctccagagcacaaaacaggagtggacggatgaaaggcaatccaaagtatgagaggtgcgggcttgtgccatgtgtgaaacagggaagcttggggctcagtttgagttttttcttttttttttttttttgtccactaaaaacacactgatggtcaacacaggtcaaaaccaagagagaatgtgtagttttcaaggtcttggccagaacctttaggaaagaagacctgtttatacattgaaggaagaaaagaaggaagcagttgccttccggagggggctctgagagaatctagcctcccctctgtcctattggagcaaagattggagtgagtgttgccaccaacaggattttatcgtttgactccaatacctgaaattctgacttctctcctgtgcttcaatgagaatgataaattatcctagcaaaggggcctctggagaccatcttgttccagcctctgaagacagttgaggagatcaagcccagcaatggtggcagaatcttactccacagacttcagcagactagtcatttcaatacccaaagaaagacaagtgacaggggcaatggatctcaggctctgagataagtatatcagatgacactggtggctctaaggatattgcaattaagcagctacctgtagccaggtattctgctgctcttggccttttcccacgcatcgtctcgtgtcttctccgaaagaccttggaagataggcctggaagagactgttgatgccactttgaagaaaagaacactgagaactagaggagggaacactttgcccaagattactcacaaagccaagacccagagtccagcttagagaatagagttgttcaggctgccaattgcaagctcattcctctacctcatacttcctctgaggattttgacaaaatggattaattgggtgagccttggagacatgtgggaaacacctgcagacacaaaatgagtagtcatcctgtctccctttcaatagggatctgaacaggtgttttgatacttgaaagatgtgcatgtcaagtgagggtttctttctgcgatgttcaactggaactctcccatcagtagttacaattagaaatacctactgatggttagtctgaaggccattctcatggtcacctatacagtgtgtttccctgtgagctagcagacacaatgaccaggaaaaaacctatgaattccattcttaggtttcccagccaattgctcccttctgctttagaagtgactaggtactgagagtacaaacactcccactttataatgaaggcgtcatgtcaccccttcctttacaggtcctggggtccaggagacccagaatgaaggtgtcagttgggcatgaagtgttatttagtgtccattcttgatccttctgagcacctacagctggaaactaagcagatactggtcctgcattctgactgagattgtgtcttctttatgaggatagatcaaattggcagtcaggcccatgatagtcagtgcagttggggcagttgtagactttgctacaggatttcagggtttccaatcaccccacaggtaagtgaatgccaaagtcttcttttttcagaccatacaagaagtcattttgattttcaaagaagccgttttgattttcaaagaagcaggttctggtgacattattttcttccttggacaaagtggggggaaatttctaagtattttaactgagttcagggtccttagtgagcctggacagagcaaggagagggctccccactccctaagccccacagccagctctgcatcaccacacacagccagagcctgtgaggagctgccttcttccccatgtgacttgcaaagagtctcaggcaagaaaccagggcttcaaactgctagttcccatggagggtagttccctcgtgtggagcacttgtgttaggatcactgattatctgacaaaggctggtgcagaaaaaaaattgtaggcccaagtgtcaagaaccacaccagattggagatagaaaagaatagctgaaattatgtcagtrgtgaaatgtcactccattgacccaccgaaaaaagaaaagaaatctgtttctaccaaacatttccagaaacgtatttatagcatgaagaaacacacatgggtagtgtgacctgtttggatgtgattacttaaaaatggaatgctctgaataggcactctctacattaaaggtatggaaggcgataggggtcagaattttaaaaatttaattttgaaaaaggtgactcacccctcatttccagagtgtaggcaattatgtcctgctttgataaaactgctagaggatggctatgcaaaagcataacgattcaaggaaacaaagtacaggtagtttttgasctgacagcagcaaaggcaccataagtcaaaatattggttttggtggagatgatcgatgtgtgtgtgtgagagagagctatgtttctaaccaagggcctaatgtttgttacagaaatgatcccagagacctacaagatgtgggaatcagcataacagggcaatgcagcaattaaccccacatcgttttctgtagttcctttttgtttcattttcttctgtctcacctcgttagaaaattcctcccagtcaggggtcgtccagtgcaggacgggggacccaagggtctcaagcctgcaagtccagaaggtgacaaacccaggagcactgggagttaagctttccttggggagggaagagccttgatgtccagcacacagcctggctataaagacacgaagcgacctacccactgtacagtccacttcacaggatcagctgaatcatgacctttaaaagttccgagttgaaactgaaggctctcctcagacctggctttttcctcagtccctgttcataccatctctgcacccacaatcacactgatttttcaaattcattttgtttttgctgtttcatttctggcattaataaaagtcttataaggagaaatcgtgacttaagttcttttttatttaactgatgacatccaatataaataaggaacatgttttgaaagcggaatatttgaaaatggacttcataaccacttttacgttgaagtrcaacaaacttaacctgaytcacgtgcatgttatttcactgcaaacatttgagcaggtgtctgtaatcagtactgcttcggctcagccaaaccatatcttgtcattttcttaatttcttcgttggaaactcgctttgataattgacactaaaatcaactgctctccctgacaccatgtataacatgaccttcgtgattacttgcatgagawggtaactgccctacgcctgcctgccccagcaggcatctcttttgccaccacctcccttttctccatagctgagtctcccagatgccctgggtgctgggtcagtggcatctcgaggccgtgaaacaaggaaaggacaaagaaagtagggagggggcgggctcaggtttgggggaaacaggccaaaggcatagagagaacaggcctgggggatcctgggacctagagaaaggacaaaaagccacattaaatccctcacccctggtgaagtatgaggccaatcaagaacactttttccctacacacacactctagaccaaatctctgacccacaaaacagcaggttggcccataaggccaactgagagactccttaaccgggtccccaccagccacatcaggatgcctttctcatcacccatggaatacacagaataaaatgggatggaggacatttattaatgataaagggttcaattcatgaagaagacacaataaatatgtgtgcactgaatataacagagcttcaaaatacatgaagttaaactcatagaaaaaaaggaatacataaacccacagaggtgaatattttcacactccttttttagtaactgatagaacaatattttagaaaatcagatatagaaaagcaaactagactgtgcacagtagctcatgcctgtaatcccagtgctttgggaggctgaggtggaagaattgcttcaggccaggagtttgagaccagcctgggaaacatagtgagaccctgtctctacaaaaataaaaatacaacaaattagcctggcatggtggcacacacctgtaatcctagctacttgggaggatgaggcaggaggataacttgagcccaggagtttgagaatgcagtgagctatgatcatgccactgcactctagcctgggtattagaataagcccctgtctttaaaaaaatgaaaagaaaacaagaaataagaataaattatagtctaaatataggaatgatctcagccatgtagaagaataggagttctccagctttactctcccaaacagaaatccaaccagtaactatcaaaaggcaagaccaccattgtgagcaccacagaactcagaagtgaatgtgagacacccctttgaactacagaatctagaaagcccacaatcagatggtaagaggaacaattctttctaaccttgctgcccttcctccaggctggcacagtaccgcacacagaatttttctgagctcatagtttctactgtgggagcagtgagttggaggctgacatttgtcttccccaccattctgaacccctttcaggaggctcagtcttgtcacatacttcagggaacattgggagtgccagcagggctggacacctggggtaagttggagatggaggattggggtggagcttacagtgacaagggaacagattttggtggttactctgcattctagccaatggaggcaccatgctggagaaactagccaacggcatcacactttaggaaatataatacagattccaaacaatagtaccacatggcctgggaagacaactgcaaccctgcctaatcagagttgattgcagagcccagccagcagccccacctgacagtggactccagccagtggtctcattggaccatggtgcagaggcagcactaccattcaacctcagagcgcaggaagcaactcaagaacatgacaccaaagactgcttgtatatggttgcaaccagctggctcattcagaatctcaggttagactaaatagtaaaggtctattatcaccaaagaatacctgcaaagaatgaaagacgtggctaggtcctcaaatgcacaggcatcaatgtaaaaacacaaagattatgaaaaaatctgaaaaatacaacacacgagaagaaactaataaagcttcagtaatggacccattagagaaggagatctatgaaataactgacaaataattcagaataaccctcttaaagaagttcagagaactataaaaatacaaatagataatcaaataaaataaaaaacaattcatgaacaaaatgagaaatttgacaaagaaatggaaacaatcatcaacaacaacaacaacaaatcaaatagaaatcctaaagatgaagaatacaatcacttgtggagcttggtggctcacgtctgtaatcccagcactttgagatgccaaaacaggtggatcaattgagctcaacagtttgaaatcagcctgagctacatggtgaaaccctgtctctacaaaaattgcaaaaaataggctggtgtggtgtctcaagactgtggtcccagctacttgggaggctgaggtgggagaattgcttgagcctaggaggttgcagtgaccaagattccactactgcactgcagcctggttgatagagagatactctgtctcaaaaaaaattgtagaatacaacaattgaaccctaaaacatcaatagaatgcctcaacatcagaatagaccaagaagaagaagatgagaagaagaagaagaaagaagaagaagcagaggaagaagaagaagaagaagaagaagaagaagaagaagaaggggaggaagaagaagaagaagaagaagaagaagaagaagaagaagaagaagaagaagaagaagaagaagaagaagaagaagaagaggaagaaagaagaagaagggagctcaatgacaggacatttgaaattatccaatcaaaggagcaaaaaaaaggatcataaaaaggaatgaaaaaagcttaagggatttatgagatagcatcaaaagggcaagtgtttgggtcatcagagttcaagcaggactgagaaaaacaactaggtagaaagcttatttaaagaaataatagcagaaaatttccaaaacgggagaaaaatataaatattcaggtactggaaggtcaaaggacaccactcagattgaatcaaataagactaccccatgacatattagaattaaattgccaaataacaaaaacaaaaagagaattctgaaagcaacaagaggaaggaagcaaataacacataagggagttccaatatgtctggtaactgacttttcagtagaaaccttatgggccaagagggagtgagatagtatattcaaagtgctgaaggaagaaaagaactacctactaagaacactatacccagaaaatcaagacaatagagactttctcagaaaaacaaaagcagagacgattcataatcaatagacctatcttataggaaatgctaacgggagttcttcaagctgaaagaaaaggatgctaatgaatataacatctgaacttataaaactcactgataaaagtgagtacacagttcaatttacaatattacagtaatgatggtgtatactttgcttacatctttagcatgaaggttaaaagacaaaactattaagaataatgacaatggggctccattccaagatggcctaacaggaagagctccggtctgcagctcccagtgtgatcgatgcagaagaagggtgatttcagaatttccaactgaggcacctcattcatctcattgggactggttggacagtgggtgcagtccacggagggtgagccaaagcagggcagggcatcaccttacccgggaagtgcaatgggccaggggatttccctttcccagacaagggaagccatgacagactggacctggaaaaacgggacactactgcccaaatactgcactttccccatggtcttagcaaccagcagaccaggagattctctcccatgcctggcttggtgggtcccatgcccacagagccttgctcactgctagcgcagcagtctgagatcaacctgcgaggcagcaacctggtggggggaggggcatccgccattgctgaggcttgagtaggtaaacaaagcggccaggaagttcgaactgggcggagcccaccacagctcagcaagtcctactgcctctgtagactccacctctgtgggcagggcatagctgaacaaaaggcagcagaaacttctgcagacttaaaacgtccctgtctgacagctctgaagagagcagtggttctcccarcacagcatttgagctctgagaactgacagactacctcctcaagtgggtccctgaaccctgtgtagcctaactgggagacacctcccagtagggactgacagacacctcatacagatgggtgcccctctgagacaaagcttccagaggaaggaccaggcagcaatatttgctgttctgcagcctccgctggtgatacccaggcaaacagggtatggagtggacctccagcaaactccaatagaccagcagctgagggacttgactgttagaaggaaaactaacaaacagaaaggaattggatcaacatcaacaaaaagaacatctacaccaaaaccccatctgtaggtcaccaacatcaaagaccaaaggcaaataaaaccacaaagatggggagaaaccagagcagaaaagctaaaaattctaaaaacgagagtgcctcttctcctccaaaggattgcagctcctcgccagcaatggaacaaagctggatggagaatgactttgacgagttgacagaagtaggcttcagaaggtcagtaataacaaacttctctgagctaaaggagcatattctaacccattgcaaggaagctaaaaaccttgaaagaaaggttagatgaatgactaactagaataaacagtgtagagaagaccttaaatgacctgatggagctgaaaaccatggcacgagaacttcgtgatgcatgcacaagtttcaatagatgattccatcaagtggaagaaaggatatcagtgattgaagatcaaattaatgaaataaagcaagaagacaagtttagagaaaaaagagtaaaaagaaaagaacaaaacctccaagaaataatatgggactatgtgaaaagaccaagtctaggcttgattggtgtaccagaaagtgacggggagaatggaaccaagttggaaaacactcttcaggatattatccaggagaatgtcccccccaacctagcaaggcaggccaacattcaaattcaggaaatacagagaacaccacaaagatactcttcgagaaaagcaagcccaagacacaaattgtcagattcaccaaggttgaaatgaaggaaaaaatgttaagggcagccagagagaaaggtcaggttacccacaaaaggaagctcatcagactaacagcagatctctcagcagaaaccttacaagccagaagagagggggccaatattcaacattcttaaagaaaagaattttcaacccagaatatcatatccagccaaactaagcttcataagtggagaaataaaatcctttacagacaagcaaaaaacatgccaaattgtaaagaccatagatgctatgaagaaactgaatcaattaacgggcaaaataaccagctaacatcataataacaggatcaaattcacacataacaatattaaccttaaatgtaaatgggctaaatgacccaattaaaagacacagactggcacattggataaagagtcaagacccatcagtgtgctgtattcaggaacccatctcacgtgcagagacacacatagacacaaaataaagggatggaggaaattctaccaagcaaatggaaagcaaaaaaaagcaggggttgcaatcctagtctctgataaaacatactttaaaccaacaaagatcaaaagagacaaagaaggccattagataatggtaaagagatcaatttaacaaaaagagctaactatcctaaatatatatgcacccaatacaggaacacccagattcatgaaacaagtccttagagacctacaaagagacttagactcccacacaataataatgggagactttaacaccccactgtcaatattagacagataagaaagaaggttaacaaggatatccaggacttgaactcagctttgcacaaagaggacctaatacacatctacataactctccactccaaatcaacagaatatacattcttctcagcaccacatcgcacttattctaaaattgaccacataattggaagtaaagcactcctcagcaaatgtaaaagaacagaaatcataacaaactgtctctcagaccacagtgcaatcaaactagaactcaggattgagaaactcattaaaaatcacaaaactamatggaaactgaacaaactgcttctgaatgactactgggtaaataacaaaatgaaggcagaaataaagatgttctttgaaaccaatgagaagaaagacacaatgtaccagaatctctgggacacatttaaaacagtgtgtagagggaaatttatagcactaaatacccccaggggaaagcaggaaagatctcaaatcaacaccctaacatcaaaattaaaagaactagagaagcaagagaaaacacattcaaaagctagcagaaggcaataaataactaagatcagagcagaagtgaaggagatagagacgcaaaaaacccttcaaaaaatcaatgaatccaggagctggatttttgaaaagatcaacaaaattgatagacttctagcaagacgaataaagaagaaaagggaaaagaatcaaatagaccaggcgtggtggctcaggcctgtaatctcagcactttgggaggctgagacgggcagatcacgagatcaggagatcgagaccatcctggctaacacggtgaaaccctgtctctactaaaaatacaaaaaaaaaaaaatagccgggtgtggtagcaggcacctgtagtcacagcaactcaggaggctgaggcaggagaatggcgtgaatccaggaggcggagcttgcagtgagccgagattgcgccactgcactccagcctgagcgacagagtgagactctgtctcaaaaagaaaagaaaagaaaagaatcaaatagacacgataaaaaatgataaaggggatatcaccaccaatcccacagaaatacaaactaccatcacaggatactataaacacctctatgcaaatagactagaaaatcatggacacacacaccctcccaagactaaaccaggaagaagttgaatatctaaatagaccaataacaggctctgaaaatgaggcaataattaatagcctaccaaccaaaaagagtccaggaccagatggattcacagccaaattctaccagaggtacaaaaaggagctagtaccattccttctgaaactattccaatcaatagaaaaagagggaatcctccctaactcattttatgaggccagcatcatcctgataccaaagcctggcagagacacaacaaaaaaagagaattttagaccaatatccctgatgaacatcgatgtgaaaatcctcaataaaatactggcaaaccgaatccagcagcacatccaaaagcttatccaccatgatcaagttggcttcatccctgggatgcaaggctggttcaacatacacaaatcaataaacgtaatccatcacataaacagaaccaatgacaaaaaccaatgattatttcaatagatgaagaaaaggccttcaacaaaattcaacagctcttcatgataaaaactctcaataaactaggtattgatggaacatatctcaaaataataagagctatttatgacaaacccacagccaatatcatactgaatgggcaaaaactggaagcattccctttgaaaactggcacatgacaaggatgccctctcttaccactcctattaaacatagtgttggaagttctggccagggcagtcaggcaagagaaagaaatagagggtattcaattaggaaaagagtaagtcaaattgtccctttttgcagatgacatgattgtatatttagaaaaccccatcatctcattccaaaatctccttaagctgataagcaactacagcaaagtctcaggatacaaaatcaatgtgcaaaaatcacaagcattcctatacatcaatagcaaacaaaaggagaaccaaatcatgagtgaacccccattcacaattgctacaaagagaataaaatacctaggaatacaacttacaagggatgtgaaggacctcttcaagaactacaaaccactgctcaacaaaataaaagaggacacaaacaaatggaagaatgttccatggttatggataggaagaatcaatatcgtgaaaatggccatactgcccaaggtaatttatagattcaatgccatccccatcaagctaccaatgactttcttcacagaattggaaaaaactactttaaagttcacatggaaccaaaaaagagcctgcattgccaagacaatcataagcaaaaagaacaaagctggaggcatcatgctacctgacttcaaactatactacaaggctacagtaaccaaaacagcatggtactggtaccaaaacagagatatagaccaatggaacagaacagagccctcagaaataatgccacacatctacaaccatctgatctttgacaaacctgacaaaaagaagaaatggggaaaggattccctatttaataaatggtgctgggaaaactggctagccatatgtagaaagctgaaattggatcccttccttacaccttatacaaaaattaactcaagatggattaaagacttaaatgttagacctaaaaccaaaaaatctctagaagaaatcctaggcagtaccactcaggacataggcatgggcaaggacttcatgactaaaacaccaaaagcaatagcaaccaaagccaaaattgacaaatgggatctaattaaactaaagagcttctgcacagcaaaagaaacaaccatcagtgtgaacaggcaacctacagaatgggagaaaatgtttgcaatctacccatctgacaaagggctaatatccaaaatctacaaagaacttaaacaaatttacaacaaacaaccccatcaaaaagtaagcaaaggatatgaacagacatatctgaaaagaagacatctatgcagccaacagacacatgaaaaaatgctcatcatcactggtcatcagagaaatgcaaatcaaaaccacaatgagatactatctcatgtcagttagaatggcgatcattacagtgtcaggaaacaacagatgctggagaggatgtggagaaataggaactcttttacactgttggtgggagtgtaaattagttcaactattgtggaagacactgtggcgattcctcaaggatctagaactagaaataccatttgacccagcgatcccattactgggtatatacccaaaggattataaatcatcctgctataaagacacatgcacacatatgtttattgtggcactattcacaatagcaaggacttggaaccaacccaaatgtccatcaattatagactggattaagaaaatgtggtacatatacaccatggaatactatgcagccataaaaacggatgagttcttgtccttttcagggacgtggatgaagctggaaaccatcattctcagcaaactatcacaaggatagaaaaccaaacaccgcatgttctcactcataggtgggaattgaacaatgagaacacttggacacaggatggggaacatcacacaccagggcctgttgtgggttggggggctgggggagggatagcattaggagaaatacctgaggtaaatgactagtgaatgggtgcagcaaaccaacatggcacatgtatacctatgtaacaaacctgcacgttgtgcacatgtaccctagaacttaaagtgtaataattaaaaaagaataacgacaatggtttattttaaaatatgcaatatgaaaagttgtaaattgtaacatgaaaaactcaaaatgtgggctagatgcagtggctgccacctgtaatgccagaattttgtgctgaagtggaaggattgcttgagctcaagagttcaagaccgcactgggcatcatgaggatacctcgtctgtagtaaaaagaaaaaaaattacctcggcatggtggcttgtgcttgtaatcccagcctctggggagattgaggcaggaggatcacttgagccctgttggtcgaggctacagtgagctgtgatcatgccacctcactataaccaggtcaacagtgagttcctgtctcaaaaaaatgtgtgtggagggagtggagtaaatgtgcagaggtttttatttttgtgatctaagttgttaccagcttaaaataacctgttataactttaagatgtttcttttaagcctcatggtaaccacaaagcaaaaagctataacagataaacaaaaaataaaagacaacgaaccaaaacatactacaagagtgatcacttaaccacaaagaaaatcagtaggagaggagaaaagggagaatcgacaaagcaactagagaacaattaacaaaatggcagtagtaagttcttacttatcaataattaccttgaatgtaaatgggatatattgtccaatcaaatgacatagactagctaaatggatttaaaaattaagacgcagacatttgctacctacaagggactcatttcacctgtaaagacacatagagtcaaagtgaagggatgaaaaaagatattccacgcaaatgaaaacacaaagagagcaggaatagctatagttacatgagataaaatagacattaagtcaaaacctctagaaagagacaaagaaaatcactatgtaatgataaagtggtcatttcaacaaaagggtataacaattgtaaacatatgtgcactcaatattagagcacctaaatatataaaagaaatattaattaatctgaaaaagagacagactgcaatacaataatactaggggactttaacaaccctctttcagtaatggacaaatcatcaagacagaaataaataagcaaacaacaagcatatactacactctagagcaaatggacctaacagatatatacagaaaaatccatccagtagctgcagaatacactctcttctcaactgcacatggaacattcactgagatatatagtatgttgtgccaccaaagaagtcttaacaaattcaagaagactgaaatcatatcaagtatcttttctgatcacaaaatggtataaaactagaaaatgagggacttcggataatccacacatatatctgtattagtatgttctcacactgctggaaagacatgcccaagactgggtaatttataaggaaaagaggtttaactgactcacagttctgcatggctggggaggcctcaggaaatggtggaaggggaagcaggcacatcttacatggtggcaggtgagaaagagtgagtaagagcagggaaaactgccttacaaaaccatcagatcttgtgagaacttgttagcagtggcagaaatttgagttaccccatgttactgttggcctatctgtatgggtccgtagcaacttcagcccttgcctcctcagaagaaagaattcgactgcagggcataaagcagtaaaagagaccgaggcaagttccagagcaggaatggaagtttattttaaaatgccttacaacaggaaagcaaggtgcacttggaagagacccaagggggcacatgaaggtttaattaaagagagaaggtcaaatgccctgtttaactgtgatcctaggacatttataagcttacctctttcccatgattattcccttagggtgggctgcccacatgcatagagccctccttacccttgggaagtgagcatgcccagtgtgtctagggagttatacatgcatgcccacctgaggctttcttcctttctccagtggaagatcatacttcaccatttttgtctcttactatgcatgcccagaaagtttcttctccctggggcctgcatccaattaacattttgatgttaacaggtgtggaccatcaggaaatggcctgtccccctggcatggtcagattatcactctcggagaggcaacataataattggtgaaccatcacccagcatttctggtggatgggtgaatgccattctagtgaatggggactctctatgtgtgctccaaccccacatatcccttctacactgccctagcagaggttctccatgagggcttagcccctacagcagacttctgcctggatgtccaggtgtttccatgcatcctctgaaatctaggcggagattccccaacctcacttcttgactttcgtgaattcacaggccccataccacatggaagccaccaagttttggggcttgcaccctctgaagccactgcctgagctatactttggccccttgtagccccagctgcagctggtgcagctggaatgcagaacaccaagtcccaagacttcatagagcagcagaggccctggacccgacccaggaaaccatttttcccttctaagcttctgggtctgtgatgggggggagctgctgccaagatctacgacatgccctggagacattttcccaattgttttggtgattaacatttggctcctccagcatcaggataaatagctaatgtaggcagggcttaatacctaggtgatgtgttgataggtgtagcaaaccaccatggcacacgtttacctatgtaacaaacctgcacatcctgcacatgtatcccagaacttaaaataaaataaaaattttttaaaaagcctcctcattacttatgctaatttctgcagctgacttgaatttctcccaagaaaatgggtttttcttttgtaccgcatcatcaagctgcaacttttcgaaacttttatgctctgcttcccttttaaacgtaagtttcagtttcagatcatctctctcaagttcaaacttccacagatctctgggtcaggggtaaaatgcctcctgtctctttgctaaagcatagcaagagtgaccttcgctctagtttctaagaagttcctcatctccatatgagaccaccacagcctgtacttcattgtccataatactatcaacattttggtcagccgggcacggtggctcacgcctgtaatcccagcactttgggaggccaaggcaggtggatcatgaggtcaggagatgaagaccatcctggctaacacagtgaaaccccgtctctactaaaaatacaaaaaattagccaggtgaggtggcaggcgcctgtagtcccagctactcgggaggctgaggcaggagaatggtgtgaaccccggggccagagcctgcagtgagccgagatcgcgctactgcactccagcctgggcgacagcgagactccgtctcaaaaaaaaaaaaacattttggtcaaagccattcaacaagtctctaggaagttccaaggtttcccacatcttcctgtcttcttctgagtgctccaaactgttccaacctctgcccaatacccagttccaaagttacttccacattttcaggtatctttatagtagtgccccattctctgcagtaccagtttactatattagtctgttcccacactactataaatatactacccaaggctgcgtaattcataaacaaaagaggtttgattgactcacagttctgygtggctggggaagccacaagaaacttacaataatggcggaaggcaaaggagaagcaggcacctctttgtaaggcagcaggagagagaagagagagtgaaggaggaacttccaaattcttataaaaccatcacgtctcgtgagaattcactcactatgaggagaacagcatgggagaaacttccccaatgatccattcacctctcactcagtccctcccttaacacatggggattatggggattacaatttgaatcgagatttggttggggacacagagccaaaccttattaatatctaaatttaaaaatatgcttctgaacaatcaatggatcaattaagaaattaaaagggaaatttaaacattccctgggagtaaggaaattggaaaaaaatatcaaaacctatggaatacaggaaaaccagttctaacagggaagtttatagcaataaatgcgtacaccaaaaagaagaaatatctcaaataaatgacctaatgttgcatttcaagaaactagaatcacaagaacaaagtaagcacaacattagtagaaggaaagaaattacaaagatatagccttatgtgatatgtagaacacgaactctagctatgaagcacctacccagtgtggtaacagtagtcactctgttggttgtcgggggagtgtgcatgtgtaaactttcactccatctcagtcatttctgcagtgttgaattactttccacggggtcagattatctggggaatgaaagcaaagacttaagttggctacaactgaagggaagccagcctggtctgacccctcgactcatgctccggcctaggtgcagagggccctgtggttttggctccggttctctggctgcaggttcctcctgaacaggcctaagaagagaagaatgctgcctgcagagggcaaagtgtcggagaacaggacgtagatacggtgtcagccccaggggtaggctctctgtggggaccttgctcggtgagatgctccctcaagccacaagccactccagacaccaggcaccctcttcctcccccaacaccttcctcacagacaagacaggttggtgtcttttgtcctgatgtctttgagctgacagacctagttttggacacatagataggtaggtatgcacgagctggtggccgcaggcttccacacagcttgggctgactctgcaaacagggagactggagacacagctacgggaaggatgacacaacatggtcttcaccacaccgaggctgatctgggtacttctgccgtgtacccaacgtaaagcaacgcttattaggttgtcacctcaaggggagcagccagctgcctggtggaaagtggattatattggacccattctctcattcagggagcaggaggatttttgtcccaggaatagagacattttctgtatatgtatctgccctcccacctgccacagttttgccagcaaagccatctatggataccctaaaggctgatccccatcactttctcccaaaaaaggctctgttcaacaggagatgaaagatttgcctggccatttgaggctcctcattgtattgaaccaacaagtcttcctccattaaatctgaaacctgcctacctagtcattagtccatccctcatcccctcccccccttgtaagttgggactccacacctagaccctcatctgactctgagttgcatactacaggtgcagggttctgtgcgtggttccaagcagctgcggaatgggaccctagtgtcccagtttcttctgaaaggcctgagggacagcaaggcttggaggcccctgctgttcaccacctttctgctaatctacatagtggttgtggttgggagccacatgttcacagtggactaccgacgccacactcccatgtacttcttcttgggcggccactcgctgatggatgccgcctgtatctccaacatggtgactcaggtgctggtgcatttgctggctccggtagggcccgtactttattgtgcttgtctcatccagatatgctttctccacttcctggcaccctaggagtccttcctcctcacagccgtggcctatgattctatgcagctatctgccagccattgcactactttgtcctcgtgggccgactgacccacacgggcctcacttccatctcctgcctgctggccttggccaacgcattcacctacagcatcctcacagctctacccaagttctgcaggccttgcctcatcacccacttcttctgcgacctccgtcactgctcagactctcttgcttcagcacacgtaccaatgaacttgccctgttcttcagttttctggtggctcttgcacactgcgtcctggtcgtggtctcctatggacacgttgtggctgctgttcaggattcattccacccagggctgaagaaaagccttttctacctgtgttgcccatctcgctatgatcggtcttttctacgtcacttcagtcccctgctacatccttcccaactctgcatactctggcttgggcgactgggtgctctctgtgctatgtgtggtcctcactcacatgctaaaccccatcttccccagcatgctgggatgacaggcatgagccaccgcaccggccaggaaatatttcttgaaagaaagaatgagagagtacctcgtgtctccccattatggggtttggcactggggatacagaaaagctccagacaagcttcctgcctttatggagctcacaaagtaggctgggctattaggcactaagacaattcactgtcatacaatggttactcgccattccttcacaggaaagggtcactcacccctaccaccaaacctaggaacggccacatgctgctcaaagggtcaacacagctgcctttcactgttctcaagtgatggcgggtgggcgctcagagaagaccaaaggctcaaggccaggacactaggccatccggggcttcccaacagacccccatcccgagtcccgcacaagagcctgcaatgacccccacagggcgaaacaagccgtgctcatcagccctggtaggtatggctgggccctccccctgggccatatgaggccagcctacatcatccccacttagaccgccccactcaggccaaattcctaggaaaggggccgggaatctgtgtagaccgggggagattgttctcatcatataggtgagagatgatgccgacctggcctagggagggtggagaggacacattgaaggaaactgactggacggaaggtgagatgacagagtgcgggaccatggaaacgcgtgtcgccaagacagagaatgaagcagagggaagccattccgggagtcgggggacaggcagtgaggtcagctgggggcaggttgggttggaagtacctacaggccatccaagctcacatgactgtgctggtttgaaactctggaattcaagcaaagagatccctgcttaactttaattcaatggccctctttgaatatagacatcctggccctgtcacctctgaagcttcaccattccagatgatgcctaatgtgatttcaaatacatttcatccattccaagcaagtcttctctgattcggaaacacaaagactgtctgccagcgtgtgtggaccaggaccggccctctggaggggaggggctgttatgggcctcggtaggttttgtgtttaagcacacatgtgttcttcatgagtacctccaaggtgcagaagaaaaaaaaaatctcactgtgtaatagtgacaaaatgctgatgaagcaaactatcaacagccctctggaggaataactttcaaggtaggatgaactgtgtgtgtggaatttggaaacaattgttttttggaagcggctgaaagccacagagatgaccgggagagccgggcgacatctgccccgtggtgtctagcgtgggccccgaggctcggtgacttcagagacttcatcacggcaccgtccgcctcattacatcaagaaaaggtgccaattagaacaagtttcagaggaaaaatatggcctccaatgaattgaacaggctaatttaaactttggcaaactggctcactccagagctaattagaaattttcctcaacagcaagtaatgaataactttcttaatcgctttctgcttataaatgtaatacatgttcactgcaaaagaagaggaaatatgggcaagttcggaagagaaaataaaaaaccaaccgttatctcaccgccaaggataacgacaatgaaaatgtggtgtatttctggataaatgagccaattcttgtctagtgcttacaacagtggcttgggacgtggtgaccacccaacaaatgttattggttattattattctcattgctagtaggcttagaaaagtcttttccaatgctatccctcccccagccccccacccccaacaggccccggtgtgtgatgttcccctccctgtgtccacattgttcaactcccacttacgagtgagaacatgcggtgtttggttttctgttcctgtgttaatttgctgaaaatgatggtttccagcttcatccatgtctctgcaaacgacatgaactcattctctttcatggctgcatatatttcatggtgtatatgtgccacagttttaaaatccagtctaacattgatgggcatttgggttggttccaagtctttgctattgtgaagagtgctgcaataaacatacatgtgcatgtgtctttatagtagaatgatttacaatcctttgggtatatacccagtaatgggattgctaggtcaacaagttgatgggtgcagcaaaccagcatggcacatgtatacctatgtaacaaacctgcacgttgtgcacatgtaccccagcacttaaggtataataatgaaaaaaaggaaagaaaagaaagaaagaaagaaaaggagagaaagaaagaaagaaagagagaaaagtcttttccattccaacaatcaaataaagttcatctaaattttcttccaatgtttttacttttattgtgtatatattaggtcaatacattctaaacacttcagatactatagaaatatttctctatatagcattcccccgtgcttctactgagatatgtatcggcagcctgagaagtcggcattcctttgtccacacccatccccgtgcatccgtttcatttcattcgctccacagtcagccgcacctcagagttgtccttcaaagggtgagagactaagacttttatccagtgactcttggccccatcggtggggggctgtgtccaagggtacaacttccccagagcttccaggcccaccctgtgcagggcgcaggagaaaaagcagatgtgttgtgagctgcaggagaggcgctggcacagggcacagaggtccccaccccagcagccgagaggcagaaggcacgtgcagggggcccagaggctcagcaggatctgagatgtgagaagatgtctacgaacacagaggcgcaggaggaggccggagatgacggtcactggaggggctctgagacgtgcacagaaaacaggacagagcttggcagcagcactcatttgtcgccctgccacacacagcctgtgttttctccttgacagcatctcagtaggacccaataatgccaacgcctggagatccctctggacaaccgtcttcatcctccacatctggtcctcccctacacctggggcctggacctgctaaggagctctttccagttttctagacacctgtggaatcccttcacccacccttacccatcggtgtggctgctctccagctcactctcgtcctgctctccccaactgcctcggctccagggggacgaggctttccctgggctgctgccttccctgcccccttcccagtccccagaagggtgccagcctcagaggcctccagagcagagccttgctcaccgcagcagctccagctggaggaggttccccctgcctcctgcaccctgaccccttcttagagcagcagaggcagaagcaggagcctgctttggaaaatgacatgtttttattgctatgtctgcagtggctttttagcacagtagaatgtccccgcaggcccgccaccctcacccagccccagccctgcagcctctgtctgggtgtcggggaagcctttcttggggtcactcagccgtctgaggactggatgtggcacagacatacataggttaaagctgctacacggaagactggagatgcgggaagtgcattcgctttaagcctagaggtggtagccgtgtccggggtcccttcctgggggtgtgcctgttaccgaaataccaagggtttggtctacgtcctgctgctggccgcacagaaagccaatgactgactgagacgaagagcattaccagggaagacggctttaattgggtgctgcagccggggagatgggagttaagtctcaaatccatccccctgactaaaactaggggtttatatagccaggaagaaatgcaccaatgtgtaggaaaacaggaactcgggagggcccagaaagcaatcctgatgaatttggggggtccagcatctcattgtctggatgtggttatctggtgagtttcagttctttgatattttgagaggcccgaaggtcatttcctgaggaaggaattcagataaaacaactgtaaggttcaagcttgaagaccagaagggtcagtttctatgtgtatcaaaaagaacagcctatgggacgattggatcggtttcatgcccaacccagggtacaggatgtgggaagcctgagccggcctggtgagcagcccagacacccgggatggagtattgcagcctctcgccccacagacttgtgaacagggcgtggggacagacacccagctcctagggccatgccacccccacccctgcccgcctctcgcagcacctttcctgtggatctgacccccttccagacacagaagtaagccagcacccagcagacacagggtcacctcccagctccctaccaggcaagagcgaccagggcagggactgatactgccgaacccaggagccaggcccgacccagcctcaggtccagcaggtcccgcctgtccacctgggccaggcctagagcccgggagcccctggctggtgggaggccacccgcaacccaccccacacgcagctccagctcccccaccaggcggggcgactaggacagggacagaacccgttgaacccaggagtgagatccggccccgggtcccgctgggccctcccgtccaccttggctggacctggcgcctgggagaccttggctggcgcgaggccacgcccaccagacatgcagttccagctaccccaccagctgggcgaccaggacagggacggaggctgctgagcccagttagaggcctgccccccggggtctgtcctgggcgctcccccaaggacggacagggcaggcagggtccgggacgatggccgcacagtcccggccccgtgttcccaggcccgtcttgctcctcgatgtgagggagacccgggggatgggacaggctgggccccgcagtgcctgactccctgcagggctcccgggacaggggtccggcggacagccggctgctcaggggtgaggggtccaagctggcattgcggccaccttccggcccgggctctcttggggaggggcggggttggtgagaaccggtcacgtgctccggggctcactcggggtctcccagggccggaagtagggcccctgtgcgcaggcgccctgaggatcccgggctgcccatctcacgccagggggcggaacttcctgcagcctctctgcctccgcatcctcgtgggccctgaccttctctctgagagccgggcagaggctccggagccatgcaggccgaaggccggggcacagggggttcgacgggcgatgctgatggcccaggaggccctggcattcctgatggcccagggggcaatgctggcggcccaggagaggcgggtgccacgggcggcagaggtccccggggcgcaggrgcagcaagggcctcggggccgagaggaggcgccccgcggggtccgcatggcggtgccgcttctgcgcaggatggaaggtgcccctgcggggccaggaggccggacagccgcctgcttcagttgtatcctgttctgttctgttctaggaggttctggtggcgaggtgggggccgtgagacggagacaacagggtcaagaggtggggggcagggccaggaggtgggtgagggcagggccaggtgcggaaggtggggtttgggagatgggggtaaggcgccgggtggggtgggggtgggggctgggagttggaggtcgaggggtggctcagaggaagggagtaggtaggggatgggaggtggagcgtgtgcacagttgggtgctgggcgatggggtgaggggcagg

SEQ ID NO: 8720 - DNA, 417046 bp, Homo sapiens
  misc_feature (1)...(417046): n = A,T,C or G, or insertion/deletion polymorphism (see Tables 1-2)
attttatatcctcattagcaatatatgaaagatccagttgctccacatcctggccaaaacttgatatgggttatctctttaattttagtcactgtattaggtatatagtagtttctgattatggttttaatttgcatttccctgatcattaatgttgttgagcatctttaaatgtatattttttgccatccatatatcttcattggtggtgtcacttcaattatattgcccatttttaaaagtcaggtttttagtcttcctatcattgagtggttaagagttctttgtatgttgcagatgtaagttcttagtcagacataagtctttaaaatattttcccctagtctgtggcttacctttttatttgtatagcaatttcatgttttttttttttttaatttaagttctgggatacatgtgctggacgtgcagggttgttacataggtatacatgtgccatggtggtttgcggcacctatcaacctgccatctaggttttaagccccgcatgcattaggtatttgtcctaatgctctccctcccctttcccccaacctccaatgggccccggtatatgatgttcccctccctgtatccatgtgttctcaaacaatgtcttttgaaaagcaaaagattttaattttgaataagtccagtttatcaagtcttccttccttccttccttccttccttccttccttccttccttccttccttccttccttctttccttcctttcttccctccttctttgtctcactctgtctgacaccatcttggctcactgcaacctctacctcctgggctcaagtgattctcccatctcagccttttgagtagctggaactacaggtgcccaccaccacacccagctactttttgtgtgtttttgtagagatagggtttcggcatgttgcccaggctggtctcaaactcttgagctcaagcaatctgcccacctcggcctcccaaagtgctgggattataggcatgagccactgtgcctggccttatcaaatttttcttttatacttcatggtttttgtgatgtcaaaaatcttttccaaatccaagattttctaagattttctccaatgctttctgaagtattatagtctataacgtcttgtaatagcttcactaacaatcccttattcttaagtttcttacttatgaatttctgatgacactacacatattatttttagtcttcttttctactcatgtacaaatagacctaagaggctaatggaacaaaatatatgaaatcaagattgtgctagaaattcaggttgtatgatcaccaaatttatgcttctctcctatctcataatatagtttagagaaaaaacaataataataacaattttttgagtaagtaacatgctaaacactttttttaaaaaaatatatatttctacagagatgagggtcttgctatattgcccaggctggtctcaaactcctaggctcaagagatcctctcaccttagtctccctagtagctgggattataggcacaagtcaccatgcccagctccccaaacactgttttgtgacttttgtattcaaagtataaagtacattattttatactaaaaatgactttatatgattcgttctattatctgtctctctctccttttagcaggtgagaatgttgtatcataaagaaattaaacaacttgttcaggtcatctagccagctccgtttgatgttagagtccattctctctctctttttttttttgagatggagtctcgctctgtcgcccaggctggagtgcagtggtgcaatctcggcctactgcaagctcttcctcctgggtttacaccattctcctgcctcagcctcctaagtagctgggattacaggcacacaccaccatgcctggctaatttttctatttttttgtttttagtagagatggggtttcactatgttggtcaggcaggtctcgaactcctgacctcgtgatccgcctgcttcggcctcccaaagtgctgggattacaggcgtgagccactacgcccagcccgagtccattctcttaatcactaacaatagtagctaataaatattggctgcttactgtgtaactggtactatgttaaattctttacaggtattaactaatttaatcttcagaacaaagctacaggtaggtattattattatgcctctttacagatgaagaaactaaaatacagggacccagtactcacaactattaagagcagagcaggatttgaatccatgcagtctggctcctgaactcttcctggtaagcatcacactacaccgtttctccaagaataattaatggttgtatttgttgggtaaatcaagcggatggcccaaatgagtctctcccaccagcaagtttttgaaatgaaagatagttttctatttaatgctccccttggcacctgaccccaatgatttactattgccctgctcttgttccattttcccactatgccttacagtgataataaacagaaccgtgtgtgccagtgcaagaggccaggggagatgagtgcctctgtaagtagcaggagcctcagccagtacctcaggttgtgccaggcccctgggaagtgagtagcttcacctgggttctcttatccatttgtgtcaacttctggcttcctaaaagagagggcatggccaaaagaggcttgtgagaggaacatttagattgcttggagcttttatcatagcccaccaggggtttgagacagtggtgtatagtgtagagagatatttgacttgggatggagtcctgcctttttgctttaattttttgactctgggcaagttttaaaaactcacttcacttagcccatttgttaaaaatgggctaagaccaaccttattttgatgatataagtaggttcatgcagtaaataataataacgataatatctgccatttattaggtgtctctctgtgccagatactcataaaagcactttctaagagttaactcaattaacactaaccacagcatgaaataggtgctattattatcatcatcattttacaggtgagaaacaaaagtacaggcaactaagatatttgtccatagtcactcagcagaaaccagagaagctgaagcttgagaccaagcagcccagctccccagcctgtgctcttaaacattggcatttactgaacttgcataaataaataaatatacatatacacatatatatattttgcatattatatatattttacctcttttacttttttaaacaggaaaagccttttctaacacccccccaccccagcattttttttttttttttgagatggagtcttgctctgttgcccaggctagagtgcagtgacgctatatccactcactgcaacctctgcctctcaggctcaagtaattctcatgcctcagcctcccgagtagcagggattacaggtgtgtcaccacgtctggctaatattttgtatttttttgtagagatggagtttcaccatgttggccaggacggtctcgaactcctgatctcaagcaattcacccaccttggcctcccaaagtgttgggattacaggcatgagcaaccgtgccaggccattgctaaccttttctttggaaacttgtgtgctatagctaaactgaaggaatctgggatgatttgatgatggtccttacccaggtctggactggtaggtctaggtcctagttttggctctggccagctttgggcaaggcggtttcactctcctaagtcccacatgtctcctgtataaaatgttgaggggggtgtactagttaatttccaaagccctttccaggtctcacattccttatgtctatgattctgtgattaagttcctggaaggttaagtactgataaaagtgccattaagttctgtatactcagcactagcagctgtctgttacctaagatacctgggcctaggagttatagggtgggggctgggggcagggtgggtggatgagaaaggctccttgtctgacaactgtgtgtattgactgtagacaacagaggactgcccagcactgtgcagtgtaactgagtatcctctgatttctgggctgtgatatactaagactgaccatcaaagactgtttcccaacaagagaaccttgtgcagtaagttcctcaggcaagaagcragataattgggacaggattgaatagatctcaggcagagaaacttgggggacagatcaatgtaggtaatgaactggttgacccaaggcctctctgtctatcattttttgacctcaggtcagagcgatagaaagggggaaaactaccgacacagctcctgccatgaagtcctggagaagaataagtgactgtttgtcccgcatgggttagtcattcacctgcctgaaggcaaagggctgggagtctggagtccatgacctgctgggacatactttgggctgcattttttcccccttctaatgtctcagctctcagggatctgcttttcctggtgccaaggagtatggatgaaattttgtccctcctccatgcacccctataaaacaaatatgatgagaaattaatattttccaaatggtgacctaacctttgttcattaattgagctcctattgcattccaggtactgttagaggccagcaagatacctagatgattgagacagagtcctcgccctccatgaagtgactgttcattttaaaaccctaaagctgggttcttagaggctactgcaacagcaacaactcccgagtgagtgcttatcatgtgccaggctctggttacaggctttaactctctcagtggaaacagcctgagtgctggcttggctaccccatgtctgtgagactgtgggcaagtcatttactttccctttgagtttcaatttctaaaactgtaatatggggataatatatgtaaaacagctaagaagtatatacttttaatgactctttttagtgtcaatggaggatttgtgagcaaatgcatataaaacacaaggcaaacaggaggtatttagtaagtggccaagtgattattgagagactatgggcttcttcctgttcctccagagcaagactgacaggtgtcctattacccttgcatcttcagagcctagagcacagccctgaaaacagcaggcgctcaccactttttatgatcaaaggcagtctctacagggaaagtcaaatcattatgggtatttatgaattacaaaatccataaagttaaaccaggagaaatggacaaaaacacactcattgtagaggtctttaatgatcccttggctcatggcagagcagctagacaaaaaacaaacaaacaaacaaacatgcaaagattcagaaggcctgaaaaaataatgaatacaaagaagataaatcgatacagtattctatcttcacattcggaagacaaaaacacctttcaaaaaaccatgggacattggcaaaaataaccacagataatcctcaataaatcttgccaggaggcagtacagatgacattgaattcagtgagactacaaattaaagacaaaaaggcgaagtataaattacttgtgtaagaactctctcaactcttgggtccaagaagaaagcaaaagggaaattgtatgatagcaataaatgtgccattacccagagtcacacagctaacagtgacacagctgaggctgctagaacctgggtctactgtcgtccagccacgaactggcttgagatcccggataagtctctctgagcctcggtttccccttctgtcaagtagcctcgaaggtccccggcgctcggttcggtggcgagtttgaggagtgtgggggaggggaggggagggagcgtgcccgagacgcgggagccgcgaccgctttctgcgaagtcggggagggtgcgggcgttgagaggctgcagcagagggcgctgggtcgccagcctgggccgcgtctcccattggtcggggctggggcgctgggctggagagttggtggaaagtgacaagttgagcgagagagggagcgtggagagctggagcagccgccaccgccgccgccgagggagccccgggacggcagcccctgggcgcagggtgcgctgttctcggagtccgacccagggcgactcacgcccactggtgcgacccggacagcctgggactgacccgccggcccaggcgaggctgcagccagagggctgggaagggatcgcgctcgcggcatccagaggcggccaggcggaggcgagggagcaggttagagggacaaagagctttgcagacgtccccggcgtcctgcgagcgccagcggccgggacgaggcggccgggagcccgggaagagcccgtggatgttctgcgcgcggcctgggagccgccgccgccgccgcctcagcgagaggaggaatgcaccggccgcgccgccgcgggacgcgcccgccgctcctggcgctgctggccgcgctgctgctggccgcacgcggggctgctgcccaaggtaagaggcgcccgccggcccccgcccgcccagaccccctgacccgtggccacccttccgycgtccagccgggcgcgggacacgcaggaagcgccgcgctggctccggggcgcgtccggccacccgccacggggctcgccggcgccgccaggccagggtttgccccggagccccgccaggccagggtttgccccggagccccgcggcgggccggggcgcgcccagggactcgttcctcggtgcgcagcagcgattgtcagcgctgacaggaagcgtggaggggtttgagggtcctgggggtgatcggggcacttctgtgcagggcgtccccccttgtctccctggacctctagcgcgccccagccggtgttcaggcaagtctatcctgcccccaagttgcgagccsgcccggaaggcgcggtccaggagggagtttggattttcagtggtgctcgccagagcccaggcggctcgcggatcgacgcaaacaaaagccctgtcctcctggggctccggcggcctcgcatcgccaccgcccccggccctccggccctcccgagagtcatcatagaggccaaaacttgtgcgccgctgcagccgctgccactttgtgcaaaatgtgctgtcagaggcggcctgcgsstccaaagtgctttgggtgtgcacgcgcgcgcgcgcgcgtgtgtgtgtgcgtgttacaaacaagagggggaaaagccatctaatgcatatttgattttggtaatctcyaaagacaatcgcaacagttagagaaagacttcaccgcaagccggagcgtcttagttcgctgcgggaagctggggtccttgctgcgtctgagccggtacacaatgagagggaagagcccggctgagcctgtggagacaaccgattcattctttggaggttggagggggaaagttgattaaagtctccggggtctcgggcctcacttttaacatgcatcccttgagggggtgaggagcctttggattctgccctcccccactcccagccctaaacctgagcggataaatagatctctgctcttttatcatgcatctttcatttttaagttagcactgtgtttaggaaaagaaaaagttctgcgctacttagcagttgagaggaaaaagatgtattcactacatagactacgaatgcagaattagtttttactaaaagttagctgactttcttggtagaaaacacactctggaaggaagttgtgtgaaattttgatttcttagagatggtttttggaagctagagtagcattttctgaggatgatttctgaaacggatcctataatgtggtcrtgctaatctgaaagctcctgggggtaaatagagctcctaattgtaattaagatgtgcatcagcagggagtgcaccttcctgatgaaaaatcctaatgaaatgtaaacagcttggtcacatagatgttttgcttggtgatgccaaacatctggccttgcgccacaacacctgggtgaaaagtaaaaatgggccatgctgcctaagtaatgtaaacatccttctcaagttgggttgcccagcaaattgaggtggagataagcagggtgattttaactaaggtgggactcctggcttggggctttggttaattcagttatttcccctgtggactcctttactttgtacttcacctttcaacaatagttgcttttagatcatagccccttgtgggggtgggggtcacttacctttaaatacatgtccctgcattgattttgctcactgtaaacacccttcttatcagcagccaccccaattctgtctcctttaactgtttacagccttttagagttgtttaaaaaaggtattgcctattccattgtagcaggaggagccacagacaaaactcctcagacacccagtgagcaattcctgtcccttttaagggctcacaactctaagggggtccacgtgagagggtcatgatgggtacatgactgggggctgcatgcactggtaatcagaacgaaacagaacaggatagggatttttacactgtctttccatacaawgtctggaatctatagataacataaccagttatgtcaggggtcgatctttaagtaccaggcttaggtcaggcaggcccaggcctggtttcgggtctggttccttggtttcaggtctggttcctargtgccgggctacctgcctttaatttcgcttctctttccttttctgagtataaaacaatataaaacaatatgagagggtctgtctctcttctctcaccatactctttagtaatgagctcaaatctgttattattgtcttatttgttgttttataaatccctttccattttgtgaatgtttgatcttttctctggggtcaagacttctggtagaactcacgtttactttctcctcttggactcaagattcctaaggtagcccagccagtggctcaggaaatcagcttaagcggagatatgtttcatgtatttatttaaaaagatacaaaacatttctcccatcatttttctattttgttagccaggagaagaaaacctttaaatttattttttctggtctgtccattgttgatttctcatctaccccctccctatgcaaagctcaacttctttaggaacctgaagcttaccttataactgyacccaagcccagggctttaggaacctacctggcctttctcaaaatcttatagmttctgtggtttggctgctgggagccagagggaggtggcttgctactgtgtttgctatcattttgtaaaccttccgttgccatttaaataggtatttgtctgtacttttagaatagaagtgtcttgaaggcaataagactgtgagcttttctggtgaaaacactgagagcccaagtccactagtcccaactttattagagatgcctgaaaatcctccctggctggctagggggagccgaaccaaggtgggatgggcaaagggtgtggtcaaattgtctccttcagttttggaaatatttaatttccaatatagattcagtatacatggtaggctgttttgcttctctgatgcctgggataatctgcctgatatttagtgaggggtcagctttgccctatagcaccctttctcttctgtatcttgagcataggcccccagttagacttttggaaagtttctgaaagtgtcacttgctctgaaattagtatcaggtttggctggtggtttgatgstgaacatctaccccatttcaaatatttctgaaaattttacacagcatcctatggagaatggaacactttgtaagctatatgtactttgatgtaaatgtatatgtacagatagcatatgtatatacacacatatatagtaagtggtccatagatatttgttgaatgaatggagaataactttttcggttgtatgcaaaattctgatatatgctttgcttagtaaaaatgcaacatggcatattttcaaggatttttccttttcttgtcccatcttctagtatgaaagaagtgtagtgtagcagaacttgacagtaaagctaaatggttacaagcacaggctttggcatttaacagacctggatttgaatcttttctctgttgtatagtgggtgtgtcagttttcctgagcctttcaagagtgttatgagattgaagtgaggtcatgcatgtaaagtactggagaacagcacccagccwagaggtgagtgcgtgaaattaatttggggtacatgaaattaaggatatgtgaacttccagaaataatatacacaattttatatgcatttttacggttctgtatttatagctatagctataatcttattttccaagaaaagtgtcaacctctgaacgataggaactgctgacttggagtgtttgatgcctgaggcaatgggttgtcttcctggggaggctgaaaggagttgagtgttggtggctagttctaggccttatcccaggttaacacactccatggaggccccacttctcacctcccagtttcccttccaccaggcaggctgttaattgggcctgagagaagctgaagaatggtgccaagtccttgtgacctcaagtaagaaaatatgtctctgaatccaagcattctgagatgcaatttgtacagtttatttaacaaacacttatctaatccttacaatgggccaatcactcttctaagccttttgcaagtattaactcactgaatcctcacaacaaccctataagggagatagcataattagctcattttactgatgggtaaacttaggcacagagaggttaagttactttctttaggttacactgctaaaaagtggcattactgggcttacaagccctaacagttcatgctcttaccttagtggctgtcctagacattctttccttgtttaattcttacaatttatattcttttaatgtatggaacaaaggtggtatttcccaaggttttccaacagcagcaaagggaagcttgcttagctgtaatctagaggttataagaaattattggagacagccaatttcaatttcccttcgagtgctggagttccctaagacggtcttgctgaaactcagagatagactggaagcaccttgttggatggcctggatctctggttctggaagaattacatttttgtaatgagcttcaactttgatgtggtttgagaagtgtgctcgccagttttttccaactatcaataagctatattttgatgaagtgactttgtatttgcatcttggtggacaactgtggttgtaggctgagaaggcggggatttattagagtgctgtctagtgggacagctggcttgccagctcaaggtcccagtgaggaccagaccctggcaaatccagctccagctgagaaacactcacgtcttcaaggcctctttctcaaacagaagggccttagcctggcttcacccattccctggggtgtgacgggagagactgttcggtagaaactggaagagaaaggagagtctgagaaagttctctggagttgaagggggaggggatgggggcaactcttcgaaaatccttaactaaatgcagctgcttgttacacggagactgacttgcatgccaggaatatctaaaaagctaacgaatacaaaataaaaataaacagcagtaaaaaggctctctctttgttgcagtaagctcrgttggggttttcagtttgtttaggaatgggataattgtggcatccactttattttggtaaggcagtgaaacgtggattaatgttatgtgattgggatgctaccaccatctgaactttttccttcatcccctgcccccagccacaccccccagaacacccaggcatggacatccataggacctgagtctcaaacagttgcccctgagtgaattacattggaagagggcagataatttaatgggataatcttggcagggccagcaaatttcacacctcatctctcactaatagaaaggcagcagaaggctacaacatcctcagatgaaaaggttgtataaaaaggctctgcttaacagtaactgtctgtccataaataaggttttgtacagtcttgatccaaaagctgttatgaaatactgataagccaagcctcataatgtttggcctccttacatttccttttcctgcttctctccatagaaccatagatttttttttttttaagagagagagggggactaaaaaaaagatcaacagtccaaactttatttttttcaagtatttctatacaggatggacttcctttgatagctgcttaaagaggtggcgtggagtaatggaaatagaatgggatttgagcctgatagggaatgggggtttgaattggggctttgttgccttcttgggcaaagttacctaaacttttgagcctctgttttcttatctgtaaaatgggaataacaataatatgtggcttactggggggttttgtgagaataaaaggatgttatgaacttatagcgcctaacacagcaccatggacttagtgaacgtgaagtatgttagccaccatcattatcaagggcttactgaagaaatttgaaaatctggcttcaaaacgatggtcctgctgcaaggtagcaaccaaggctcagagaatagcaagttttacaaggttttaggactccagagtgttttgttttatagggagcatgcagatgctctagatctgagcagtacccaggccagtgctggggacctggatggaagggattccacagtgcagttttgcaatgccttaaaacaaaggcttttttcagaacagcaagctctttggggaagagcaacccctcccaggtgcttagtgtaattccagaatcctacaatggggaatgttacatttcagggacctccacttgtaatctgaccgtttttagctccaatatccaaataatcttgctgagcacaacttgaaagagaaggataatggccggaggaaaggatcctgaggtgctctgtttgccatttaaattttctgagtagaagaaaaaaagttcatgttacccaaagagagaagagtaatgaagcgtgtgggaagcaggaggggtgataaagaggacttctaaagacaaagcagaggttgggtttgatattttatttttcaacagtgaagcttgtcactcagtgtatttcaactaacatttattatatatttatcacatgaaagatacagtattcgtgtccaggaataaagtattaactttgccctcaaggagagaggagaaaaattctcacttttttgagcacctgctatatgccaggtatcatttttttaaagctattaaatttatgcttctcagcactccttggagtttggacttctgatcctattttacagataagaaaatcgaggctcaggaaggtaagtatctcagccaaattcgtacaatgattaagttgggatttgggatttgaatctaggtattttgactctcagatgtatgctctttttgttatccttaaagtgtgattggggagacaccaatgagcagatgtggtaccacaggcaactayctctcccacaagtgaattataggaaagagttgtggaaaaaatgctgtgggaacatggggaagaatacattaattctcaggggattagagggtcagaggaagaacatgagtgcctccttcataggcttattgtgaagagtcaatgaaataattcatggaacacactcagactgtgcatagtgagygctcagtgagtgttctgctatagttatgtagccagtgagaggcctgatcaggatttatctgcctctaaaacccatgtactcttgctcccctgtgcactttttaaacagacatgtgattgttggaagagtaagtaactgtgcagtcaccaaatgaaagggaagacaccaatacagttgctctggtatattcaccacctgccctaatcctggcttttaggactggactgctttgggtatgggaggggatttggatagatgtggggttggaaagaatcaagatgtctcatcatgaactatagcgctcctagaactctggccaggatttaccacctgccctcattcattcattgatcatacattttctatgcacttacagtgaaccaaatattctgatagtctcactggagatgtaaagatgaataaggttagatcattgccttggagggtttttcaaatgacagatttatggcagagattgctagctgatcaccaaatatgtttccatctcttccggtcatatgactagacaacatttctcagctttctcacagttaagtgaagccatgtgactaaatactagccaattaaatgaaattggaggtaatttttgtcgcttgtaggcttgacccataaaaaactccccaggcagaatcggtatgatccttcttcggtggcttgacaaccttagaagtcatgtgttgaaagtgtcacaacgtggaaagagcctgagactctcccttaatcactgtgtggtggaagccacacttgtttaggttttatgtgaaccaaaaacaagtgtccattgttaaggctgagattttgaggtttttttttttkktttttttttttgttacagctgctaatgttaccttaactaacatgaggttgtaaatcagtgtgtggtgagatcaatttagtgggttaggaccagcatttttagatagaataaaataggaaacctggtttgtgtctgaccacttcatgcagacctggggctccatccagtaaattaaaccccttcccaaataatttatggcacacatagggtgcctctagcactgtagagaatctagaagaatgaagggtggcctttacccttggggagtttaccttttaggggcagtaaaataggcactttatacagccagtgagtacagagttggcaattatatatgcagaatccctagaagggtgggtctttcgggaggaagtgtgatatgatgtgagccttgaaggaaggattgagagggtgcgggattgaaggatgggagatgggaagaggagttggacatttcactgctggaaaagggctggagttccacagcagcctgcagctgctctgggggtctccatggactcgctgagactatcctgagttcttaaaccaggccttcactgtggaatgaagctgatctccaggggatgggagagtgaagaaaagaaagacagcgttgaatgaagcctgttgtgtttttagcatatgaagggtggaggaggagagagaaggaagcagtttcactgggagcctgaagacttgtctttcttcccaaagggtgtcccagggagttaaaaatgttgtgcatttcagggctgcttgtcaaaggtatatgatggtgtcttattgtctctaatgcagccattttctcttatagtgcaggctacttaattctattccccctcttgtctgcttgatgaaaagaataatagtatactaataattaacacactgagcatactgtgggccaagtactattctaagttctttaagcgatttaacttgcatagtcttcaggacgaccctatgaggtaagccagagttctaggagcattattgttcactattaggcatcttgattctctccagctccacacctgtgtgaatcctccaccatgcccaragcagaatccaggctaaaagccaggataagggcagatgggagaaaatacaagacgaactgtcttggtgtcttcccttctatttggtaactacacaactacttactcttccaacgaccacatgtctgttgaaaargtgcacagcagagcaagagtatatgggctttagaagcagattaatcctgaccaggtctttcaccggctgctgaacactccttgaacactyacaatgcatgtggcagggtgctcagtgtgttccacgatatccccattttccagataaggaaactgaggcacagagaagtaagtaamctgcccaagaccacacagagagttaaatgggaaaactaggatttgaacctgcatatcctaagrcctgagttttgttcctaatcattattatgccaaactgcattgcagttttttttttcaactctgtctgatgattaaaattctctgtaagatcccagccaaatagctgagtcaaaataattataattaaatcctccatttgtatagggctttgcagcttacaaaatcattttatgtacagtattacctttaattttccaaaaaatacagttaaataggatttatttctctcttccttttaaaagtaggcaggtgagtttggcagctcacacaaggtcactctgtagctgtcagggcctgtctaaaacccagccccttggacttagggcccattgaactttctgctctaaagactacttttgtttggaatttgtgcctctaatatactgatatatgactattttcactactgtttcaccaaaaggtgaatttgcctgattttcacttgtttcatccacaaaatcttcaaatagctgttgtctttagaaacagttgaaaggcatttgtagatgggacctggctctgggatttctgtaacctgggaaaatttacttgcaaaaagacagagaagttacttaaaaacaggattttcctaagtggttggtgattgtggcagggagaggagccaggaagagaaggactttggcatcagatggactaggctcactactgctctgccaggtcagcaaactacgtaacctctgagactggctttcctcacgtgtaaaatgggasccataatggtgcctaccatgacagagggggaaggaccatgggtagtgtttggcacagtgcctgggccatagttggttgttggtgtgtgatcgaagctacatctctcaattgaatggagagcagcaattcttcctttaagatttttcacaggatgggatggggcaaaattgctagttctcagcgccttgttaggcatgattttataatacagttatctctgacacggactttcttagcacctggaaatcttaggttataattatattgtttctcaagggcagggactttcttatgctctgtgaaggttaaacatcataaggtaaaaatagaacatgctgcctgaaatcctagataccctggaaaggctcttatctgttcttcatgggaaactgacaccatttccggatgggtttagacaatgtacatgaaagcaacttattctactttttctccataagagagattatagccttgcttctaggatttcactccaactggggtgtttcaaagtttttacataattttcacaccccctggagagtattggctgtttttcttttttctgcctgaacttccattgtggtgatggactgtattagcctttcatatgcctaccttaaagaggtaatgcttaacccagtcatgactgttttatctcctcccttcagagaactgttgtgtgttgtatggggattttcagtcccaagatattgcctgttggagaccagtggtgtgtagaccactgaaaacaagcagcaactatatatatatatattttatttatttatttatttatttaattttttttttgagacggagtctcactctgtggcccaagctggagtgcagtggcacgatctcagctcactgcaacttctgcctcctgggttttttaagtgattctgctggctcagcctcccgagcagcttggattacaggcgcctgccaccacgcccggctaatttttgtatttttagtagagacagggtttcaccatgttggccaggctggtcttgaactcctgacctcaagtgatctgccccgctcagcttcccaaagtgctgggattacaggcgtaagccaccgcgcccggcctacgcagcaacaattttcgatgatgttcttaatccaccagtgatttaaacctctttttctctgtgcggctcatagcgctttgcccactcacatctggtgtccctaagtcaaagcattgaaaactttgcctgtgaccaggtagtcttcagtgggttagagtctgctgtcagggcctcccaggggacacgtgataactaatgtcctttttccccactgaggaaggggggagctgaactgagcatgtccagtctgtgctacccagctcatccctaagttgctgcctaggactgtgctccgggcctctgcaaggaggagttagtaaaggtgcagagaaagtccaggacttaacactgattagtctycctccccagaaagaaagcacctggcacagggaataaagcatttccccccttacgctggctacaacttgattttttttttttttttttttttttttttttttttgagacagagtctcgctctgtcgcccaggctggagtgcagtggcacaatctctgctcactgcaagctccgcctcccgggttcacgccattctcctgcctcagcctcctcagtagctgggactacaggcacccgccaccacggccagctaattttttgtatttttaatagagacggggtttcaccgtgttagccaggatggtctcgatctcctgaccccgtgatcctcccgcctcggcctcccagagtgctgggattacaggcgtgagccaccgcgcctggcctttttttttttttttttttttaaggagcaattgtcagatttgatggttgtgttggggttaaaactatgtagataaggtggtcaaaaccttttagaaataatcctcccacatctttcctgagggcttaggtttagaaagtttcttagccatcccaggatgtgggtgaaagtggcttcccccagactcatcaaatacacagagcaattgatctgagtgctggtggatgggagggaaggaaaggaggggcccaagaggcgcagctccacctgcccgagggagacgtcctgtgtaaactaacaagaagtcactggtgcttcggtttggttaaatactgatttagcaactgaaagggatgcaggagaaatatggcaatatcctctccagtaagaagtttactgtttttgttagggaggcaagactgatacaccccaaacggtatgggaataatgaattgatccaaatgtcagtggcctgcccttggtttagggccctttgcctatcttgaagcctccaggaatttctaccctcacaccggcctacctccctggcatatccagctcagactctttcctcttttcatttcttcttgctgaattcttgttcttcaaactgtattgcatccacatccaggaaggcaccctggcctgtttcagcctgtcagtccttcttttgtcgtctcaccttccaccagtattctcayataggccgtctaaatcacacctgcttatgctgatttagcccaacacctttgcaataattgtcactgtcaagtattaagcattgactgtggacccagcacctggcaaggcattttgtattttgtagtggaatcatattattttctccctgtagaactattgcctttctttccttccttccttccttccttccttccttcctkccttccttccttccttccttcctgccttcctgccttcctgacttcctttctttccttccttctcttttttttttttttcttttttgatggagtttcactcttgttgcccaagctggagtgcaatggtgcgatctcagctcactacaacctccgcctcccaggttcaagcaattctccagcctcagcctcctgagtagctggaattacaggcacctgccaccatgcttgcctaatttttgtatatttagtagagacgggttttgccatgttggccaggctggtctcaaaatcctggcctcaagtgatccacccaccttggcctcctaaaatgttgggattacaggcataagccactgcacccggcctatcgccctgatttcaatccctcatctgtcactccctcattctgggaaatgccccttcatcagtttcaaaaggaactaatcatagtctttccttgggatttaggggcagcccttctgggatggggaagctgagagatgcccttggtcatgtctgagcccaggaaagaagctggtgtgtaggagagaatgacttcatatccagagcaggcactcctgagaggcagaagaggtctgacagcctgccaatctcttttccacctccctggggtttccttatctgagccagtagacgctgctttcatgaggttattgtgttcctacaatgcacacagcctcacctcactaatcctcataacaaaatgaagtgggtgttrtcctttttttaaagctaagaggaagcagtttgattgctttttctgatgagaacatttatatccattaaaagcaaattcagaaatgtataatgaaaacaaatttcacccattatcctaccattcagagataacttctgattgtgtttatacacgtggatttataaaaggaggttatgcttttattcccaaaagaaaactgaggctcagagatgttaagtaactcctctagggtcaaaaccagtgcaaatcactaaaacgtgttgactgtctgttaaattcaatgtaattaagtgccacagggagttacaggcagtaggttttgtggatcaagaaggaaagaggccggcattgattggaattactgggagggttttctgaaggaggtggggcttgacagagtgatctaatatatatattatatgttatatatatatatatattttaaggcttgttttattttaatggctgatctatataatcacagaagccagtatgtacagacaaagtggaagtttttatttccttgtctcttcctccttggacaaggtcttgatgatttcctccttcttgacctggaggcactctttatggcgcttgcatgcttccttggtcttagacctctgggcctcaacctggttagccaggagcttcatgcragccttatctgccttcagcttgtggatgtgttccatgagaatcgcttgtttttgaacacgttccccttaaccttcaggtacaggctgtgatacatgaggtgatcaatcttcttagatatgcggtatcttctgagcagccagcacagaatcctcattctcctcatccacgtgaccttctctggcatccgggcattggttgtaccctttcgcttacctatgcccatgtgcctgcccttccggtaggccaaggtgttttcctggcatcgagcctgggaatggacagtcattggcttgcggatcatcagcccatctttgatcagcttccagatctgctgacaggagttggcattggagatttcattggtttcattggggtccaaccagaccttcttcttgccacaggggaggaccctagaggcaagcctcttctgaagcctgagcatactcatggctgtgaccatagcagtgaaaggtgagtgatctaatattgacttgattcctcccattaagtggcctctgagtgggcaaagccagtgaatggggacacctgagcactgcctgctgtcgggactgggcactgcctaagacaatgattacttttgagcttttctgaagtgaaaataagtcaatgtgaacatggcaaagagggacagaggaagagacttatggtatctagaaggaagttggcaggtaacagggtgccaggaaattaagacctaaagaaatagagtggaggagaaggagggtgggggcacaacagtggattgtggttttgcatttgaatcaggaggaggaaaaaaacacccatccttcctctccttttttttttttttttttttttgtctttaaacaggcactgtcactctcttttgggattacttatttatatgtttgtctctccctctgcactgtgagatctgggtgaggaggaatggtgtttaattttcatgcatatcttcagtgttcagcacattaagcctggcacaaatcaaagagacactcattaaatatttttcaaakcaaggatccactgacatgactttcaggcaggccctcccaagctgtctacaaccccctctgtggtctcatagggcacctatgcacatrttggcttttcatgggctgttccctcccacagaagcacctttcccccacccatcagctacagtccttctgtcttggctcagatgtcacatccctgactcaacaggtgagattagatttccactcacatgctctcctagcactttgtgttcttaaataaccttcattataatttgtcattgaatatttatttgtgtaatgactattttttgggatcttctctatcactgggttggatgctccttacagtagggtctggttctggatctcctgagcctgggccagttgaatggattctgcttttacttttactaagcattgttcttccttcctagaggccgagataactccagcttaccttggtgtgactatctaggaatttaaaaaygcgtcttcgaacaactgaaaatctccaggctatctcttccaacagttgaggaatccagccctgtaaaaagtcaatcaggctaaatgacacctgctgtgagttctgtttgcaggagagcaatgggcagctccagagctgggctgttttcccaacatggagtctgtgataactgggttttgctgctataaattagggtcaccctgctcttaattggcaaccaattcagattctcccttacaatcctcctctttctcctttttcgtgtggactgtgtttgagagaaggtgtggaaaatcctggcactgtgctacagggacggtgcacctgcaagctgggaatagaggtggtgaatgctggctgccggccctcagcacctttttctccctccctgttgctctgcccttccctgtcttttctcaggaattttgaaagaggtctcattactagggaaatatcccctggggagctcttcctctctcttctttctctcaatgagtagaggggaaagtgttctcagttttgaacctgcaagccatctggatgcaaagatggccagaaatgcccccttgtctctggatttcctacagcaactctgccttagcctcccagtaccatctgcttcaggctgggacatctttccttcatgcaggagaaaggggagcttaataaaatttygctggggttkcttggggcctgaggcagtagtggggaggagagaagcctgggctgttttatttcttgcacctgctatgagtcaggagtggtccttggtcagcaggcacatggaggcctgctgggtgccaggcattgggcaggtgttggggctacaggattatctgctaggacctcaaagtctggccttgtgggcagcgtgaaaacaatgatggtgacacagtgagagtctgggcacaggtcctggaaggtgtggagagggagcagccaatgcaggctcctgttagagtgctggagrcagaatcaggaaaggtgactcaggggagtcacctttttttcactggaaaaaaatatgtctgggaggcactaaaacaagagcccattatgtgttttaaaatgatattagtaataatgtaggggtttatttggacaaatgagttcacaaaattgtgytgcctgtaatgttgattcttgactgagggataaaactcacttcccaggcccctttctgtaagccagttcccaccatccccttgaacctcagctgctccaccagagtcaaagcaactcagaaggaggctgagaccccmatgcctcattgctaatcgatgggcatggtggatgggcatgagggtggggttcaggaccttacctagcatctgtcttcccagaatgttgctctgccctttctggggataagaggtcttagtttctttatctctataatgggaattataatccattccctgaagattatggaagattataggaggtaaaggctataaagtcaccttgtaaacctaaaatcctatctgagatcgaggatttagatggcaagtaccattttgtcttcatttcttggtgaagaaggatccatgaggcctcctttattcactcaacagatatttacgtggcaggcatcattcttgatactgagggtaaagctgtgaacaaaacaaagaccctggtcatggaggagtcaggaaatacagaaatatacatgacagcaggtaacaggaagggccaagaagaatgagcagggtaaagagcttgtaaaggaggtggggtgggtgctgtcgcatggggcagtctggcaggcctctaggtttaggggatttgagcagagagacctgtgtgaagggaaagggtgacccctgagactgtctgagggaggagcagtgagtgcagaggcattcaaagcaaatgccttgaaatgggagtgttatcagtttacagtacaaccagcaattgcttctactaccactggtaatatttatagagtctatactgtgtgccaggcagtattcaggtgccgcgacaaccctattcggtaggtcctatttttatccttcccccatgtcacagatgaggcattcttagaacaaaccaagcatccagataataygaagagggagcagttctcatttacatggggagtgtataagtcacagccctgcacagagggaacagtgtatggtttggaaagaaaaaaaatctcagtttgggcctggcctgctactcatctgctgctagggcaagatgtttcacctctctgggcttctgtttcctgatttataaaatgggctaataaaatctcagaggattattatgtatattaagtgagagatccaagtgaaagaatgtttcaaactgcagggcaccatgagaatatcactttattcttcttcttattacgccaattctcattccttgcctcttgcaaagagagagaatgagagaaaaatggaaacttgcaacttacttaacttccttggttctttccctgaaaacttattttctactaatgtctgtgggagtgaattaactagagtatccagttgaattaagtattttgctgaaagatgaagggactgtgagataaagttggtgccgaggattctcacatttctaaaggaatcacttgaggtgctaggactcccagtccactcttccacaataccagacaacctgtaatcctcagacccagaatcttatgacagctttctctgatttcacattgtgtagattagctacccaaaaaagtaagtggcctcaaatagtgctgccctttaaaattattctatgcatttgtcccagagtcttgtgggatgaatggctaaatcctactggattaggcgagatgggtattattatctggggctacagaatggaaaaactcaggtgaaggaagttatcccaaacttcataattgatggtgagcctggatactcattctcaaatctggtgaggcatcgttggcttctaccatgatggcgatggtaagctcatttgtcaatcaaatgatcgattggcagtagggtgatgacagttaataataatctattatatatttcaaaatagctagaagagaataattagaatgttcctagcataacattatggctatcccagttaccctgatttgatctttacgcattctatgaatgtaccaaaatatcacatgtgctctgaaaatatgtacatctattatgtgtcaataaaaaaagttaaccaaatgatcgatgaacacctactatgtgccaggcacagtgctgggtgctggcaatgcagtggtgaatgagacagggacctgggtgcttgctctagggaatgcccttaggagaagctcagggtatgtttttttatttggaatgcttgctgattcccctcccaggacctccagaaagaagtggtggttgcttcagcggtcacttggtgatgactggcaggtatatacctgtgtagctggcacatctggtgcctgtgatcagagccgagccatccagtctgagctttgtttttcccagtgcagcagtggtttcctgcagtaagctccatcttggttgtgctgccctccccgctggggttgggataacagcctcctggggactgtggctaatctcaggagaagcagagaccccagggaaagactcctgtctccgttgtgtgcacctaggattagatagaactgccgctaatgcagttaggtaaaggcaagggccctggttgctggggaaccaggaagcacagggtgagcttcccatctgctctcagtgaaggacgtcctcactgtcaccgcttcctagggccaaaggggcctctgacaaagctaatgtgaccaaagtcaaaatatgggctccgagagtcagccaaacccattcaactaactgtgatcttaggcaaacctcaaagcttcggtttccccatctgtaaaaattggggtactaatcatatctacctcattaccttttggtgagggcaaaaatcagacaatgctgacggtcactggcatgtcctgagtgtgcatggtgagtcgtccatcaacaagagctcagatgaccatgttccaggtgaggaacccgaggcccaccctggccttgatcagaaataaccaccctgaattcctcagtgcctgagtctggcatcgaaactggcttccccggcctccagcactaggccacgaaggaaccagcttctttctctcactggtggtggcctgctgtgccctgctggctgggtccagagagacagaatgaggaggagctcaggacctgttatcagaggccagagggcggctctccagctagactgctagcaggaccgcagtgatggaatcacctgaaggtcttcttcaatttcctcatctgtaaaatgcagtggcttgactgccccttccagccctaaatttgttttaggaagcccactggaggaagcagcgagcaagaagggagcagcggagggaacatatcaatatgatgtaagaataatagctcccattttgtaagtcctgactgtatgcccgggactgtgctgggatacacagggtccagaacattatccattttctaggggctcacgcactcatgaaactggtgatagtggtggggtgcagtcgtttggggtgggtggagagacataataaccggaggaattagaatttgttttggtacatgccttaagagagatctgcacagtgacttgtggaccccagacgaggctgcctgtgtgtgcagagcctcgaatgccatgcagtgaagggaggttggaaccctgcatccagggaagcggactttgtggttgggagggcaggttcaggaaggttctggtgggagggttggcagccaggctggtgctccagagggctgatggattacattcttcgagttagaaatcatcagaagccccgctgagagggctcttgtggctttggagctatgccggaggttccctcttgcaaggggaaaaattggctgtgcctttaagtgttatcctcctgtcctcttggtttcctagtgtggcaagattcaaatccaaagtatttgcattgaatttgttaatttcaaccagtggtagaatagaataagaagtctaaacagccattttttcttcccttggagggtatgttttctgaccttttaaggaaaatcctgtcgaaaccttgaaaacttgtgactctaggtgctggatctgacactgggtcagggacatattgtggacctgccgtgtgcttgggcctgagctgagcaagctcatggagtaagctctcttgaactcttaagatcgtgaaaatacagttccaagccacagaagccctttggagtgattctgaatggtgggagggcagagaggctttgaatgctgtttgaacacttagactgctaagtactactcttcaaacacttcacgtgccttagatggtctagtgcaaaggatatgcaggaacataaaatatcttgccgctactggaatagccttatcttctgcctcaatattgatttagaacaatagcttgttttgaactttctccccataaattaaattttaatttagaaaatgccattaggggaaacttagtatgtaagtacagaaggttttggagatgggggtggctgctcagaagggagtctttagagatgacaaaggtaaaagcattactctaatcagaacatttcattaaaacccccatcagactaatctgtcgacacatagtattttgagtatcttttgttggcaacattctgtgctggaaactgggagagagagagtttagctcttgtcctgtatgtatgtgcatatttatatgtgtgtagtattgtcttatatgggaaaggacgatgggatttttttttttcagaaacatttttcccttctacaaaggatgacatcagggcatagcagaaagagctctggactgaaagtcaataaacttgagtttatctcctagccctacctctaactagctgtgtggccccacacaaaacacttgccttctctgatcctcaggttctcatctgcaaagcaataaggttggaccaagccctgtgtagtggcagtgtcaacatcacctgggagcttgttagaaatgcagagtctcaggctcctctccagaactactggatcagaagctgcattttaacatgatcccagktgatttatatgcaaattaaagaaccatggctttaaagaaccattcctgctctagtaatgtattattttgtgtttttttccaaatgcatattaaaatatagttaygaagaatttatccaagactgcatcaaacattctacataaaatgggtrtatcatctcttaccctttaaaagtttgtactttgtgagaaaaaaggtttaaaggcagaaacaggcacaagcagtcgtacattcagttccagtgctagatatacatatttcttccttttgcctcctttgtgttttgggccttgacagtgtggtaagggcagcggtggagagaggagaggaggagttgcagagtcgaggtgactgaaggtggaaatggcaatgcaccgagccctgagctggcaggtggtccagagagcagcgggccccagcccagctcctcagtatcattgyaagggttttgagaatccaacatcatcggtgatgagaaaaatgtttcacatttttcaagcatatatgaaagtgctttgatgaattgaataacaattcatagtgattttttgatgttctatattttttctaattaattgattctaratgttaaacctattagatgggaagaggactctagttcatttttgcattaaaagggktctttcttacttgaagctggtgggaactattggaagagggcgtaataattaataatgatgacaataactaacacatgccgagaactttctaggtgccaggcactgtgccttgcaaaaaaggactttgggcatctgttaattaatttatggataaggaaaccaaggctcagagtggtgaagtgacttgctcccagtcatcctatgagtaattggtggatccaggctagaaacccagtgtcctggctgtggggccagctttttttctgctgtgcccgattttgtggtttgtctctctggtgctctggagtagcatgtgtgggaaggctgaacggagagtcatgaattttcccgagttcctcctctgggaatcacagactatcagagtccggaggactttcaaaagcatgcaggccacaaactccatttacaggtgaacacatccagcccagcaagggaagggaacttgcycaaggtcaaacaattagtagggtttatttgttctggtcttcctctacctgaaattcagctctatttgaacaagtgaaacaagcccttctatgaaagcaaatgaacacggttttgaatattgtatctcaggttgctgtgagggctatatatatctttaaaaaggattcagcatagccactggtagttgataaacactcaaatgatgtttgttatggttatcatttttactaagcttcacatattaaatttagggacacctttgttgttgttgttttaaagcaggactgattgtagtcttgtctttttttttttttttccatgttctctatcttcaggataacctttgagaggacagacgaccaaattccttttcactaaatactgcaccacataatcattggaagccatatactggcaagggagaaagttgcccttttgagaggctgcattcttcatcttatgagcccatgccatgccagccagctctcattgagctgagaagctatctttttggcagtaggtctcctgatcatgaagatttgaatggaacagacattttctgagactcagtcaggcatttttccactctgcatacaattgttaccaatctagagaagtaggaactggtttagaatcagagccagcttcataggtatgcaacctgtgcaactgcgcagaccatccacattggagccccctggttgatttgacgctctgcagggaaattggaattcttgatattattttcaataagasgccccacttttttattttgcactgggcccatcaacttaagtaggtactcttggttagaataatctagaacaggaccaagagcctgtgaggaacaagtcagtgggggttgcagtttttgggggaggaggaggaggccacagacctgactccttgtgatgggtcctagtattatacatgggcttgagccaggcagcatgcagtccgctgccatagagaggaggtaagcagggtggtttgttgtcttgtccacccatcactttgccttgtaagtatagacaagwcactaactgctctgcatgtctcctttgtatccccagccctgatcacacatagtacccagcacatagtaatcacttaacacattgtggctatttactttattgctgctctaaagtagtccagagatgaaccattattccaggggctttacatgtattatctctagtttttctgacagcctttcaaggtagacatgatcgtcccttctttacagatgaggcaactgagactcagaaacgttaagcaaaagtatctctggttcatctctggactactttgaaaaaatagatgaagtgttgtgtgagatgcattataaactttcctatttttggtgtcagcaccatactttatatcttggctattcaggggcttaacgtcaatttccctgctagtaacctctttcttttattgattcaacagctggattaacttccccagcatcatcatttattagccacgtaatcttaaatacttttgcttaatgtttctgagtctcatttgcctcatctgtaaagaagrgatgatcatgtctaccttaaaaggctgctaggaaaactagagataatacatgtaaagcccctggaataatagtgactggcacgtagtaggtgttcaagtcacttttcttattataaagttgacatacaaacagctttcatttcccttcctcaaaaatatcttcaatggctccccattgccatggccatggtggatcaaagctcatcatgatctagccatagcctacattgtctgacttctctcaccagtgtttaaaaacttctccaatgctagctgtgtcttgttccccaggccactggaacctccttggcgacagaattccatgttatcacttgagtgcctaggagcatgcctgtcatagtgtctgtatggctggttgctaatcacagtgtatttcaggaatattgtgcaattctgcttttttcccatttgtttatagctcttagttccttcaaattggaaatggattatggttttgcatttgactcaggaagaggaaaaaaaacacccatttttcctctcctgtttttttttttgtttttaaacagctagtgtcactcttttgggattatttgtttatatgtttgtctctgtctctggactgtgaggtctgggtgaggaggaatggtgtttaattctcatgtatatcttcagtgttcagcacattgagcctggcacaaatcaaagagacactcattaaatatttgtcaaactgatgaatattggaaagctcaagtttttatggcagaygagggagacagtgggagctgcctttttattggaaaaacattgtttattagatctgtatggatcatttagaaaatatgcagttggttatcttttatggtcaaagaagaaaatcagtataaaatgcttaattaaaagcaggagctaacatttcccctagtaacgaaggcaggcttgtgaatattttcctttccttagctcaggagatgggcaggcagccaggctcaaagatggggatgcttcatagacagatgagaaggtttgacttaggaggactgagtcccagggttaccctgggtccatttttgctttaatgtttctccgcatggatgttgaaaatgtgaatgaagagtgttaattccttaagatattctgatgacaatgtcaacccctttaaggtgattttgctgttacctataaaattatcacttgtttgtgaattgattataatggcatattttcaggagtatgttttgtacttttaatttgagattaaaagccctaagaagtgtgggtctttttcttattcttcttggtgctcctgtgcctgacacagagcaggcccttaaaagatgtgatacctggagttcttattcacttggcctcagcagagttggccctttcctgggtgtaggaaactgctgaggactaggagctggggaggcagaaaaggcaatgatgttctgaatgtttctgccactggaaggaaatcaggccctctgagacagacaatgattggatgtgctgcaggacaggaggtctgagtactggcagcatccacattacctgggagcttgctggaaatgcagaatctcagatgtgctccagacttactgaatcagacactgcagttcatcaagatcctcaggtaattcatctgcacattaacatctgagatgtgctgctctgatgagaaaaatctgggaacttcctcaaccttgagactcgatagtctggattttygtaattctaggatgtagcatggtgaagtttgactgaccttgaatcccagagctgccactgtggggatattaattaacctttttaatctcagatgtttttcatctataaaaagtatatgttgggtattttgctaggttttttttttttggtgaggattaaatgaaataatataatgctcttggcatatagtaggaacttaataaatattacttattgctgattttgttattttatctgagccctggtgtagatggtttawttatttattatgataggagaaaattgctgtattattatgattacaatgttgtaattttgyattagttttatgtcatttatatgatttaatgagtattcttaaagaattaaaaagcatttgcatgcttttgacctcttgttttaacctgtttttgaatcttctactcataacatggacktattatgtggctgtatttatgggtatcatgtttttggtcttttttttgagacagagtctcgctctgtcacccaggctggagagcagtggcatgatctcggcttactgcaacttctgtctcctgggtttaaacaattctcctgcctcagcctcctgagtagcttggattacaggcacccaccaccacacctggataatttttgtatttttagtaaagacggggtttcaccatgttggccaggctggtcttgaactcctgaccccaagtgatccgcccgcctcagcctcccaaagtgttgggattacagatgtgagccactgtgcctggccgggtatcatgtattttttaaacaccactgaatcacttatatttcattttggagatttcttcctcccatttattctgataataatgattaagtagcctttttatccagcactcattagacagttaatgaaaaaggttagttaaaatagggagtgaggaaatagtgaagaaatgaaattaactattttatctcactttaactgcctagctgtacattcatttaatcatgtagcttttcctttgagctgggtctgatgtttggagggtgctgtcttctttcacaaccacacctaacctgtaatacattttctgtggtatccagctttgttttctctaaagtggrtagaagctgaaagacacaagtaaagcactgtaaatggggaattcttttagatacgtataatgcccccccatgtgtttatccttgtcttagagttaacacagtggtaattatttggttgggggaggggaggaggttatttttatttcactttccaaagaattgggcttaattttcacagaagcaacaactcgtcttatactcttgttttattaatttaaattctgtaaagtacacaatttccaaaaaattatatagctgaaactgtataacaagctttgggatcaaaccctactgaatcttgtcagaatagaactcaagaggtgggaatagtgcatggcttgtccaggagcatccacggagcatccttggacactaggtggggtgctctatagagggaatggagagccctgcccgatctagtgagttagttatgtggaggttggttaaaaaaacttctatatttgtttatttgcatgctactttacagttcttgaagtactttcaaattgattttctcatttaatttttacaatgctcatgaaataagcaaggcaagaatttagaggtgggaaaatggaggttcatagaagttgaattgtgtgactatgaataagtaatttccttgaaggtgcgttggaagcagagttcagatttttcagtcttaagccagatctctaccctctcttctcgattgcctcttttcttgctgttttgaaagcagtgatgasactttgattttatttagatatttataattttcttatagcattatgttaccatcatagggcatatcagtaatagtaacatactacatatgtcaatgttagacatttaatcacctctagcaacctacaagcaaataaagagacaaaactcctctggacsagcactgtccaataaaattataatttgagccacatatgtagtttgaaattttcctttgggcacattacaaaacaaaaaagaaacaaataaaattaattgtatattttctttaacccagtaaatccaaaatatcatcatttcaacatgcaatctttataaaaattcttcttgtgatattttgcactcttctttttgtactaagtctttcaaatcaggtgtgtaaattgctttacagcacagcttatctcagactagccatatttcaggtgctcacttgccacatatgttgaacaacacacctctgaactttaagaagaatattgtaacaaatgcaggcatgtgaacacttggagatacaagcctctaatactttggggccatttaatttcgagacaaatagttttacagatttcggtggctcctaataatgactccaaatcattaaaaataagattaaattatctacattgtatttaagagggccgagtatggtatgaaatatgtatttagaaaactctccatcaaatttttttttttttttgagatggactctcgctctgtcgcccaggctggagtgcagtggcgcaatatcggctcactgcaacctctgcctgctgggttcaagcaattctcctgcctcagtctcctgagtagctgggactacaaggcgtgtgccaccatgcccgcctaattyttaatatttttagtagagatggggtttcaccatgctggcgaggctggtcttaaactcctgacctcgtgatctacccgccttggcctcccaaaatgtggggattacaggcgtgagccaccgcgcccggcccaaaaatatttttaaaaaaggtttgacatataacccagccattgtactcctggacatttgtcccagagaaatgaaaacttatgtccacataaaagcctttacaggattgttcatggcagccttgcttgtaatagccaaaatctagaaacaaaccaaatgcccttcagtgggtgaatggttaaacaaactgtgctacatccataccgtggaatactacttcacaataaaaataaatgaactgtcgatgcactcaacaacttggatgggtccaaagggaattgtgctgagtgaacaaagactcagcaaaactcagtgaaaataatgttttactgggtaaaaaattatgagacattaaaaaaagtacccttttgagattatgctgagtaatctctaaaggttatatttatagaacattcccaaaataacaaaattgaagaaatagagaacagattaatggttgccagggttagggactcaggaggggggcgtcctgggagggggatggctgtggctgtgaaggaggatcatgaggcaactctgtggtggtggaacagtcctgtattgtaattgtaatggtggttacatgaacctatatgtgataaaattgcacagaacgcacacactcacacacaaacacacatgagtgcatgtcaaactggtccaatctgagtaaggcctatggatgtaccaatgctgatttcctgatttttctattgtattagtgttatagaagatgttaccagagggcaaaactggatgacgggtatgtgagacctctctgtgctatttttgtaacttcctctcaatctatacttatttcaaattaaataaaagcctggtgcttgaatagatgttctattatttgtaaagcctccttcctagaactctacagtgaagaaccccagtgaagatgtatgaatgaggatgagcgtggacatctgttcagggacccttttaattttattttatttttaccgttctttatttatttttaattatactttaagttctgggatacaagtgcagaacgtgtaggtttgttacataggtatacatgtgcagggctgctttttctacaagcttggggctgggcttatctcagtgcagaggggaatggttgtggcctagctgcaatctctcccctaaataagaagggaccccattcttgttccagtttcttgttaaggtcactgcagcagaggatgccatctctaggctcctgaatcagaatgtcccctgaggtgccattgggctgtttgaccccaccttgggaatgctagagcctgagatcttgtcacttgctcttcacattttcatattaatgtgtcactggctttcagcagttgcctctcagtaatgcatttagtccctggtgagtatttcatagccagatgaactttaatccctgaatgcgctgaaagggagggttccttttcctcttttgaagattctgctcccctgtaagaaaagtgcatgatttaattagtggatgaaagaaaagggcccaaatggagccaaaaaagagtcagcagcattgccacccacctgcagacacacaataggataaaagcagcacctgatcagggaggggaaggaacsaggagggagagggacaggcttggccgtgggtgtagcccggagttgggaagcccgtggcccaggatcaggtcagccactggctcagtgtgaccttggagctcagcctctgtgggatttgttttctcatccttttaaaatggagatggtagtatagatccttcctacctccagaaacatgtagacagcagaaagaagatgggggcaaatctatgaaagtataaaatgcactataaaaaagtataatgcagtttataaatgattgctcctaatgcatcaactggagtgaaactagccagagtgtaagagaggaaagaggggaagatgcagaactctgttcttgtatcttttttaaaaagcacaaaaaggtgatgtcttggtaaagagtagaagtttgacatgttttgtcgtgataagaatagaattactgtggtgactgtccatttatccacttgggatccgagcattccaaagtataagatgcttcattacaggccgggtacagtggctcatgcctgtaagcccagccactttggaaggtggaagcaggaggatcttttaaggacaggagttcatgaccagcctgggcaacatagcaagatcctgtctctataaaatatatttaaaaaattagcctggtgcagtggaatgcacctgtagtcccaaatactaggaaggctgaggtgggaagactgcttgagcccaggagttcaaggctgcagcccaatatgattgcatgactgcactcaaggctgggcaacaaagcgagacrctgtctcaaaaaataaataaaaatgctccttggctgtataagacatattttattgcccttttggagatttataatgagcacattaaagttttggaaaaatcctgcaacaaagaaatccrttttactttgtttagttcagtaactccttagtttattatccatggacccctctcctgtgccctgtgacttcctcctaacttgttacatagcctggtcaagtgcgctggaacaagggtactgctctgcagaattctgaactgagttcctggggttttgttgttagcttgtttgtgactgtcagactatttttttttttttttttttgagatggagtctcgctctgtcgcccaggctggagtgcagtggcacaatcccagcccactgcaagctccacctcccaggttcacgccactctcctgccacagcctcctgagtagctgggactacaggtgcccgccaccacgccctgctaattgtttgtatttttagtagagacggagtttcactgcgttagccaggatggtctcgatctcctgaccttgtgatccgcccrcccyggcctcccaaagtgctgggattacaggcgtgagccaccgcgcctggcccagactatttaatttttgtaaataatttagtgttttgtttttgtttttgttttggcctcaaggaaactcaaggaaaatttgtacctcatggttagtttccattttagaatactgtgacctttgtatctttgtattgtttttcaagttttctttccttgtcttgacagattcacaggccctgacttaaaaattcttgttactgtattgcttgttgtatcataagccatttcagaatctgcctggattgagatgggctatgaatataattaagaaacaaaaacaaactaataaaattacaataacaactcttttttgagggcctgtcatttttcaggcatggtactgggttctttgcataaatgatttcttccttaatgtgatcaaggtgttcctcagttttgtcctaggaggttttagatctcacggttctaatttagtttctcagagtcttacaactgggagggacttttgagagcatctgaccctaagaaataacctccagggagatgaaagtctaaaccagccaggacagatggtcttctgagactctccatggcaacctgcagctaatctctgcccttctgccacttctgggaaaattgctttacggaaatgctgttttaactgggagcatgaaatcactaatgatgggcaaggtgggggtggctggtttgtgtttgggaaattaaggttcagtgcctgtctctctggggggagcagctgctgtgagccaggattacctaggacagtttctgtctgatgagagaaggggacaatgccttcctccactcaggtgggtgaaggaggactctcacatgtgctgagtttgtgctagcatcagtcttttcattgccctgccttcacataccccagcatctcatctaagatgtgtcctgctgacatgagccaagtaatgtcattcttcctcatccagagccatttctggctgtcccaggctttagagcgatttccctcacttggcataggtctttgcaatattttgttatatcatctttccatgtgtaagccccatcttgtctccttgtgtagactgggcactcctgaaggcagggatgatgccctacgcatggttgtttctcaagttactgttcagtaccaggtgcatattggtcctggggtggggatatttattgttgctgctggttggcatcagtatttggtaaatagagtggagggatctgtgctggtctctggagatacaaagatgcgtggacacttttcagttcatagtaataactgagtttcttgaggggagggactgaaatttattcatgtctctccarcactgtacctggcatattgaactgtggcagaggctgctacttgttcttcccaatattattattattagtggtagttgtagtaatagtattaatagtagttttccctctccttctctctttcttcctcttcctccaactcctactctccttctctttcttcctcttcttcctcctcctccaatagtaataggaactttacctgggcacgtttgccagctttccttgcagctgaatatggtcatgtgaggttctggtgaaagagacataaacagaggtgataattgtaacttccaacttgtgctttaaaaggaaagcagtgggccatctcctttttctccttctgttgggctggagcacagctctatctttgaccatatgaataaaggtcacacttttgggatggcagagcaacaaagtggaaggagcctgggtcctcatccttgctgagctgttgccatgaccctagactgaataactgaactgtttttatttgtaaagtaacatttacatgagagacaaatatacttctatcttgtttaaacttttctacctttgggtacaaaaggcacttattatagctgcctagtctgtattctgatcaattcaggaggtattgataaatgtctgttaaatggatgaatgaatttctgccttcccttattattgagcagctttaatagtggtcagcgcatacatttaaattgagaaaggaggtttcccaggtgactttcaccgtatttcattggccagaaatgtgtcatgtgkgtctctctggctgcaaggaggctgtggatgtgagttttattttccagtcactgtagatgaagaaggcagaaaaggggtaggaaaaaggaggaatgagtgaaccaatctatagtacctatcagcagtcacatataagaaaattagttttcatttatgtttttttttttttaaagaatataagccacctaatttgagtattgccaagaagagatgtacttcttatcctagttgaaccagattttgggaagacaagatgttttcaaaagagtagataattatcagcgtggaccttggggctagatgtagtcatcttgtcacacaacttgattcatggccatttggaactgtctacaatgggatggatgttgatgctgaggccacctggtgcttcagtgtcttaaatgctttctttggggccacagccaattccaggcaaggcatggcaatcccatagtttgtaggtgatatggaaaaggtagtgtcagggcagtcagaaaccctcagcaaatacttaagtacttctgtgcaccagcaatgctaggtaccagggaatcccataaatgatctctctgccatcaagagggagatgaagagataaactgatgagtcccccacagggtaatgaatgccatatagaatgtctgtgaagagtattgggaacaaagcgggagaacaagacagaaagtttccctggaagagcaataggaggtacctggagcctctatatttaatttctaaagagattctaaaacagtgggtctgaaatatatagtctgcttccaaattgggtttaaattagcatcttgtgtatcatatatacattgtacttgttactctggggaatggagagtttcaaagaagtctagagttgaagcattgtccttttctctgtctaggggagacgcttaagcaaacgtgaatgtacttccaatgtggcatctaagcagagagaccatggaaaggccaagttttaagaattgagtgtttctcctttcgattaaagaaagaaagttgctcatgaatatatgtcacttcaggcaaggggcatgggatcctgaaaatatctgtgtcagaaaatctttgcaaacaaaaatcctcttccacacctttccaaagtcaagaatacgttggacatttaacattttaggttttggattttcttaaagcaaggcacacaagaagatcaaagaaggtgcattgacatgttggcaaagaagaagcatgaaattcaattctgtggaactcattttaccagagaaatttcataaaacaaagtaaacttatcagtggtttaagttgccaacccttggattccaatgcaacaagcaggatggatgcaggcagcttgcccaggttcaatggagtttaaaggccaggtgtttgtgtaggggaaggaaaaacattgtcctgctcaggaaaaatgtattcaaataagaaacgagaaacccattttgagaatttagtgcatatgttcattttacaggtgtgttgggaaattatcggcaaatgaatggatttggtcacaaagcctttgggttgatttgggggaggaatgttgcttcttgggaaacagccagaggaggcaaaagatatttttgggaacattctaaggcattctctttcctcttttttgttgatggcttccaagttgtctagccctgaatctcttatgtgcattggggaattacatagcggtagaaggcacgcatcatttctttacttaactatgtgtccagaaccaktgttgagttctggagatgkacagacacacttcagcctttaatgaactgctaggcaggagggggaaacacacatgtaatctaaataatgtaatgtaatgccataagtggtgtaaaggcttgtggttttggagaagaggaacagatyaactgtccagaggacattagagaagccttcacagaaaagattatatttgagctggatactgaaggatcttgaaggtgattgccaggaagaagggaggaaagggcagaccagatggaggtatccacgtatgcaaaggcatggaggtgtgaaacatgatgcctctaggggatgtctcatttagctggaacacgggttttgggaggcccatggaggctattttgggaaataatactggattgcaaatggcctgatatgcttgctagtctacaaatctaaacttaatcttttaagaagtaaataacttctctgtaggaaagtaactacaaacggtaaagaaagacatgcttgtcaaaaaggccagaactcctgaatgtggaccccaggaactcacatgtactatctggtctcccccaggttctgcaaggacatcaaagacctgaattttgcctagaaactgaccctaagagagacaggaagtagtgagaggatacagacccaaccgactgtagaaaactgtgggattgaggttaatatataatttgctttaacttgggtgaatgtggaataaggagagtggcaaaatgttaagttcatactcatctgtttataattgtgtgctctgagcaccctttcctttaaagtgggctgcacacacagagaaagaaacatttttcacacagtttggaccagtgcctgaaaagctcagactcggagcgtccaggagctgagatgcctgtgctggacagcccctgattggagaggagttaatgatcagtgcccctaaaattgtcrcataggcagctgattatgagaaattggtccagctgtttaggttacttttgagatcaaaattttgtgttttgtcaggggagtgagttgtcacaaaccccatgtggccaaggagagactactagcctgcccttgtgccaaaatgttgcaagcttctgtgggcagctgattttagtagaccttatagggaaacccctcactccatcttttttttcccctccttcctacactgagatgtagcaggaaggaccctggcctttgggactggaggtgtggttagctggaagtaagtaaggttctgctagttccctggtgaacatagaatggtacttctttctgtctcctcatctgtgaggtaaaaacattcagagactcagtgtttcttatgacattgataagctaaggttccactcccctttctggcctgttttgagttttccctgtatactcagtgagtgcatatgatttagaaaggtctgggtggctcaggcagtgggtgtgagaagagctgcctcactttgggctctatgtccttaggtccaggttgggatcaagtccaataagctaaagaaggctttcgggaaataaaaccagaggtgttttttttttttttttttgagacagagtctcgccctgtctcccaggctgcagtgcaatggtgtgatctcagctcactgcaaccgccacctcccgggttcaagcaattctcctgcctcagcctctccagtagttgggattataggtgtgtgccgccacgcctggctaattttttgtatctttagtagagacaggatttcaccacgttggccaggctggtctcgaactcctgacctagtgatctgtccgcctcagcttcccaaagtgctggagttcgctaaccaaggcctgcaggccaaatttggcctgaggcctgtttttataaataaagttttgttggaacacattcacccacatgcatttacatatcatctgtgaytgcttccatgctaccatgtcagagttgagtggttgtaacagagaccatgtgggctgcaaaggtgaaaatatttactagctagccctttacagaagaattttgctaactaacctgtcctagatcataaactctaggagggctggggacattgaaggtaktcagtaagttttgactgaatgaatgaatgaatgaatggatgaatgaatgaatggtcaggaaattggaatttgttggatatgtaatttgacagcagacttttaatgacacacttcaggttccattttccctttaaataaaataagaacagtgctacctatgaaacaggcagtacttaggaggattatttcccataatataactttgggtgtttaaaatgctattaaaaatataactaccatctatgaagctttgtatgtgttgagcactttattaagagctttatttttattacctcttttagtcctcaccgccacccactgtgagggaggaattattgatcctagtttatagatgacagagctgagtccagagaggctgagttacttgctgaggtcacagagctggtaaggcattgagcacagggtccaactccagggtgtctggttctaaaggcttcccatcatgccccattgcttctgagtgctgttaggtgcttcccaccacttttttaaataaaagagacagatatcaattttggagaggggtcttcaagatagaaacaaatggcaaaaaaaaaaaaagttggttatcaaatcttttaaaccatttatgtgatttagaaaactgtgaagttactcatcattagaagtgcactttaaaaaattctcttccttaaggttcagctcagtgtgcttcatggaaaaaactaaatgggggagcatgttttctttgggaaaaacaaaataggtaagttttagggatttgtagaattttcatttgtttagcaatggtgtacgtagtggtaatacacattcaaatgctgccttctcccagaaaccttctgccaattccgcacatcacttggaactgggtacctagcacatagcagacattcaataaatattgattgaatgaatgaattagtaccttctagcatttcacacatattgccttccagtatacttggttttatgtgaatgtgtgcccttacctattatagcataagcactagaagagcactggtaccctgcccacttctttgtaccccttatggtacctacctagcacagggctggaactgagtagatgctcaatgaacatttgtggaattatgctgtggcccccaaattattttgtggcccctaaagctttgcagctgagtgaatggcccattgaaaactagcacgatgatcagatggacttctctctgtctaagggcattgattgagacccacatttatattgagggtggaaatgtccaacaaagacaaagaaaagcatatttattgctttagatagaagtcatatttgtttctttcactctggaagatatagtcacataaggtcatgagctattttttcttcctacttaattgctagtctgtgggttggtgaaagctcacatgcttagcttttcagtgaaactttcacagtccatgtggctctgactcagaattttttcccctatctgcttcttctgttgccaattcattgtttatctcctttgtgttttacatctgacctattattttgcatgctgttttggattactgaggtagcaacatccaaatagtttctgtgtacattttagcttttgggagtcaggcagctgctctggggcctgtttgagtcaggtcagggtcagaaatgcccttctgcttttgtttccgtggaagaagttggcctggaactctctctgggcaccttctgcgccctctggcaaccagaaaagcaaagtcgttcatcaaaatctcagactggagcaactccttaaaacagcttccacagttcttgcacatactcctttcttgatttgttgcatatcatttcaggcacctcttttaatgcagctattcaggctgcctaaggcagtggtccccaacctttttagcaccagggaccagttttgtggaagatagttcttccaccgatggggtgggggtggtggtttggagatgattcaagcacattacatttattgtgcactttatttctgttattattatattgtaatatataatgaaataattatataactcacaataatgtagaatcagtgggagccctgagcttgttttcctgcaactagatggtcccatctgggggtgatgggagacagtgccagatcatcaggcattagactctcataaggagcacgcaacttagatacctcgcatatgcagttcacaacagggttcgctcctatgagaatctaatgccaccactgatctgacaggaggtggagctcaggcggtaatgcaagtgagggggagcagctgtaaatacagatgaagcttcgctcacttgcccacagctctcctcctgctgtgcagccaggttcctaacaggccatggaccagtaggagaccctggcctaagggaccaggacagtggccagtgcttttcatagcctcttagtacttctggtggagtgtctctattcccctcaattccctcctattccgctaggagtttgaatctgctttgcccagttctgtcctgccagcctttttcctttcactgaattgccttcactttttgcctattagctttgatctctttggaaaaaagggcactggggtattattactgcctctgtttgtttttgcaartgcactatgatttgtggttggtcttttggctagcctgaggctacctgaccctccctcaacagccctagttcccccaggtcattctatagttttgcccatttctttaattaatgttggtgagagtctccgagcaatgaagactttttggatatggagagaagcagaaccagagggataccagtaattatgctaatctgagagcattaagtcttcaaatatacatttttggataagcaattctgttgtttttgaagtttggttgtctttttgtttctgggtggtggactataattttgtattaaggaaagaatgcctgcccttatatatccaggactggattttttttttctttttcttttcttttcttttctttttcttttttttttttttttgagtactcatgaaaggaaaccataagaatgtttgggtctaataatatacttgcttgtgtatgaagataaaaccaataataacattaataccacccttcagtggtgaaatgctttaacctttcaaaacaactccttttatgaacttactctatcagttggcaaggtgatttcagggctatctcctgtggtgatgatggatctgtgggagcttttctaattgtgtgggtgaatttgagagaccccatcccagtggttcttgttcaggggtgagtatggaatcatgtggggaaccgccatgaattacacatacccaggtcctgcccaggacctactgacacagtcctggggtgggggacctrcccacttggaaaacttcctgggacttcctcagctggaccctctggggattggggaaatgcattgcagtcacctgcctggggtagtaggggctgccacatctgtgactaggacccaaggagagtgatgatgacccttcttggaatcatgcagaacacacagtgacagtcccttttggaagctggccacaggctgcactttattcattattttaacagcaaccaaacatttgctgtgtgcccactggtggccgytagacagtcttcccaccctttagctcatgtagtcatttaaaccagttccatcactagagaaatgtgttactagccccttgaaggagagtgggccttcaactggattcaggagttgtggtctgaggagagtgattgatatggtttggctctgtgtccccacccaaatctcatgtagtagctcccataactcccacgtgttgtgggagagacccagtgggagataattgaatcataggagcaggtctttcccatgctgttctcatgacagtgagtaagtctcatgaaacgtgatggttttaaaaatgggagtttccctgcacaagctctttctctctttgcctgctgccatccatgtaagatgtgacttgctcctctttgccttctgccataattgtgaggcctccccagccatttggcattgtaagtccattaaacctctttttcttcccagtctcgggtgtgtctttatcagcagcatgaaaatggactaatagagtgatttaatgagtttcaccagcatgggtttctttagcctcggtttctttgtctgcagtatatgggctaatggtacacaccttgaggttgttgagggagaagagacgggctcaagtgctgcctttgtcttaccaaccttgtgaagcctccttgagcagccatgtcttcatttgtaagatgagaataagagcacctgttttatgggctttttgtaaggattgcgtgtgctcatgtaagaaaaaccccttgcaccctgcatagtaccttgcagagcaaatggtggtgataatgacaatagaaggagctctctttattgagtgcttactgtgtgccaggcactgtgctgggcactggactacaacagaggggaaagataggcatcgttcctgacctcactgcgcttaacaaagagaaagctctaagaraaagttttcaaagcattacccttctctgtatatttaagaggaaagctttaatgttataggatgccttctaaatatgtattttataacacagtgggtagaatgtggaatgtgtcttctgggagggaactggagttttgcatttcctgcctgcttgtgcttttgaatttgtggctgtaatgctgccctgcctgaggtttcagcagttaatatttcccagggcagcatgatgtcaacgccccgtggtctcttatctacaagaagggtatagccggggcagagggagagaaaggactattttcaaagcctctcttgaagactttgttgagctttaacttaaaattttcctcatctccttcctcaaacgtttgtgcttgatgtgcataaaccatgccagtgttttggaagattcaagtttgaccaccataaattggttcatatttccagcagggcagttatttaatttcctgttggaagtctacaaaatgttggcactgtttgctctttggcagaagaccaaaactcagtacagtatcattagcatgctctggtacatagattaaagcacgattgtctttaataagaggccatccctgtttaggatggggctttgggggctgcaagggtgcagggaagcacaacgagctttctaatcaaaatcaaagtgcagttactgggactcactcgagaagggttaaagggagggcagaattccgatttcttgtctcaatttcatttgtttgggttattttgctctagactctgggagagttttggaggccagggctggctggtttgtgggataccctggtttaagcctcgtgcttcttctgcattcctccctcttggcagtacggctcatgggagaagcccacctctgaagcccatagagaaatgcagagtgtctctacggaacccactgtagtaactgaaatgttataatggtgggcatttacagaggctctgttatcagtgaggcactttacatatgcatrttcagcctttacagtamccctgtgagatacgtattattattgctgttttgaggatgagaatactgagatgcaaaaagattaaagtatctgtagccagtgagtatctgagctggggttagaacccagttctgttccttggaaagattcttactcttctcatataccctaataagggcctggggaaggaaaggatctgagttttcaaaaaagcttgaaaatttgcctaacatgaatcttgggaaattatttctaggggcttcttaccagattagctctgtttttctttcgcagaggcccttcagtgttggctctttggtagaatgagcatagaaatgtatttttttcctacaaatattgtatcatgaaaaatgtcagacagattgaaaagttgaacaccacctacattctactattgctgttttattctatttactttatcacttgtttctccatctaacctctaagatctatttatatttgttagaacatcttttctctctgcccttctgttcctttgattgatggcaatggcctgatgggaagtaattcacaaaaccagagggaaagtacagtgcttagaacaatcttttttttaggaaaaagagaaaattgttcttatgtttaggtagagcccaaaatgggcatttttcccctcccctaggtctgttgtttaaaggatctgacagaaataattataatgaggctgatggtgaatacataaggtataacctattattactgtcttctatgcaccaggcatgatgctgactgcttagtaaccttatctcattgatcatttcaacattcctaatttacagatgagcaaacagcctagagaggttgatttctgagctgggatttgagactggtgtgtagagactatggtgtgatttctctgcatttcaaattatgcttccctatatttttgttccagggtctcagtgggaggccctagaaggttactactaataaggaaaaattgctaaagccctggaaattgaaggctaccagaaccttgtaaagattctctgggactagacctcattcctctgaggatccttgtcagacagtttccagggggtggggagatgttctgctctccccagagtgtcatagaaagtttctgtggctttcggaatttctcatgactgattcacatcttcttctccagcttagaagaaaatccaaacacttacctttggtttatcagttggttaatgttgttttcttttcatggtaggatcatctatggcctccttagacctatacaagtgacatcttttcttcctggggaagaagatggtttctgcaggcactgacttatgagggcaggtgcataccttttgtaagggatgaaacttgaaaaagaatgggtgctttttgatgtgtttatgcttgaacctgcttccttgttgagtgtgatcttgagcaagtcacataagcttcttaaactcttggcatccctgcagcagttattattgtgagggagatggaaaaaaggtatggatagagttctttccattagaaaatgtaatattcctcaggagcccatgaagaggatgctgctgaaaactgaggacatggcatagataggaattgctagagaaaggcagtagagagaagaaaaatacctgttggttgaaatagttgattggaggaataaaaattgcctggaacttaaagtttccttcgaataccagcactgtccatcagtagctgtataaattagcctctttggtcattaagtttcatcataaagtgggattattaatacctacatcatagtcttattgtaaggataaagtttacataatgtatgtaaatctcctaacagtagttcatagtacttggcgataaaagatatctcttagaagtaggaaatggggaaactgaggtacaccttgaaacctgagtaggatttggatgcgtaaaatggtccagttctgaaagtattttacaaatatcaccatggaacactatgcaggcatcaagaagcatggttgaaacccaaaactcttctttcttttaataaggcaaaggtggttaactttttgagccaaaagttccaaattgttcagtaaaatgtcattgataagatatcaaaatatcagatatcattttggttgaagctcaagttggcaagaaccaagggtggaattgctaagctgggtgacacatttgaagccattgtaatgttttagtgatctccacagggcacgtcattggtggctctccctgtccccctgcaasccctgcaatctggctgcattttctacacacttgtttggttgtttcatgaaatctacccccctgtactgctgcaggccacaaagaacagtgttcagtaaggtggattttggaaactgaagttgtgattgcactgtagaaggctttcattgtttgttttgttttgcttttagtttatggaggactgttgggagattaggagaaggaaaatgccccagtagaactgaaatcctagtctagcacctgaaaagagtgaattttgccttcttttttttctctgctaccttgcagtcatttctgctatatgcagattcaggtttgatgtgaattttgagtttagctggaattagttctttcatggccttggggaagatgtggataaaagaatgaacatactaagggttgacagtaaaattcaaaggtcaggtaaggttctgtatgcatcctctgcctggagtggttgtgtagtgatagtgttaggactttataagtctttttctcacatcatccttataacaagccttagagataagtattgtttttattgctattgtgcagatggagaaacagatgaggaatggagaagttcaataacctgtgtgaggtggtacagctaggaagtggcagagatgggacttgaattcaaatctctgacatgtaagcccttccagcaattgtggtggaatatgctatctctgttacaggcttctcttgtaacaagctgtgcttgttaatgctctataaggagcctctgggagcaaggaaaagggaaagattttttgtgttcactttgcatccacacagccctttttattctcaagattatgctggggggaggaagcactagaactaccgtgaattaagtgttcacattgtacctagattaaagcaaggtgctctgcataattctcacatttaaccatgctgtccttatccttatttcattgatgagcttcagaaagtcaggttccttgaccccagtttcacccacagaggaagttctgatggtgaaatttgaacacagaatgagtccaccaccttgccttcctcttcggttttcaatgacttctccctgacagtcctgcgatggcatttgtggttttaatttcaaagacccttacaattgttgatggttgatagcatttggtatccattggaaactgccaacacttttcactgctgcatttggaagaaaatcatagtgagttgatgtgttagtgattcaggacttctgggaaactgagagcacccgtgtgtacttatttggagtcaatactttatgaacaactttggcccaaaaggagaaaaatctgtcttctgaaattgagtgcaggtctcttagtggcttacctcagcagggagccagttattacataagctgaataccaggtccgtgggtttccctaacctgaaaaagaagcagcgtttgcagttatgaggaaaacagaaagacccatttctctgtggcatgatactgaacaggcagcttcagccgtgaggatattttggccggaggaaaatgtagcttaagaaaagtcccagctggttcaagtracttaagcccagctattcatgaaatattatctgacagctcycccttctcctcaagtggctggggagtgagtcacaattgccccagaaacctgtgttctcatatgggattttggtattccaggtttgctctactttgcacactggacagcttcatgaaaagccatatttggtgcagacattttcttgtgatgataaaagcatttagtaaatgtactgggaagcttgccgtgatgaatccttttgttaagaaattaaccaacattaattttgaatgtaggactgtcccacgtgcccagcactgtgcttgctgatgtgggggttcagagattatgagayatgtgaaacactagaatggaatctccatgaaggcagcgatttgcctattttgttttctgatgaaactgtggtatatgtaacagtgtctggcacatagtggatgcgaaatagatatttgttgaacaagtgagtatgtctctgcccataacagcttacaacctagtttgcttgcattaattaatcaactaattattaattaatgaatgattttattcctttattctacttrtatgagcatccagaagtcctcaattttattaggatatctttaattctttttattatttaaaaaggtaaacatgtgatgtgtttgttgtagaaaatgagaaaagarcaaagatgtaaaaagaaaaataattgagacaataattattttaatttaagcttatatcattagaaactttttccatgtaaatacctgattttaaaaaatgagtttaattctcttgcaagttgattttataacttgctttcctcccacttatcagtgttattgtgaacagctttccatatcaaaatacactgttctcaaatcatcaatttttaatcacacaatttagcattgtgtgtgattgcatcatagttttcttaatccctattgttgaattgttgggcattactcctctctctgtttcattagtataaacaatgctatgattatctgttaatttttgtgcatatccatgattattttcttggcaataaccctttgaagtggaattattgagtcaaaggtaaaagtcttttgatctacacaatcattgtggctaccataaaggttacagaaatgtattyccctctctgtgttctgtggaaataaagtggtttttttgtttacacataactgatgccatgtattgtcatttaaaaaaaaaacaactttctgggttaaaaaagggaatattattgttatttaagttaatatacttttgattactggtgatgttaaaaatcttttaaaatattttttgtcatttgtatttcttcttttgcaagttactggtttatatccattttcttactcagagactcgaggacagatcttctttccttggtccctcccaatccatgatgggacttgctatggaatttgtccacagttagccccagtaaatgttgaatcctcccatccacccactcattcatctacccactcacccatccatccatcgatttatatgttgattcattcaatgagtatggaggacctaatagatacaaggtttataatttaagatagcgctttgaaagtttttttgatattgctgctaactacagacattactttttttttttttttttttttttgagatagggtctcactctgccatccaggctggattgcagtggtgctatcatagctcgttgtaacctcagacttctgggcccaagtgatcttcctgcctcagcttcctgagtatctgggactaggagtccgtgccaccacacccagctaattgttttattttttgtggagataagggggtcttgctatgttgcacaggctggtcctgaactcctggcttcaaggaattctctcacctcagcctcccaaagtgttggaattacaggcatgagcccccacacccagtcaaaatcttaaacttttttttttttttgagacgaagtctcgatctgtcgcccagggtgcaatcccggcttactgcaacctctgcctcccgggttcaagccattctcctgtctcagcctctctagtagctgagattacaggcatgagccaccactcctggttcatttttgtatttttagtagagatggggtttcaccatgttggccaggctggtcttgaactcctgacctcaggtgatccacccacctcggcctcccaaagtattggaattacaggcgtgagctaccgtgcccagccccaaatcttaccttttaagaaaagacatattaatatgaattaatacaatgagcaactaatccaaaaagttttttttctcctaatgagttttcctttgggtaatggaactgatcttgtcttttctgtgcacccagcagggttgggtagacagaaatcaacaaatgttttctgtaaaagtctggatagtaaagatttcaggctttgcaggccatatagactctgttgcaactattccactctgctctaaaagcaggaaagcagccatagataatttgtaaacaaatgagcatggctttgttccaatgaaaatttatatatagaaataaaatttaaatttcatacagctttcatttgtcacaaaatattatttgtctttttttttcccccagtcacttaaaaatttaaaaaccattcttaagtttgtaggccatacaaaaatagacagtgagctggatttggcctggggtttgcagtttgctgatccctggggtagggtctcagaagcatgctttgaggctttgaggagctaatctggttttgcaaatttgctacaaacaaccccacaatggatgattcataratgaataatagaattgagtttagctgaggcttggatatgtatcctacctcttaatgactggcaatacataattcttagtgtgttagcaatattttaagcttctaaaaatacttttattatatatttactcataaaaattttacagttatgagcaaagaaaaaacgctttcctatcctttgtcaatattttgatgtgtcttttttcagtcttcatgtatatatagggcttacgtatgtataatgtctttctttacaaacactgttgaatcctgctttatttctcttaataatatatggtaaatatttgtcagtgttgttgaatattcaaatataaactgaaaccacaataaaataccactacatacccacagaatggctatgattaaaaaaacaactaacaataccaagcattggtaaggatgtagagaaactgaaatcctcatccatttctggtaggaatctaaaatggtgcagccactttggacaacaatttggcagtttctttaaaaattaaacttagcatatgacccaggagctccagtcctaggtatttatccaaaagaaatgaaaacacatgcccacacaacgataggtatgcagatattcaaagcagcattatttataatagccaaaaattagaaacaacctaaatgttcatcaactggtgaatggataaacaaaatgtggtatatctatacaatagaatactatttagtaattaaaaggagcaaaataaagagaggctaccacatggataaacctcaaaaacattatgctaagtgaaagaagttaagcacaaaagaccacatattgtgtgattgcatgtacattacatttctagaaaaggcaaaaaactagagacagaaagcagatcagtgtttgcctcaggcaaggtgggaatggttagcgtcacttctaggagcagcagaacttttggggatgacggaaatgttttaaaagtcgaatgtggtgattgcacgactgtatatatttactaaaattattgaactgtacactaaatgggtgaatgttatgtgaattatacctaaatataactggtaaaaatattctttgaaagctgaatttttaatagtgtcatattattccatcatgtgaatgttttatttctttatcctggatgacttgggagaaatattcagtgtttatttccttttacgccaaaatccatattcagtaggttcaatttgagccattggacttaaacaagaatgattcagaggaatgaatcccaatccagttgtcaagaaacctagcgtggtctcaatcctgcctccagctgggtggayctcagttccctcatctataagatctaggacagaaataaatacaaggaaatactgggttccagggaatagaggattagaaatagaaaacatagtagtggcagtaatgaataagactgatttccctaaaagtaggaggccaggcactgattatttttatttttattttttagcttttaagttcaggggtacatgcacaggtttgttacctaggtaaacttgtgtcatgggggtttgttgtacagattatttcatcacctgggtattaagcctaggactcattagttatttttcccgatgctctccttcctcccaccctccaccttcctatatgcccyagtgtgttgttcccctctatgtgtttatgtgttcacatcatttagctcccacttacaagtgaggacatgttatatttggttttctattcctgagttagttggctaaggataatggcctccagctccatccatgtacttgcaaaggacatgatctcattcttttttagggctgcatagtattccatggtgtatacataccacattttctttatctagtctatcattgatgggtatttgtgttgattccatgtctttgctattgtggatagtgttgcaatgaatatatgcatgcctgtgtctttataatagaatgatttctattcctttgggtacatacccagtagtgggattgctggattgaatggtatttccatttttaggtctttgaggagtcaccacactgtgattcacaatggttgaactaatttacactcccaccaatggtacattgtggagaaaaaggaatgctttctccacaacctcacaatggtacattgtggagaaaaagcattcctttttctccacaacctcaccagcatcagttattttttgactttttagtaatagccattctgactggtgtgagatggtatctcactgtggttttgacttgcatttttctaatgatcagtgatgttgaactttttttcacacatttattggccacatgatagactggataaaaaaaatttggtacgtatacaccatggaacactgtgcagccataacaaggaatgagatcatgtcctttgcagggacatggatggtgctggaagccgttatcctttttttcataatggttgctggctgcatgtatgtcttttgagaagtgtctgttcatggcctttgtccactttttaatggggttgttgtttttttcttgtaaatttaagtttcttatagatgctggatattagacctttgctgggtgcatagtttgtgaaaattttctcccattctgtaggtagtctgtttactctgtcgtagtttcttttgctgcagagaagctctttagtttaattagaccccatttgtcaatttttgctttgttgcaattgcttttggtgcctttgtcatgaaacctttgcctacaggtgctgtttatttacacccctgtcccaacctcaccccactccctttcttttgctggtgggaagtcagtaagaactgtgggtggggttctgaggtaatcaatacaaagaagaaggtaagaaattggaggggactcaggggagatggcaatgctgacaaggggttggatggaatttgttctgtaaactggaagcattctgcttggcctcaacacttgccaaggcgttgatgacacacaatttggatgatttaatcaccaggaaactatctaggtttcttgttctgaagtatgagaggacagcctattaaaggaagaccgaggctggatattgccatgaaaatagtaagttttcacgtttggcttccgaggggagagctggtgccctactcactgcagggaaatttaaactgggtgaaactgaactggtttccaattgcttgtgttctccatttccagccaagttccaggttttcctagagtacagccaggagcatctgcacctagagaacacagaataaaattgtggaaaccaaacttgtaaatgtttttctcattagcttcaggctcccagccaccaataaactgtaggctttaaaaaatcctgtattattttgcaagttaagagaatgtgcatattccccttatttatatgttcaggattttcttaaaatgttacacatcaagcatttatctgctaagccaccccaaaaggtaacagcattctagtttttgtacaaaagagaaaaaaaattccacttaataaacttgcagtaacttgagcctgttggtggtcttggaggaaacccaaatccaggtttggttgatactgtgtaatgtgaatgcaattagtagcggtttttctaaagtagaaagagatgtagaaaaataatgcatagcaaatttaggtcagagctgggaagcttataaatccttatttttgttttcattactttaagtaatagggcttttgtctttattatgtaatttccctagcaataatatgttttaaaacatttttctgttaatttcatacatttgrtcagaaagccacagttcataaacccctgtgatgtggcagctgtcactgtttatatatagargatgacttcttgttcatccctgggaggccaacacaaaaattactgatgggggcaactttcactacctgttttttcatttagtagaaggtttgcaaagcagttttcagttgatcaacatcctcctgataggctaaggagtgaactgacctttacatgcatggtttatttcagagcatgttatttgattccagcatatttaaacctaagcaactagattgtaaggtctgtaaaaacagaatttgtctttctggttttttactctattcccctggcacatagtaggtgttcaggaaatattagctactattctcctctccaagatgcagctgttcctctccagctgtcctgtccttkctgctcctccttgaacttgccaggctactcctgcttcagcactttggagaccacagaccagcagggatcactccctctcctcttctgggtctttgttcagattataccatctcagtgaggccctaactatctccttcctttctttctttatttttccatcatatcatmgccatctgataaactgatatattgatgtactgatatattgacttatttatttgggaatgtgagctccaccaggacargtgtttctgtctgatttggttattgctgtatacctagtgcctagaacatagttgctataatttacttggatgttccgccacgtactggctgtgtggtaatagctaatgcatttgctcccttggatcctttgtttgattccccatttgtttcatatggcatatgtgggtcagatgagatgttgcacatgaaagctcttttatgctatgtgttatgcaaatgtattcacttatttattcatttaatcaaccagatgcagttcctgccttcacagagcttaataattggacaaataagtaatttcaccaaagtgggaatgcgggtgatagggatagtgtgatagggaatgtgcagcgtgctatgggagcaccgtcacgagggattcctaattcagatgtggggacaggaccctggaaggcttccaggaggaaggaacatagaagctgagatctggggatggaatgggcattcaacaggcgaagggagtgtgatgtaattgatggcatggagagtattgcaggtaggaggaataatgtacagagtctggaagtgcagaaccatagagtactggtggaactgaaagtaattcaatctttctggaatatccagtgtggggacagataagtggatagggatgtggctcgtgatatagtctggggacagatcaaggagcgctttgcaggccatgctggggagcttggacttgatcctaaggacagtgtggagccatggaagtcttccaagaaaggagtgacttggtctgactttcattttcaacagtcattttatggagtaagacagcttatttcctcgccaaggaacttgaacacaagctcccaggaagggaggttgtgaaaacagtgaaagggccttccagaaagtaaatccttaagctccatgaaattagcttaaattctgtttgaatctgactggtgaatatcatagcaatgaggccaaaaaaaaaaaccttcataaaaacttaattatctttgaggccgtagctcatacttgagggaagggacatgggtaacgctagagacatatatgtttgcattaacttttacgccactgtggggcagacaattaaagcaggagtggaggagtcagagcagttttgaatctgcttttaagtcccagagagtgtcacagtacctcctacccagcactggttgccaaagtaaaagaaagtggtaacaatagggcataaggtggtggagaagaggctgggtagaccttggccrtattcttgctttgcaccttacactgctataaagaactacccgagactgggtaatttataaacacaaaagaggtttaattgactcagacttctgcatggctggggggtctcaggaaacttaaaatcatggcagaaggtgaaggggaagcgaggcatgtcttacatggcagaggaggagagagagagtgctaagagagaagtgccacttttaaaccatcagatcttgttggtttaaaacaaccactatcgtgagaacagcatgggggaaagcacccccatgatccaatcacctcccaccaggtccctcccttgacatgtggggattacaatttgggatgagatttgggtggggacacagaaccaaaccatatcattttactcctggcccctttcaaagctcatgtctttttcacatttaaaagctaatcgtgccttcccaacagtcccccaaagtcttaactcattccagcattaacccaaaagtccaagtccaaagtctcatctgagacaaggcaagttctttccacctatgagcctgtaaaatcacaagcaagttaattacttccaagatacaatggggatacaggaatttggtaaatgttcccattccgaataggagaaattggtcaaaacaaaggggctgcaggccctgcaccaagtccaaaacgcagcagggcagccattaaatcttaaagctccaaaataatctcctttgactctatgtctcacatccagggcatgctgatgcaagaggtgggctcccaaggccttgggaagctctgcccctatggctctgcaggatacagcacccctgacacacagctgctttcatgggctggcrttgagtgcctgcaccttttccaggtgcacagtgcaagctaccagtggatctaccattctgggatctagaggctggtggccctcttctcwcagctctactaggcagtttcccagtggggactctgtgtgggggctccaactccattttccccctctgcctgccctagtagaggttctccatgaggactccactcctgcagcagacgtcttcctggacatccagacatttccatagatcctctgawatctaggcaaaggcttctgaagctcaacttttgtcttatgtgcactcgcaggcccaacaccaggtggaagctgccaaggcttggggctcccaccctctgaagcaatgcctgagctgtactttggccccttttagccatggctggaactggagtggctgagactcaaggtgccatgtcctgaggctgcacagaacagggagtgcaggagggacccctggcccacaaaaccagttttcccttctaggcctctgggcctgtgatgggaggggctgccatgaagatctctgaattgccctggagacattttccccattgtcttggctatcaacattcagcttctctttatttatgcaaatttctgcagctggtagcttgaatttctccccagaaaatagatttttcttttctacaacatggtcaggctacaggtgttctaaacttttctactctgcttcccttttaaacataaatcccaatttcagaccatctstctgtgaatgtctatgactgtatgctttcagaaaaagccaggtcacatcttgaatgctttgctgcttggaaatttcttctgccagatatccaaaccatctctctcaagtttaaggttacacagatctctagagcaggggcaaaatgccaccggtctctttgctaaagcataggaagagtgacctttgctccagttcataataagttcctcatttccacctgagaccacctcagactggacctcattgtccatatcacaatgagcattttggtaaaaatcattaaacaagtctctaggragttccaaactttcccacatcttcctgtcttcttctgagcccttcaaatttttttattctctgcccgttacccagttcctaaatcacttccacattttcagatatctctatagcaatgccccacttctatcaggaccaattttctgtgttagtctgttttcacactgttataaagaactgcctgagactgggtaatgtataagcaaaagaggtttaattgactcacagttctgcatgggtggggaggcctcaggaaacttacaattatggtggaaggtgaaggagaagcagtctcctcccttgacatgtggggattacaattcgagatgagatttgggtggggacacagagccaaaccgtatcaaccagtgatgtggctttgggaatcacttaacttccctgaacctctgtttccttttctggaacatggaattagtactactgatttttcagtgttgctaggattcaatgagataaagcacagtcagtgctgctataacagttgttttgaaaacacacacattttttcaaagctgattgatgtattcagaaaaatttgagaataatgcaaattttatgtttacttacatagtcagttttatccacgaaaagtactaggtggactcagaagacggcactcagctaaagtgagatgcatggcaatatacaaacacacacacctgaaacatctaccagctcctcagttcaccaggtgtgttgagttacactcgagttacactcatccacatctgccattacaactttctgtccattttctgataaccagccccccacccaccacttcacaataacccataagctgtaacccttacaatgcccatttccacaagaaagtagtagtgtgttccaatcttgttttcccataaactctgctgtttttactgcacaattttgcatagtgtggtgatttctcagaactcatatgttgtgttatagcagaactgactctgtctaacacaattcctggcagacagcagacactcagtaacaggtagctgttttattattaatattaatccacttaagtacaattgtgggttggggcagggatccctagttacaatgtttagctgctttgattagtagtgttaagtgaaatggactgcctgagtggaagggttttggtgcttttatcttttctaagtgtgtgctggtcagaccacccttggggtattaacagtgacaaaccaggtatgtccagaaaagagcaagccagaaaaggagaagacatgagaatgatctttaaatagttagagggccatcttggaagaaggattgctttgttttgtgggtcttcagggtgacaaggggaagctcccagggcccagggttctggctagctcggggacgagcctcagaatagtccctgggggtgatgtgttctccaagctctgaytggctgctctgggaggggagaggacagagaagagtcaagcacgggtttggaggttctatctataaagttccttttcatttttttttttccttcaaggtagtgtgcaaagacagattctgctgatcagagtaaatttcagacagaaacaacccaaacttttccagcagtatttggacttctgcttgcctgcttgcgtttttttttcttttgggtgatctaagagaatagttagcacatgtgcatatttacgcactggttttttttctagttatgcccttgaatgttgcaaatataaagactatgctttacaaatatttatggcttctggcatgcttaggaatagtgaaattacatcaatgctttccgtctcgagggcttttttttgacttttcttcttcttcttttttttttttttttgtttgtttgtttccaactcagggaaaaagctcagttagttactgacctggcattgctttctctctaacatcctgtgtagcttttgtcctctccatctaagcaggctgttaagctcttgtagtaagaaagatgttaccctgggcttagaccctctcggtggagctgagatggagaagcctccggaagcatggggcatttgagctgagggatggcaggatctgcttcagatatttaaagtgggttactctgagcctgcaaactagagagtctagtgtggtgtctctagaagaattacttttgtacccttagatgaattaaaaagtaattatactgagtgttttatcttgcctgtatacggatgtataagattccaggtttctagttgatgttactgttaaaaacagaagatgttcaaacatatttgattttattaaattagttttccctgtagtcataggaggggtactgctgtttacatgctgaatcttagcaaaactataaaatagcatttttaaaaaatggcagctcttctgttctgatgctttgacaattaatgttatctctttttgtttctatgatgagcacatgggacttaggcttactcttaaaatggatttttccaaaaccaagagttattacatttcttcctctgagacaaagtawtcaggcctcctcctcttctagcactcagtctggaaaatgtggttagtctttccatgtgggagctcttgtgctttgtgcattggttccaagatggcaagtggactactgttccaagatctgggcccaaggcatgtcgttgggctcgcctgaacttgtatataatgaccagaaggaattggtctgcactgccattaccgccagccactacctgatcaattctgcttgggaaatggctctaatcaacattcttctagacctgctgttcatggctgcaggtggcaggctcatggatcaataattggctggggcggttggccccactggtcaacctcactccttgagccctatttacctgttgctgcctcctccatcctcccctaaagtcacacagcttcaaataaggtggtcccatctattttggtgctttcccttctttcttaacctcccataatggaaaaagcacaggttccagaagcctggttttaaatctcagctctgttatttatcagctttgtgattttgggcaagtgacttaatctctctgagcccttgctcactcattttaaaatgatgtcactcatccctttcagagctgttaagaaaacatcatgcaaaccatctggtacagtgccagacacagagaargccttctggaactggaatccacacacaccttaccaattactttttgagtaggtcaattgccagcatgtctccagagcaaaaagattagatgatcctcctttctttttgtgccaggttctgcccaggcccaggggctgcagagatgagtaagaggaagtccctacctataaaggcactcccagttttgctaaaatccatttttccaacaaacgtattttgatacctactgtgtgcaaaatttatgtgcctttggggaggatactgagatgattcagtcactcatttattcatcggtcatcagtcgtgtgccagatactgttagaagcactatgggtagaaacaacaggcaagacattgtccttccttttgagaagctcatagtgcagtaaaatatactaaagtatgggagaagtagatagaaagagaatatgatctcattgttaaaaggcacttgtgttgttggacaatatagggtgcacacagtaatgtggatttcatttttgcaagtattcagatcttgatagagcttcattgagacaaccgtctccttttagaggaaatggagcttgggagtggttaatacgtcacacatttaggttaaagtaaagctgacactagccccacagaaactttaatttgtgtagtgactaaagtgaaaacactctctttcttcttgattctattgtctcccagcagagattttataatttgaaaacattgttccttaggtagccccaagaggtagattttcagatttgctgcttgctttttgtaaactattgcattccttcctcccaatagccccactggggtcaggaccattttgaacttaaagaacttgctcaaagttacacaacttgacatacaaagtcaggatttgaatccaggtttgcctgattccagagtccaagccctaagcctcaacaccatagtccgtccatgattcacactcattgtagtgtctgatggcttttgagactttgtagaaaaaagcacatcttaaatcatttttaggacctgtttatctgaaccagtggaaaaactaaatttacgaaccataaatagtgtctatagatgtggaatgccaagtgagttaggatatattaataaataggaacaaaaagttatgaccaaaagttgtgttttcctatacccagtttcttaagatttcataattagcaggggggaattctgagttgatgagtataaaaaggcctctgcaggtagcccaagagacgatactaaagtccagaggttataaacagaaagaggaacagacactgtagatttttctctactccatgacttcttcttgcagaaattctgcacttggcactaatcagacctaaaattaatttcttaaaatcaccaatgccttatttaaagaggttaacattctgcatgtagctgctccactgccaaacaaaaacacccctggttcttttgtgaccactaatgcaattgactttccatctttttaagaatgccccctcctatccctccatctttgtctcccaattaatttatgtttattttgtaaaaagcttgtgggcctgttgagttgatattgctaaaggctgacaaccacatagaggtacctcttatagcgatgaagtgtgtgtgcgtgtttgaattatctgttaaccagcatcaagacatcggttccctgtcttggatgaatggcaggggaggctgagcttaacttggccaaagcagcagggggctaatagaatgtttctgttccccataaagaaaggtagtcaagcgtctgtactttccactgaactccagtttctatcctgctttgaaaattctgcttaccctttcagtgagagccacatgacaagtgttcagtatgtcagatttgttttcattttattactacgtatgaatttgacctccacagtagggctgcattcatttcccaaagctcttccaataattgtattcttttaaaaaatatgcatactattattctttttcagattgtgttatggctggtgttttgaaagtggttaaaggatgactggttgcatgtggagtaatgtgtacatgatgcacatttccagatggaaacagccctcaaagttccctatgtagtttgtgtacctattctactcatttcattagactgaactcagtactttctggccagtagagcaggtttttttctttgacaaaattaaatttggataaccttttctgaaaagcaatttcagtgtgtcatattgacatttatattgataattaattgtttgtggctgtcaaaagaaagtgtgtatctttgcttgaggccaggagttccagaccagcttggccaacatagtgagacgttgtttctacaaacaatacaacaattagctggacacggtggcgtgttcctgtagtcccagctacttgggaggctggagtagraggatcarttgagcccaggaggttgaggctgcagtgaaccgtgattgtgccactgcactttagcctgggtgacagaaacgagattccgtctcttaaaaaataagtatgtatgtaattgtgtatgagctaagttactcttcctgtcacatttgtatggtagctacagtcaggcactgcataatcatctttcagtcagcgttagaactgcatataaatggtggtccaatagggttataatggagctgaaaarctcctagagaggctgtagttattgtaatgttgtagtacagtgtattactcatgtgtttgtggtgatgctggtgtaaacaaacctgccctgccagtcctgtaaaactatggcacctccagttatatgcagtatacctaattgtataatgataatagtaagtatatttgtgataatagtaagtatacttgataatagtaataaacaactatgttagtggtytacgtatttactatactttttattattattattttagagtgtactgcttttgcttctaaaataaaacattatctgtaaaacagcctcctgaaggacctgaaggcaggtccttcaggaggtatttcagaagaaggcattgttatcatagcagatgacagctccatgcctgttattgccccttgaagagcttccaggggacaagatgtggaggtggaagacagtgatattgatgatcctgaccctgtgtaggcctaggctaatgtgtgtgtttgtgtcttaatttttaacttaaaaatgtttaaatrgaaaaaagcttatggaataaggatataaagaaaatatttttgtacagctatacaatgtgtttatgttttaagctaagcattattacaaaagagtccagagttaaaaaaataaaaagtttataaaataaaaaagttacagtaagctgtccaatttctattgaagaaagaaaatactttataaatctagtgtagcctaggggtacagtgtttataaagcctacagtagtgtatagtaatgtcctaggctttcactttcactcacactgattcacccagaacaacttctaattcctgcaagctccattcatgataagtgctctctacaggtgtaacatttttaatcttttatactgtatttttactgcatcttttatatgtttaggtatgtttagctatacagataccattgtgtgacagtcgcctacagtattcagtatggtaacatgctgtacaagtttgtagcctaggagcaataggccatatcataaagcctaggtgtgtagtaggctataccatctaagtttgtgtaagtacgctctgtgatgttcacatgacaacaagcatatcaactaagaatgcttttctcagaacatatctgttgttaagtgacgcatggctgtaattcatgcattaattggttacttgtaccctctgtttagggcttcaaaagtcagatctgtccatctaagatgcttttaagtaacatttaccttaaagaaatagatggttgattggtttaaagaaagagacagctgaattggayggggaagccagattttgaccatatttctaagaggagctgttctgtaatgttttggtaaaagaatgtctgtctccatatcatctatctatctatctatctatctatctatctatctatctatctatctatctatctaatttggcatctatttatccattaatctgtctgtaatacaaatattccaaacatttaaaaagtataagaaggctctgtagtgcaatggatagcacattgaactttttttttgtttttatattggcttattgcaattaaaaaaggtgcaaataatatatgtaccaaagaaaattcagaaaataaagaaacactgagaaagtgaaagactagggctcatattataaacacacaaaaaatcacttttaatattttgggtacatttccttgcaggcttttttgccctatgcatacatttttatccataaatgtaatcatcttgtctatgttattttgtagcaagcttttttttcacttaatacataatactrttttttccaagtctttatagatattgtttttcttttcttttatttcttttatttagccatcactcagtgattggatatttagggtatttcatcattattttctttgaaaattaaataaaacaaaatttgatgaaaatccaaggtggcccaacacagtggctgaatatatctcatcagtctgttacattattctcatggaaatggaaaaacaacccccaaaactctgcatctgagaggagtatatattaagcttaaggaagtgcttatgaacagtaggaaatgagagttggtaaatggagtcattttatttcataaaggtgcctcagagctttaagcccaaagccctacactttgagtcactttggattttgtgcatccatccatgatgcactgtgattttgtcttacactgtgtttggtatgaagcattaaatcttcctccctttacagttttcagaatctgtgaaataggacctgagctaacctagaaaagtctctctgcttgtcgtttagtttttttttttttttgagatggagtttcactcttgttgcccaggctggggtgcaatggtgcgatctcggctcactgcaacctctgcctccggggttcgagtgagtctcctgcctcagcctcctgagtagctgggactacaggtacacgccaccacgcctagctaatttttttgtatttttagtagagacagggtttcaccgtgttggccaggctggtctcgaactcttgacctcaggtgatctgcccgccttggcatcccaaagtgctgggattacaggtgtgagccactgcacctggccttgtttagatattttaaaataatcttccaattctgagtaaatagtatttgtataatagttgtgagttgaaggcaaatagtttcaaagagttcagttcttttgtcttcaacatataagtcataaaaatgcatgattctccctgaggagccagcttggcatcagactctggagccagacagactgggtttatttcctgccccaccactttctgctgggtgaaccggagtaagttacttgacttgtctaggtgtcagttttctcatctagaaaatgggaataatactattcattcataggtttgttgggctggtttaaataagttaaaacacagtgttaactactactgttttcaacaggttcctaagggtctgtgtttctagcgctttagcacttcaatggcatttataatgttctgcattatctctaactgagtggtttttctatgagtatttctatgagtatttcttccccaactagtttatcatgatggttataatactggccaccatttttgatggagtattataatacatactctacatgtattacaaaatgtacgtctcattgccatttatgaggtatgcattttcactgttttctttttacaagtttagtaactaaaggttgtagaggttaagtaacttgctcaaggtcataaaattgctaaatgtggaacttggaactaaattccggtctggtgtatgtgccaccaccctgcttttgtaaattcctttaaggaagggacttttgtgctttttagatcccttacagatttcagcactgttccttaaacatagtaggtcctcagtaagttttttgttatgttgaatgaatgaaggtaggagtgatcctgtggataatagaacttttttctccaataagaaaaccaacaatattgctttttaatgacatgatattatgagtcttagaattctgttctgcttccatgttacatgtaagagtttgtaattatttgtgtatgaaactggttgtatttcatgtgaaacaaaagtacataccctgtatttgagactctgatttgagaaaacctggattagcattacacaagtaaccattgaagcaattttaatttaaataaaggatacaactaattctggatctgtttttagccatttatttaacagacatttattgagcatatacattgtgcaaagccctctgcaggggactaagggtttaaggatgaatatgatggtttctrtatgaaagaggattttatccaatatcatgggtttacctatgccctgatgctaatgacccctatatatctttaatccaactcttctccttttgccttcattattcagctctatgttggatacttccacatggatgtctcataggcctccaaactgaatttattatctcatccccagcacccactatgcctcattatatattacattcttgtacctgttatatatttcacctctgttggtgacaccactgtctaaagtaaccattcaaaccactgtccaaacttcaaccttcaaacaaacaaacaaacaaaaaaaccagaagtaatatttgattccttttttctccctaacattctacatttggccattcaccaatcctactgatttttttcccctaaatatcatcaagaactgtgaaggatttgagactttatcttacttgcaaatgaacttgcctgccacagttccatagatgctggcagaaggattcgtgggttagagacaaagaaatttattagtcatagcaatagcaatagccagagtatcaacatatttattcactgtttctccaagacccaactcccataggatgtcatgaagagggccaggtgacatccatacatgaagtgcattgcgttacaggagagaaactctgaacttagggaacccaaatcttttatattgggcaacaaagatgcttcacctttgctccagagggagatcatttcttccaaggctgctctccacataaacatctttgaaaagttagtctggaaccaagggcagccagtgctttgctcacaagatgtgcagaaacggaagggactcatggagaatgtctcccaacaaatatatcttgcatctgttccctttgctccttctttttttttttaatcgaaagtgccttactggtcctgcttccatgagtagcagtgaccaggggaaaagggagaggaaccagccagcacagggaggggtcatctccacaacattccatttatacacagaactgaacagcaagcatagagtcactattgtggttagaagttggcagcatgggaagggggaggaacaggttggatgtgggggtgttgttaaaaatataggcccctctccacaactggggtgcctggggggaatttggtttgcttcaacccaagaggaataagaagatcaaaagcagtttggcaagaccagaaccgtcagggatggagggaggaggaaaatccagggagtggggggatctgtttggcaactggagtgaagggattgccctccccctgctgggatccccccagcccctctggtctgggaggaaggggacggcctgcaacccccgagggcagatgtggggctgccagatgctccaggcaggtggccagaaccggctcacaaaggcttgtcctctagggagatgaccgcactgccccccagcttctctgccagggtgcagcggtccttgacctccttgtagcagtttgtgtgtaattcatgcttgatccctgtcagcttcttgacggcgtccttggagctggcatagatcattttgcttttaaggggagcagactcagggacccagaagataaacaccaggtcctcctccttgctctccttggtctcrtaggttgtgtcacagagggtgtagtggcagtccttatctggcagcatcctgacaaaggtggtgtaggggtcgtcgatggtctggctcacatcgcccaccaggatcttcttggtctcctccaggatgatgttcttcttgtcctcactaaggcagaagagcaccaccttcttgmgcttcttcacctcctctggcattgaagacttatgcamcttcatgtcgttgaacatgttcatgacaccatcagacagccacaccagaggccatgtttccagaagtgaaaaggagagggcatggagagccgcagaagacaagagcactgcagccgctgctgggacccgactgcactctgttccttctttgcaccattagatcaggctgcacattgctcataggaagattgcaacaactttttagctgatttccctaactctgggtgggtccctcttcatattagtcctccacaccttgctgaagtagcctcctgagacataaatctgactcttccctgcttaaagccatttactgcctgcctattatctataggaaaggcccaagctccttagcatgacaccaaagggattttcagaccagcccttgctaatccctctagccttaggggggcagcatatcagagtgattatctcccttactctcccagtgacttaacctttgtagcctgtttcctcattgctaacattaggatgataaaacctacctcatgggttggtgaggaattaatcagctcacacatggttagccctcagtaaacgttggctgttatggttgtgtctttccactctctgcctcgcactttaagatctggctacatggttttctgctgactctgtgtcccttttcaccatggttagtgcctttattcctgccacccactcttcttgcaatgtcctccaaaccctgttgcctggcttcacgctggttaggcacatcctcttccttctcttggatgctccatgcatgtgtcggccattgagctgtaaatatctactaataagtcagttactgctgctagactatcaactttatggggatggggggtgttttatttatctttgtgttgctagcacatagcatgtgttgaaaaaaatggtgaatgaatacatgaaagaataaaaggaattcacagtctactagggtgtttggggtctagggatgaagggtggaaggcagctaagtagcttaataataacaggttagagaatctgggtaaagctggggctgaggtgagaattaggccctataggagtccagtgtagggagtttgcttgttgagtgtggtgcaygtrgtgaggaagcctgtttaaagttatctcctcaatgaaataaagcagccccttcyaggcaatcctaattactccctttcctgaaagaatatattgcaaatggaaggtcatgcaatctgccttcttgtaagatcttcaatttctcagaatacaatgaattctctattacctggaggaggggtagaaaggagcttctttttaattaaattgtctctgcagcagaaagtgactttatcctgccttttgaagtcttccagttgtcctcagcctggctcaaatcactctccttgaattcattgttacactagtgcaccctgcwttgtgagttataatttaaygtgagcgtatctaattctctaatgagatggagactctttgggagtttatgtttttttccctgaaatgtttaatgtcatgcttttgaattaagaagggcttctacatatatttatagactggctgagtttctccatatatgtgttaagaactttcaaataattagagcacagcctgaatttcagaatgccagtgatcttctccagggcttcagcttccctgaaagaacagctactcagggcctattattaaatgtttaaggtatcattttttaactttgaaataaaaactgaaatatttggaaaatactgataaacgaacaaacaaaaaaacctgaactaaccctactagtagtagtgrtaactactatacaatagtatttggagtatatctctgtagtctgtcttccttggctttgtgtctttgcttctctttctctttcaatgaatgaggtcatcttttatcactcwtctggcaatctgctttcttctccttaacatcaatagatatttattaaaagtgatgatgctggagtatttcttttaggttcctgtttcaatccttgacccactgttttgccttgtttgccactgcctgccttttcttgatttctgtttgtctctctggattgacccattattgtgttctgatctctgatacctgcatgcatcttcatagtaacttccaacttttgggagtgtctgctgtgccccagatagttgtatgtgttttacctgctttaaaaatctcttttcggatagactggatatttgtagtctccatgtcacagatgaggaatttrtttggtgtagagatttagtaatttataaaagatcatgaagcttagatggagcctgaacttatgtttttatactcagcaccccctctagtatgtgaaactgtcatctttagcttcwgactccttctggaatactgatttttgggtgctgtgtctaatcagctttcagctctacaatattccttgaagggcaccgcaacccacaaccttgggccagcatagtgaattttatattttttatttgacagagagagagagaatgtgtgtgtgtgtgtgtgtgtgtgtgtgtgtgtgtgtgtgtgtgtgtgtgtgtttgagaaatcagcagctgtggttcttgctttcactcctcatggtrwggaggtggcctacccctcacatctgttttcagcccctgttcctcaataccagagttattttctattaactcaatgcaccttttctttgtaattcttgtcaattttccctccagccacctgcgcggtctctggcttgctctcaggctgtgagtaarttctttgtatacttgctgttttcgataacctcagcccaagacttaatgtcaaggtgggggccctattaaagatgccatgaatcatcttgtctttgtttgaagatttccrtgttggcaagtgggcagatagatgtaggtttcccaaccagatgtactggtagctgagatgggggcattcagctgaagtacattcctatcattatttggcaaagaaagagccactgagattaaaagcatgatccttgcttgtgatctggcttcatcaacggaatcacagagcctctgtgttggaaagggccttgaaatcatctgcaactgcgcggcttgatacttgagggaactgaggcaayagatacaggaagtgatgtaaagttataaatgccaaaccttcaagggacttttgacatgacgtaactctgcgctcttatgttttgggggaagaatagtaaggcctctagaagctcactaacactcctaatgcggcacagcgcgttactgcagagcaaggactctactgaccacaggcccaggacagcggccttggaggtgaagtcactaagggggatctgtaggatttggctggttacaagagctcacccgctatctcctccaggctggcttccgtgggcctctgttgaactatcagtccagtgttcttgcctctgtccccacagccctgcagaggtcttcttccacctgacagatggtgactgccttctccacagtggtaggagtgagggaaacagtgaggggaaatcaggaaacaggaagccagggagaggagcaagaggtgttggggctgtatgtgctggctccgtgccttggtgttgtgggtttctagagggttttaactttgtagtaaagacgggacttggrggaattctccctgtggtgggacaggagttttctccacagccttcacaaagtattccccgcaagaactactcatccttcacggtctacttctatcgtagcagttcagtcttctgctgtttcttctggtaccagcctatggattgggtaaggagaaagatcaggtttgtaaagagatctttctggtccttccagtaataaagccccttggacaagggccagggagattcatctcccagagactcctgtgctctaggtggtggtagaggcttcctgccagaaggatctgaggcagaggacgtggatggtgccatgctggcgtctctgtgcatctggcagcgcaacaaaggacttctgtctgccctgcgaggctgggtcggtaaaacccacttcaattgaaagccaccacactttagcaacttgataattaaaattctaatatgtgaattaaagaaaacaaggggctgtgttcctgccatattaaaatacagctgcagtgattccactattgtttcctttgacagagctgtggttttcctacacacctttgtttgaggctttgattcagatatactccctgckgctgataagtcccatgtgtctactcatcggttagatggtgcatggggatgattcttctgtgatgtggagaatgaaagatcgtgtcttcaagttatgtgaggtggctaagtgacatctcatcaagagcagagataaaaacaaaactcatggaaaaggtacttcctgagctccctttttgtttcctaagtgatttaaaayaataaaggccaaatcgaagagaaaacttaagaaccgatatagctgatacctggacttacggattgatttatttctgtgaacactctgggaaaatggccacttgtcgctctctgttattaataaagaggtcactttatcattaggcctttgaatctgtatttaatggctaaagcagatggttataatttctgacttggtgtggccaccttattaataaaaaagaactgatggaagcaaaaaggcrtcttcatttttaactccagaagcataacacaaatgctttccagtcttwctttgtgtggagagcagaccaagtgactgcaataagatcctgttacacatttgaaaaaaagacttttgcagagtggaggtaactcagtttgaatccttcttttgttaaactttaaaagaacactataaatatatgcccctttccttgaagaaggtatttcgaaggaagcttcaggattatattttaaagtaaattaatattttaataacataaggaaactaaaaaacacctaatttatttcagatagtggaggcctgtggtactttctaaaattattctttttgcttaaactactataaactgcttttttggatttaattactaggcttagatgaatgtrccatgcatcttattttggttctttttaaattcacttggaattaaaaaaaatcaataatggcaaaaacgtctggtagtggatttctgcttgatttcatcaagcctgtatattcycctataatggtaaggagtttgaaatcgtggttatcatcctggaaattttttgtccccaaagggacaaacctacatttgtgaagacagaatgatttagaatcttaatgtactcagtaaaccgagtgaacagagcagaaaaatgctgggaattcttcacataggctcagaagagctctttaattcacttagataccaaagacttattgatatgtcaggctgtgggcggcatcctggggtctgttatggcaatgaattcctggtccttaggtgacaagaatgggatgagtgtgctatgcctgsctctgagataaagaaaaaacatggaatgttaaggatcttaaagtctttacgggtttctttgcccactagttttcaatgttttttaattaatgatgcctttcaggctgtccatgggcccacgtttagaagtgttttgaatttcaaattattaatggtaattgttgttttctgttttcattaaccaaaggcatgtataacaacccattcagttcatttgtttattgatttgttcattaattcttcagtatttagcttgtatttacttttggcttggcaccatgccaagcacagggatgcagaggagtttgtgatggccaccagtcttatttaaaatgcctaaaatagggtcaggagcagtggctaacacctgtaatcccagcatttttggaggctgaggctgaaggatcacttgagctcaggagtttgagaccagccttggcaacatagtgacacytcatctctacaaaaaataaaaaaagttggcggggtgtggggtgkgcgcctgtggtcccagctactccagagactgagttgggaaggtcacttgagcccaggacgtcaaggctgcagtgagcagtgatggtaccccacactacagcctgagggacagaatgagaccctgtctcaaaaaaataaataaaaataactaaagtgctccacaacagtggatggatttttgtttttcctaccatctcagattcctggatatctagaccaatccattgctaagccatcgtsctttgttttcttttttaaactttgaaatgttttaagtgtacagaaaagcagacaaaagtgacaaaacccatttcagatacaaatattttttatttgtttcagatttttaaaagaaataaaacattatagatacaacaaaagctyccagtrtacccctcctaaatcctgtctcttttcttctccagagataatctgtcctttaaatgtgatgtcttttcattcccatgcatgtttttatatttttgctctctgtgcataaatgcactgagtgctactaaaaatagtgctttgcctattttaaaattgtgtataaatgggaacttactgtacctgtcatacatcttgctatttttgctcaatgttgtgtttttggtattaaccttgttaatttaggaattgcatgttgatctaagaagttattttagttgctgtgcagtaagtatgctattgtatgaccatttcacaattaatgtacccattctcctgycttcatttttttgtgtattataaacaattttgccatgaaaactttgacttatctttctgtaaaaatgtgtgaagtttttctaggccaaatacctaggaatagaatagagtatgcatgtcttcggcttccctaggtgctgtggaattgctctccaacggccttatgccagtgcgagctccttcctacaggatrtaagttcccgttgctctttaccctttctaactcttgatattggaagtatttttagattttgcttattcaacaggtatgagaaactatcacagtttggatgtataaagatatgtcaagttgagtaaagatgttagagcaaagactggagatttttttttccttttcctcctgttctagctgtattgttctagctatattatagggcagatttgagtttctgcttgggtagaattatcctcatcaaagcctactttggccctaattagtttgctatacatccattgtacacagaacacattatgtacatttctaaggaattgaagagacaaagtccaaacttatagaacctatgttgggggtgcatagcaggagatactggggcccaatttacagtaggttcattgcactggccagtgaattcagggaccttgctctctatatcagcagagattgctgcctgtgtggttttttggttttttgttttgtttgctttttgtttgtttgtttgtttgagacagaatcttgctctgtctccaagctggagtgcagtggcacgatctaggctcactgcaacctccgtctccckagttcaatcaattgtcctgcctcagcctcctgagtagctgggactataggcgtgtgccaccacgcccagctattttttgtatttttagtagagacggggtttcaccatgttggccaggatggtctcaatttcttgacctggtgatccgctagcctcggcctcctaaagtactgggattacaggcgtgagccactgcgcccggccgctttttgggttttaatgtccataaaatgagagattgcattagtcattccttcttcaagagcagattttcttttctgctttcaaaattccatgcttctaagtggcgttgacccttggtgctttaaaacgtcttaaaaatcactratacttaattggtattgagaacagaggaacttaatgcaggagccaccactaagtgaagagcagttaaaaaatgctaagaagtcacctkcaaaattctaatctaattaaaattatgtaaaaaaagaccaccatcactcatgtataaagatgacagggaaaaattacaatgaatagactgtgggtgattattcccctcatwgccctatttttctgttttccaaatcttttttaatggtcatggagtaatattcttggaataaaataataagcatatgcaaacaattataagctcatttggtaggaaaataagaatgtgatttatacaaaacatgtgctgggcaaaggggagaacacctgtatatgaaaaatgatttgtaatgattttgtaaataatcctataatccttccttgggttaagggttggtggrtgataagtgtttttctttaggttttgctgctggaaagatccagggaagatggaagacaagtagactggcatcttacctaaaagcagtggcacagcaggtggtagaataatttgagcttcgctcattggattttaagaccaaaagaaaaggcagaactaaagagattttattcattaggtcacgtagatattcctattccaaaggcatatgacaaatccttcagagttgaagtaatcataatgcctacaatatattaagcattaaatatacatatatttttcaattctggaatagctgtgaatgtgggaataactgtactgactgacaggggagagatcagatagtttaagaaacttgccccatatgcacagctcatcagtggtgctgcstggactcagccaccatctgtttcactctgcyggggcatacatgtatgtgtacccttgccctggcaaactcttccttttgtagagctgaaagcagccccctgcaactttcctatgtatttattctcatcctgccctcctgagcacccagccttagaagtctgctccctctttcrcacaacagcctttctgatcttcaaagagggctattgtgtccatttctccacttctcccctcttcggtctgtcatcttggaaaagctcagagaggtgtttttattcacagatgccttgagaaatttcatggtttttagactcatgctgagtttgtccagatgtgccaatatttgtcttatatgatacaaattaattgtccagaagaggaagaaacctttgtagacactcactaatgcaaaccagttcctttgartattgatggaaggaaaaacactaaaaaatgaaacagatcattttcactgggagagtgtagttgttgaattcacattctacttttaggacaaatctgtagcatgacagttcagtcttaccacatgtattaaccatgggaaacctagggtgacatttgcaatagactcctgcttttctgtaaggactttatacagatggagaaagtatgatactcttacattttattaccaagttctgtggcccagggtttacagcataaggtggcaaataatttagctccactcagatttggaagagtaactattattattataagtaagatttaaacttagggacaggtacacactctttaaggagagttctaagactgagatgttgtatcattatcagtacctggcataaatatatgtatctgagttctctttgagaatcataagggaaaagatgtctaatatgatttaacctcaagacactaacaatgattacacctatcccctgctcccagcatcatagtcaccaactgtggcaacagctrctgctaatgttttttgaactcctgtggtatgcctggtgatgtactttatatcagctagttcattctcaaaacttgagaacacactacatataccctagtaagtactattgttagcctcgttttatagatgaaaaaactgagaggttaagtattctgcccaagatcatatataggttgggtatccctaatctgagaatccaaaacccaaaatgcaccaaaatctgaaacgttttgcatgccaacatgatgctcaaaggtgctccttggagcattcagattttggatttttggattaggaatgctcagctggtataaacgcatatattccagaatcttgaagacatctgaaacatktctgatctcaagcattttgggtaagggatactcaacctgtatcttgtatatagtagagtgagagtctagcttatgctttgctcttatatcttgtttctttcttcagcaaaatagtctgtaaattgaacattaaacagtgcactggggacacagtaaggaatctttcattaccaatggagcatgaatgaaagtttccaaatatgaggtttccttagtgaaacactatttttaggaaaaactattaaaccaaggcttatgataaaggatcattccacatccaaatatacctctcctgtattagcataattctctactaaaatcacagctgaaattcattcactctaagagatggataaaaaccatacggtttcatgtaaagatcaccagcttcccagaactaggatgatgggaattttaactaatgctgctgtgactgtggcctagcctcttactctttctggatctcagtgggcccatctgtagaatgtgagcattggcctctgtgataatgaatgttccttctagctttgtatattgcatagtgcatgactgctagcttcaggaaaaataaaacgttttcaatggaaatatcagatcaccaacctgattccaatgaatttttttttattcactgaggctttatgtcatataaaaatatgtgacgtattactgctctgctgcccatctatttaaggcattcttcagtagacttgtcagggcttatctaaatcttagcaccacttacgtgtggctgattgcttggcaggaggaggttcctgcattttcttcctcctgtgtattagtgaattgaaatcaagggaaaaactgcttggctttctgcttccttccatggtaggtagacttttctacatattttccaacagttctttttgacagccaagtctggaaacagggcaggatggaggttttacaaataggtgacagttgtttgtctcatgaatttcttctatttcctttccctagtggagttaactgcctccttcctacaacaatccgaacgtacttccatcacagagtatctagcagtgtgagcaatagccatttctctcttttacctcttctggattctaaacccatcataggtagagatagaacatgtctgtgcttagatagtatctggcacatacagattgctcacttaatggtgaatgaatgaataaagaagaaaaagtgatgaaagaagaaaaactacagtcrtctcttggtatctgtggcacattcgttccaggaccctgatggatgccaaaatccttggatgctcaagtctctgatataaaatggcatagtgtttgcatctaacctacatacattctcctgtatactttaaattatctctaggttacttataatacctaatataatataaatgctatgtaaatagttgttacactgtattttaaaatttgtattatttattattattatttatttacttatttttccaaatatttttgatctgtggttgattgaatccatgggtgtggaacctggggatatggagggctgactatatatactaatgaacactactttggattatatgaaaatacccatttatgaaatggacagttcaaatgtttcctctttgactgttcttaacctgacctcccaacttgaagtaatctgttcctctcctctaaacagttatgtgtactatgtgtttggtaattaattatgtactgactcatgacatttgtttctgttcttataatactttttgattttcaaataccttatgactttgttttttattacaatttgttttcccatcaagattgtaaattcttggaggcaagggcaattattaaatactatatttgatacttaattcgctcctctcctttgggggctccagttacatgtatattaggccagttgaagttgttcctcaactcactgattctgtttacttttttaattccctttttccctctgtatcttattttggatagttttgatttttgtgtttttgagtttactaatatttatcctctgcaatgtctaatctgatgttaatcccatccagagtatttttcatcgcatacattgtagatttcacctctagaagtttgatgtagctctttttttttttttgagacgtagtcttgctctgttgtcaggctggagtgcagtggtatgatctcggctcactgcaacctccgcctccctggttcaagtgattctcctgcctcagcctcccaagtagctgggactataggcgcatgccaccacgccccactaatttttttttttttctgtatttttagtagagacggcgtttcaccatgtcggccaggatggtcttgatctcttgacctcgtgacccgcccacctcggcctcccaaagtgctgggattacaggtgtgagctaccacgccctgctgatgtagctctttttcatatcttcagtgtctccacttactttttgaacttagggaatatagttataataaccattttaatgttctgtctgctaattctaacatctgtgtcagttttgattgacttttttttttttcctcctcatcaggggttatatttccctgctttatgaatgcctggtaatttttgattagatgccagacattgtgaattttccttgttgggtactggctatttttgtattcctacaratatttttgaactttgttctggaatgtgtttaagttgtttagaagcagtttgatccttttggaaagtcttgctttgaagatttggaagactgaaatagttgtacttagtctayaactaattattctccatgacagtgaaaacactcttctatgtgctctcctcgtggcgtggggaatcatgaggttttccaatctggaaatatctttttggatatttctttccccagtgctgggtagttgccacacatgtatgcactgatcagcactctgctgaatacttgagggggattctctgtggctctttctgcagctctcttttctctgatacttggccttgcaaactctagttgccttggtctccctggactgttagctcaattcactcaactcaggcagttcactgagctctgcctgagttctccctttcctccagacaccttgagctggaaattctctcaggcagtaagctggaggactcgtaggattcgtttcatttgccttccttcttccagggatcactgccctttactgactgttataccagtcttgacaattatcctgttactccaacttggccagaaatggaagtgatacattttattctttctgtctgaaataatcctccatccccaatgtttaaaaactgccatccttgactccatgtgactgtgttaggagccctttctctggtctctcatcatacctgtgcttacagtaatttagtgcggcactcctctccctgcgttgttcttgcatttttttttaccctctcttttctcgttagattttgtttccttgaggacagggaatgtctttaatctcgggatttctaacacctaacatagactcaggtgtgtaacagttgctcaataagtacttgttgaatgaatgaatkaataaataaataggattcaattttcaaagtatctgttgttgaacaactttcagaagtttttttttttttttacagaaatgagattagatatgcatcttcatatatgcaattgaaatctctcttaaatttctagataatcagttgttgttgatggcttggacatggtttttacctatttattttttgtagcctctccttagaaggtgttaataaaagccacctagttgatgcttgaaacaacatgtggaggtaaagggaccaagaatagaatagccatattctataaacaaacaaaatgaagactaacttttaggtatctgttttatgatggaccctcagatgtggtatatcccaagtctgccaggaggttgttcttatctgaagtgccttttccatgttggatgtacttagatgccttttatccaggtagactcagatggtctgcaaatagctctatggatttggcattggaaaacctcatggttccccaggcatggggagagcacataaaagtgttttctctgtcatggagaataaatagctgtgagtcgttgcattcttatcaactggagacaattgacagtggatatgtgccactagagttatggtcaagtgcaagttcatactatatttggatctttaagagtcggtagaatgaaccatatttggtaagcctctgaagactgtcttgctccatttcctcagcagctcttggttaccaaaggtgactctggagccccacctccaagtccccatcctgcacagttggcatgatggaaatggcttgaggttcttgttctttcagattcagtgttttcatctgtgcagtaggatataagtaggataagatgtaatttgtcaggttgctatgaggaataaatgaagtaataaatgttagttgcctatcacagtttcaggcacatgggaaccctctccccattcccccaaacttaattgaaaagatagccatcagcctctgaagttgaattgtgctgagtggttactaacattaaagacatatggagttattgtatctgtatctttcacttatcagcttttccttgaaggtttaatgtgtgttcctttgcttttaggccccatgtttattttcctgaaatggtgtcttcttgacttaaagtacaatctttgcttttttattcttttttcactgctcttgcctggtgatcctgttgtttaaagacatctccatccttccctatcctttccctttcaaatctatggcccagactgggggtggctttaactaacaacagcactttgcattagttaagtagagtggaatttctcattctacctctcagctattgatgaaacctttccctgatgcacaaattaagactgggtgtattttgcatattttcctagaatgacacagtgattctgtggctaaaccaagattagaccctaccactttaaaaaatctgactttttgcttaaagtgtaaactgtgttgcttctaaaactactagttgaatttaactttcaagtgtactttgtatttaaatctgatgatagtgttgtttttccttttgtcttgtttagatgagggtattttcttcacttccctgacccctagtgcctcagtgacctaggcagcaagttttttgatgctgtccagaatgctaattaagatatttattctctttggccctattgtttatgatacttgtaattatgtctattagatggtaatctctgttatctcccactatactaagtgtactactcggcacataaagaaatgtgtgagtatgtgaatgtatactcacatgtttgaataaatgtgaataaatcaatatatttatatagttactgatttaaatgtgttccgtcttgggatgtgagatgggataattgaataagaaattagcctgtgtgtgttaaggtagtcaaagtttttatggtacctttgtacaaactgccccttctgttgtgtgtgtgctgacccatgtcatgatgctcagcatgactggaggagtcctggtgtgtttctgtcctcacttgctccctgggttgggcgcccctctgcagggtacaaccaacacagttgtatgaagaccctctgactttcattttctggctggctgggggttttggtgttgagcgcttttaagtaagacagtcaccttatcctactcaatgttttcttgaagtgcaggccctgtgaagatgaagatcccctcttctattttggggacacttttgtgatgcttttatctgtctctccagagtctgatttaatgaaaatatgtacctccctcaccacattctgcaaagcttacttgagtttttaaaatttaatagtaaatatgttagtacatgttgattctagtgcccagcacatagtttctgctcaatacttagctataattattagtttatttaaattgccttaatcattcatgcaataagcaaatgtcccccctgtaggctgttctccagwtctgggatacagacatgggtaaagcttggagcttgtgtataagtagyggggtcagtcgcctgccagttcactggagagatgccatgcttggagggtggactgactgtaaggccctcccagttgtcagactctaggcttctagtgtgccctccctcactgtacagctggtcaatgcatggcactagaaagtgcaaaggcttcagtgttggatgagtgtggatttgaatcccagctgtgttgtggactagctctgagcttcagtctcttcctcttaaaatgggaataatagggtagttgcaaagtgtcattgttaaytaggccctgggctaagttctttactcctgtgattttatgaaatcctcaaacagccctgtgaggtgtgtcttgttaatatctgtattttatagatgaggagcctgaggcacagaagggtgaagaaactggcctaagtggtagagcttttcactgaacccaggcctattagagagcagaggccacattcttcactgttatgcagtgtcatgctatgttatctgtccagacatgttacgattcctggcacacaggatcagagcaaatagtagctattattcttattactattattgttctaaaattcaggcctttcttcaccacactgacactgagtaatatatattgtagctgttcaataaaactttattggatttaattggttatgaattttatgtgtgggaaggtggttaactttcctatctgtaaggagaaatgctcaatagaatatcttaaaatgggggaagttatgaaaatataaaataacaaccagagaggcaaaccagtttatgagattctgtattagaaagctggaaagaagtttttaataagaagaatggaggctgggcgcagtggctcacacctgtaatcccagcactttgggaggccgaggtgggcagatcacgaggtcaagagttcgagaccagsctggccaacacggtaaaaccccatctctactaaaaatacacacacacacacacacacacacacacacacacacacacamatacacacacacaaaatagccaggtgtggtggcacgagcctgtaatcccagctactcaagagggtgaggtaggagaatcgcttggacctgggaggtggaggttgcagtgagcagagatcgcaccactgcactccagcctgggcaacagagcaagagtctgtctcggggaaaaaaaaaaaaaaaaaagaagaagaagaatggaagggtacaatctggtggtagacaccatttgaaaatattctgtctagcaaatagtgtttttgagtaaaagaaatagacatgacaaatcagttatgtggccatcccttataacaatgatgaacagataggagggtgtgcaatctttaaagtttagaaacaaatttgtccttctgacatccttcccttctcttgacacacggttggtaatggccaagattctgttttgcctgatggagttttgagtgagttaaattaggttgtcttgaaaatagctgggccagaaaataaaaaggttttctctctttggaaaggggctttactccagggaagaacacagctgtccaggaggaatccgggactgttgagtccagaaacttcgatccttctccaccctttccccagtgtttcaccagcagaaaaagaatgttattaaagtctgtgatgaaacaaagctgcacgctgagacgtggctgccagaacttttatttttatggttctcttgagtttggggagaaataattaaatgttgcaaatgtaaaaattggcagtaacattttccattttgccaatagtcattcctttggttttcccttggattttatttatttctttctccttttaggcattgctctgtcatagcctgcttgagtgttgtgtctctaggaaggccagaacaccaggtttggatgttacatagccaagaacattgtgtagcagtgcctggttttgccacaagacaggtctgtaggaaataccactgccactgcagccgagcacgttgaactgactgtgctcaggaatacttcaccagtaggcttactggaaggtatgtctttctgcatctgtgatttgcagaggggcatatgattgccttgctgttggaaacataggaaatatggtttttggggattctactttgaaataatggtactcgtcaatgcagtgggaaactacaatatcaggatgttaagaaagggttcaaaaggttttaggaagtcttgaaagataaatgcccattccaattgagccagtaggtcagtcttcttagggtttctgtgataatataggactttagagtggagacgcctttcctgacaagtctagggttgattttatgtatttgctaagatttattaaaataaaaaatggcatattctataaggaaaaataatattaatggtattttaattaagcttaagcaataaataatggttatcacataatttttatttattattctttaccttatttcagggtctgtcttactgtgaagtttcaataaaatgcttagaactacattttcctggccaggtgcagtggctcatgcctgtaatcccagcactttgggagaccgaggcaggtggatcacttgagctcaggagttcgagaccagcctagccaacatggtgaaaccctgtctctactaaaaatacacaaaattagccaggtatggtggcacatgcttgtaatcccagcaacttgggaggctgagrcaggagaatcgcttgaacccaggaggcagaggttgcagtgagccaagatcatamcactgtattccaccctgggagacagagtgagactgtctcaaaaaaaaaaaaaaaaaaaaaaagaaatacattttgttttattgcaggcaggatacatttcaagaggcttacttcaccttctctgtctgatctccgccaaatatcttggctttgtatttcccataacccatctgttcttcatgtagctgtgaaagaagtatatctttgaaagcagaattttgagtaaagaaacccgagagttagggagagatgaccaggttccatggctccttgttaatttcaccttcaagccacatactgcctcttcttgggcccttgatctactgctgagcatatctttttctttcttggtgtgaattctgcctctcagtataggtggtatttgttaatttaactctgacataaacatgggaacactgcgcctcagtgtcattgtctgtaaaatggggttataaggtattttctgacctacttaaggttaccgtgaggattaagtgataatgtacaaagaagacttttaaaaattaatattggagtatagtataagcatagtgacatacaatgaattataatcaataataaattgaatttcactttgtgacctcataaaatttgattcctttcagctctatcaaggacagcatcttgcctaatcactttttgttttagaaaagttagatgcttgtccaatgtcacaaagcaagttagggtagaggtagggcaaaagccctgatctcctgactcccacaccagcaggatgcttagttgtgatttctgccttgctttaccacttgggtcatctttcagtgaaggaggtaactatctcttctttcttgagttaaaataataccttagtagaagcaaagaacactatcactttagttcttttcagccttcatttgctgttgccttctgtgtctaggcgtgctgagctggcaggaaggtgacaagtatgatagattctggcctctaaggggctgtcaagtctagtgaaaggaggtaaatgagtaaacagatagacacttcggagcctgagtttctggtgctggcccttacacacagggtctatctgggcaagtcatgcctgtctttgggctcaggtttcccagctgcacattgaggtcctggactagatgtacagaatgatcgtgatcactgaggttccttctaatttgtcaccatctatgggtctgtgataatgcaaagctgtgtgcttgccagctgaaactgaaatgaaggaaagtgattaattcatttcacaaactgaaatgaaggaaagctattaatctgatggcgtatttttctttatttgtgataagtttcacagactacattttccagcattcaacactgccattgtattgtattgtattgtattgtattgtattgtattgtattgtattgtattgtattgtattgtattgtattgtattgtattgtattgyawcatagatggcgatacttgttcagttaaccaaatggtcaactttgcaaaaatagcagaagtggacatctcatgatgatttaatacaggacacaaaaatcaatgctagcattaactactattctcggcctttctgcagtgtttttctgataggaacctttgtattaaaccaccttctttttttcctaaaaaggaccatagcataatagcagctagcatttatttggtgttttcctgtgtgataggtaagtgttgttttaagtgcttcccatataaaaattcatgtaatctttgcagcattttgaagtaggcattattatcatccctattttagagataagacaaccgaggtacaagaaattaagtaaaacttattcaagattacacagctattaagagatggaggcaggattcaaactcaggcggtcagcctcaggcagcctcatgtttcatggctggaccattgcctaaatgaaagctgctcactctcagcctattgagaacctggagaaactggccttgttatgaggccacaggctaagaaagcagttgtatcagcttacttgtggctctaaacttggccagatcctcaagtctaaggattcttactatgcacaggtgttctcagtctggattcatgtcwcaggtgactcatgaacccttggaaattgtgtgccaaatgcatttatgagtccatgtgtgttgtgttggtatgacggggggtaggcggtttggtggttttctgcacagtatcagcagagcctctactctgtcactggcaggatcctagctgtgcaggcgtttgtcagcctaaatctaaatcaagattctgggctgggaattaggatatagctccccattgaacaagtgagtggctataggatcttggaagaaccaggctttccaaatgtcctcccaccccttggaactctgctgctgtggagcagttgtacgatgtccttttctctctttgaagctttccaaatctttcaatcttttttttttttgcctccaaattttggaacctcaaaatttcaaggtttttttttttaattttttwattttttttccttttgttttaccttctcctttctggctttgttcagaaatcaggtatcaataagctttttattactcatccaatctgtgagttcagtttcccatttaacttttatgaatgttttctttgttaagatgagtcctttcaaacccctgtaaagaatgtttcactatatacaaacataaaaacgaagtgttaaaactagaaaatccaagtggaaacacaaacatacatatacatttttccccaggcaatttagcttcatagaaattgagtgcatctgcaagggaatttttttttaaatgttattggtagttttgttatttgtattacctgtttggtcctagtctttatagttgattactctaggtaggtctttttaggactgaaaataggtcacacatatcacagtggtcccagtgttagagagakgataaaattctattacaaagtagttttgtcatgcttttggtctaaatgagtaatacaactagcatgtccagtgtcatttttgctgtactctggaaaacttttaccatctatctcatccttatatactgcaacaaacttctgatattatttcaattgcagttcaggcattgccctcgacacaggcttaagttcaagtctcagctctgttacttacaaaccatatgactttgagcaagtttatttaattttgtggagtccttttttttcccatacaaggggaaaacaataattacatgttgctcaaagggttatgaggagtgaggtcaggcatgtttatatgtttcactctggcgttttgcagagtaagcacttgataaatgatgctcgtgttattgattgtcatcatcatcattaatatgtgtaataggctaggtacagtgcttggcacatagcgggcactaaacaaatattttattggatttgattgtacatagcgcttgtgactgaatcagaggttgccaggggtagctttttgctcagtagattaacaaggaggaaattgttgaacagaacaactgatggctctacctttaagtcaatgaatttcatagtgaagtggtcttgaatgcaaatgatgaaatgtggcaagtctggtggagaaaaaaacccaacaatcttgaagctgttttaaagagtagcagttgcctagtcaccccaattgctgaaattttccttctcttccttgaataaggagtagagaggggcagagaggttactggtcatgttcattaattttctttcaagaactgccacatgtcaccagtggtgcccccccagcaccagtgctgtttggcagtcttctctttgccccagagaagccaaaatgttaaattgatggagcttactagatctgacagagaaattcttcacgtctggcctggatgtctaagtaaatttggtgtacttcttgtggtctggagcaaatgctggaagctattagaattctgaacaaaaccctccattcaaagactgctcgtttcctgctggggtaatccaagtatcaaacattaagaaatatgggcaaggcaaatgtggctgctcattgcaaaacccaccaaggtgtctacgacatctccccaaatgacttggaatgttacatccacttgatcatcttgaataagtggtttcttttgaaaacaagagctctacttttcctacaccaagtatagatgggaattggctgaatttcctcttgtcagtcaaatttaggagaagaaagctttcctccttcccttgaagttctagggacctagcctttttttttggttttattttgtttcattctcctttccttatatatttccttctgaaataaaaaaaagtatctttcattagatatasttatggatctattgttttagactaggcctgctcagtggctggaaacgattttattaagaaggctttatagagaagctttggtttatctcatgaaatatctgagtttgtcatagattgtttcctttctgtacagaaagttattttctgtgaaattccaggtgttcttttacatagacttgaaaggaatagatttgatagtccaggttttttttttccctaagaagaatatgttcttgtgatagattaattgaggatgaaatcagataacatagatgaaatcactggataggcatagtgaaaaccattattttaattaatctagctacagtgtttgtacagccagctatgcagctgaaggctgccatgtagtagctgctacactgtttggctcctgtacttatactgtatggggacctctttcttagacagtctcactcctgctggactgtaaactcctggagaacagggacaaagccttgttcattagagtattcctagtgcattccactataatagacacataattaatacttttaaaaaatgaacaaatgaataagacatttgtacagaacttgagtgttagaccaggtggtttcacaaaacaaagcgctcacggaggtttattggccttcctcctatgtctttgaccttttccttagcttgtgtctatgctgtgtttcctgtctacgagatggtggagatggcgagcccagttttctttcatcttgaaaggattcagctccattacttaatagtcccagtcatgttcctttccccctagaatctgtgtatgagatgtgaaatccatgaaaagataatgttgaatgggaaaaattaacctattttgatgacttttaaggagttctaactgtgcatgatagcaggcgactcccttgtcagtaggcagcaggcctgtgttatgtcaggggtaacgaggtggttcacttgtggagagttttctgtcttttcttccaagttatgctgacctcgccgacgaaaatattccccatctaataaaagtcagagcaaatttatgggcctgcccctgaccacttgtcctttatcctttaaaagaaaaaataaatctaggataagatccataggttactgttggaccatggaaatgatgggcaggggccaaatatcccaccttccttgatctgcttctcttttcccgattccggctgtctgggggatgctgaagcttgtggcatgagggttactgccgagcatggccatgtcgttagttccctttggaaacaagctgttgctctccctgcctggagggccacacgccttggcaccacactgaagagatcccaggcgtggctggagtgaagctgctaatgaaaaagcagccatggcaggtcaggacgaatcaagcaaaaaggaggacattctataattaaagattcagagaaatactagcgcagtttttkttgttgttgttgttgttttgtttttttgtttttgccaacgctatgacaattgctctttctacctgttcccgtgggttttctgtcattttatcactcattaaacaagtgtttattaaatctctactttctgtgtgctgcttacctgtgtgctgttgaccatagttcagggattacttaaagcatcaatgagtgtgcgatgactcaggaatgagtcgggtcctcaaggatcttgtcacctagtaagagacagagaaatatgaggcagagggaggctgggccataggatatggcaggatgcagagcaaagagctccagagtctgatagacctgggatcaaattcaggctctaccacttatgagcacatttggctttgggcaatttacttaatcttgaacttcagtttctaaatctttgattgtgcataatacacagcgtcctggaagggttgttttaggatttgaaataagctgtgaaaagggcctggcctagagttagcacttgacaaatggctgctcttattattttattatctctggcgaggtgctgataaccatgtgagttcaggggaggcagtctccaccccgtggacagaagtgagaggatcagcaaggggatcaggagtttcatggggcacatgcctctgcactgagcttgggagaatgagtaggatctgggaacgtcgtgaaggagaatagagaagaaactttattcaagacataggtttttacacattttgttttgtttttagcaaataggcacttattttgcatcatttttatttgcagtatgcaatcaaattgtgagattacttaagccttagcatgaatcccagtgccaacagttgtgtatttctttcttctgctttcttttgttgtcccccacaaccttctctgaacagcatctattaagtgattgcagagtctcatgacttggttgtgttggaatctctgcattagtggggacacccttccaattccttgttaggatcaaatgtgttttagagaaggtatctggttcccaagttctctgttgttttttggaaccatgaaagcctagagatgttatggcaggatgtccctaatatgcatggcaagccctcgacaatgattatggcagttgttactattactgattatttgtaacttctaataatccagaatttaaattggtcaaagacacgctgctcctcagggagtctgaatatactggtatcagcccagtgtccttccacactggcctgcagctcattgtgactgggccaactttggcctttgtgcctggcttctatgccaacctgccaagtccttgagatgctgtgcaccttactattttttgtcaggcctgctaagaagggggcttgtgtcctgcagatcaaggaccaataggaagccctcaccacaaacctgattcacagtactctctcctctttgcactttgcactgaagaatcatcctctcctccatacacattttttccccagtacagaacttagctttgtggtgctgggttattaaggaacccaacttgtatccactgtagttgtaatcttgctggtctttgtctgagttgcaaaacaacactcatggaagtcctcattcagttattctagagcacttgttgagctcctggtagaggcagagtgctgtccaccagatttgtgcctgatggcacagagaatgatcaaaaggaatcttgcaactggacatagtttctttagacagagacagaggtaagtaagtaacctcacataagtatcctaactcttattttccaaatgttaatgcttgactggcatgttataaagctaatttgtttatagttgtgccacataattatacactctgtacataatatgcttttgaaattattatttattgcacaaatattacaacagaaactgaactcaaaacacaaggaaaaatgtgtgtgggctcaccatttgtacgagtaaaacttttaatatatttgtgtgttcactcatagtccttatccatgaattcataacttttgcacacagtggaaatcatactgaagataccattgggtgttctgttctccccattctcctctccccatacaccataatattattcatgtatgctctcaagtttaatcatgtctgcrtgcggacatttagctatccttagagagcccataatttgaactctgagcatctagaggaagctgctgcccccagcccacttaggtactttcttttccccttgtggtgagaataggaattaggtagcaagagttcccagrcttcattgtccaaggctatgttagtattttcatcataaatcttgaggcatcgcctattaaagcctttttgcctttctcattaaaagaagagaatttagaaggaaatatttgaaagactctaagatgcccaggagaaaggttccaacattattactctgagtagaccaagttaggtgtgggtatatattaatagtaactaaacacctagcagtttggtgtattctggaatgctcttgacttgggctgaatgtgtctgatgctctaggtgttcttgctgtctctgtctgtcatctgcctgtcattctcctgtgagggtaagtagtatcccttcccagactgaggatggaaatgttgaggggtgtaaaatgataactcaaacctttccaagagtccccaaagtgtgtacagtgcatatgaaattctccaaaaggagaagagggatctggaagtgccactgggagtgagaggctggggaaccagtggagtagaggatagtagtggcttgaagtcacagagcaagaattcaaaactttgctctggcactagcttggtggccttgggcaaattacttaatgtttctgaatctttccatgaggaagataattacattgcccacctcacttggttgtggtcggtattaaactggataatgcaaataatgcacttagcacaacacctggcataaataataagcactcaataaatgtgaaatgttatkgttgttatttcctgcttcacattataattttattgctttccagactgatgtctccgaacttaggtagtagtggagtctgtgagctattttcagtatttcaaaatctatgaaaaggagacagttctggtcaccataataagtacatgacagatggagtctttgaaacatggtacccacaggggaagaatccagaaggggtcctttgtgttgaaaagttgaggcctcgagctgaggaagttagcaagtgcttcagtgaaagcttgtgggtttccagttacaatgggagtaaatagagggatgttgtgagcaaagaacttgattggttgctatgagagatcgttcccctgtggagcatcagaagttgatgcactctggagaccccagttgctctgtcatgtttaccagtttgtagaatgtgttatcactgccaagcaccttggaagcagtgagaaaactgccagacaaatggaaaccggtttctctacccaacttggtagaacatttgctccaggcaaccatacaggctccaggagacatttgccttgacagtgcctattttgtaaagctgtaatttaaactgacaaaacttgattttgacattgcaacaaggtctctgtagacttaacactatgttcattttcccatgcttatccctactggagactgatgggtttacaccaacatggaagctggttggaatggaaaccatccagaaaatgattagggagcttgaagctctctgaaactgggcataatgtgtattaagtcattatagttttaatgaaacttgtcttagctggggtctcttaaccacttgttttctagttgtaaatattgagtccctaatttacactaatgagatgctgttgagatttaacgccaatcttatactgcatttgtcaaagtgtaagagctaacctgaaatgtagctttgcaaaatattctattaaataaacttggtggagaagtagcaacaaacaaactgcatgctttcagcagaaactgtcaacatacacatctctgaagaaattcatattttatgccagggtggtctacagtagttcccattagtaaacggttaaatatcacccttccctggtaaatctgaatacttttgtgtctgttgtgaaatgctgtacacatcctcttttgatgatctgcctgggaattctccactgtgagaattgtctcttaaaaatgggaagcagcaaggcatagtagaaagaatataggcactggtgacacatatatttaggcctgagcccagctcccagttggtggccaggtaagttctttaacctccttttgcttattttttttttctccctgcaacatggggttggtagtacttatagggcagtgctatccaaacacttagtagaggtgataatgtaagtagtgaacgtagctcctgacatatagttggtgttccctaaaggatagattgaaagatatacacaccaccaagttgaattcctctcagatttgtccaaggccacccagcctttcttggccttttcttccatcattggttagtrtgtgttcttgaaggcagtctgattttatccttggcttaaaaagtggggaaatatttaggaagcctagcctaatgcaagagaactcatctatcttactgtaggatcaaatacaaatggtttttggattgtccattatttatctctcacttctcttcattagtggtgctaatggaaacacaattatcttcatagactttgttagtcacaatctcttggtttcttcaaatcccacaatagcaagaatatgttgtggtttttataatctcttttggttcctcaaacccaaagaaggacagtgagagggtgggagatgatttgagagggtatttacattcccaggattttcagatatatttatgattttatttttttggagacagtgttccaatagagaggtattctgtcttctcttttcttttttctcttctctctcctccccccaaatcgaggttgtaagtgatgtgagagacctrctgtgaactgctgtcaccagatcctgctatgatttctctttgttcttagttctggagtcatcaaggctacatggagacacgtaccttccactgatatgtttgctccttgattcagggctgagtgcctgtttgagtgattctggctacagctaaatgatatttctgtttccaatagtattgtaaactatagagtaagaattttcttgttgttgttgggagagtttgtttttcttcttagtgtgkattatctcccaccccactcctccaacccrttctttaaaaaacaaaacaaaaccaacaaacaaaaacttgcattgaagcaacacccagaaggagtgagcaggcctaggctggagtcttatcctgacatggtagaatcctgttactgtctcttcgtagattcatttaaattgttttgactgattcatgcaatctctcagtccattgatsaagtcaaaagaaaaagtatcactaaaaactcacaggactggtgcaggtagaatattctttatctatggaaaattcattatcctatctagaaggatgtcttgaaatagcagaatatttttattatgttttttttccaagtaatacatggttcaagaaaaaagaaattttaaaaagcyacactaatagcaaaactaaaataagcatgaatcttaattttaacaaagattacagtagtccatgggaaggattgtctgcccattgcagtgggtttgattggtttttttacttggaagtgctcatattctggaatgtgtttatagatcttgaccttagatacttctcctgactcagaaattgtaaaatgttttgctagagtagccagtggtgagagaccgctactgctgtatgttgctcagggctaacctgttaagarctggtctcgtcgctcagagagaaccatgatgctgatgccagtttcttgtttatgtaaaaacatttaaaaatgggcaagatactctctaagtacaagatagttattattgagatatgttcatraataaattaatgagagaggaacttgagataaaggaaatggaggagagaaattgcatttttcctgcataattactctcttgttttagaacacaagtagtcctttggcatattttcaaagtgtggtatgtttcacttttgtttaaacttgtcaaattctcaatgtaaaagccatttaagacttttttttccttcttttttgaaggttgcttcttttggcctcttaaagataattaagagctgtaatttgtgaggattttgatggcattttttggcagtggtagtgcaggacaggatacatgaatcatagcatctgcttattagcaaggtctcatagatcacttgtccaactttccaccgggtgctgagatggttggtctctgttatctgttcttcccacttctgctggatacattctgggaaaagaatttcattgatgagtgagctgtacttccacttctgaagtacaaaagttattaagctagggagcattttctccatttgacacctacaggccactcagtaaaaaagcaaatgaatgatgaatgagtaaggtccctgggctgcttcctacttcttcttagagtggttaaggccctcttgacatttttggaggatgataaatgtgtgcccttgaagtttccttgtccaggtcaaacagccccaatttctccatgatctttggacattgcttccacattttctctccttcttgctctccacagggcaagtttcatttcrtcaatttttttttgtaaaatactgtaaagatatctgaatgaagtagaccaggtataatctgataagcatagagtatggtggagcatttcttttaaggttctgggtattgttattatcctactaatggaaccagcatttgctggaccttttggggccaccatgccttagacaggtagataatggaatggcatagagaayagcctgaagccggctgtcttggtttgaattcagacttaccatttatgaaatgtttgaccctagrcaagttgtttaacctctctgtaaacttgtcttcatttgtaaagtcrggggtaatcatagtacttatttatacagttattataaggagtaaataaattagtttgtgctgagtgyctacaacaatgcctggagtgaaataagcactctgtgttagcttttattgaatttacaatgaaaaacgtccaggtcttactatctgaagtgcagttagttttttcagcaaggctttagaattagacagggctatgtttaaatcttagctctgctgtgtgttttgggggaaattactttgcctttctaagcttctgtttcctcgtctgtgaaaagggcattaaagaataaaatcagttgaatttctgagccctaattaagaaccttgagggcagagccatggtttacacttgctttttttcttctttcttaactttacctggtatgccatgtttataatcacwgctaaattaaaatagtaaatatttaaactgagttttcccttcagtctaccttgtagtagaaaaattaaatacttctatgttacttaaaactgcacactcacaagtttatggtggtgtattgattggttgttctgaagaatgtattctgcttgccaccatgaactgggcttcagaataaataggcttccttgatcacttctctcctcattaactactgtctggaatttagagggaatacaaagtctggtagctacattgcctactaatcttgcaaatggcctgtgaggtgggtaagcaatcaggtgagtgacaaaggttatagtcaattttcctggcactctgggatttatttttgtgtccttgaagttttaagcaagtgagttttgaggttgttgagaaagtgggagactatattttaaaatggtttatagttattaatgttttcaaatcttggtgggattttaaaggtgggttaagctgcgaaagtgaatgtaagttaaagccagttaaatagaggagtccctcgttcattctgtctttggtatgcttaggatttcataaattttatgggtttcaaaatctttgccttgttttgaatgtttctaataagatggagtgaagtggcttacacctcatgagacatggaacagttatccaggaatgctgcttggcacacatataaagaaagcactggtctattgattcataaaaaatgtgtgactgattttcctgggacatgtgcattattttcacagaagaatttcattttttacttcctcccaccctgtgcatcacttgcacacgtttgcaattcatcaactctgatttccaaaacttctgccccctcttcccccaaccacctccatccaactacctaaagtgaaatatattagatggagaggagggaaatttccttaaatgcctaatttttatgtctgtaaggggcatggtgaatttgagaaatggtctgaatgttagcccagatgactcaatgcaattatgaaacaaattggaagctgtttccatgaaagagtatgtatgcatgtgtttccacgaaaggggtgtgtgtgtgtgtgtgtgtgtgtgtgtgtgtgtgtgcgcgtgtgtgtgtgagaacatgtgtttaggtcagttctttcattcgttctctttcttcctcttctttttgtcgtttcaaggctatgttttaggttggctatacagcaatgaggttgcactacacagcctcatcccctaaagccaaaatacagcaagtagaagactgcttagctcatccagtgagaatctcatgtattatattcttacttgccattgagttgccagaaaaaaaataaatagctttgtcttagaaagcaataacttttctgcaatgaaataacattaaacaactctacctggtatgccatgtgcattgtttttcctttcttggaaaggaaaaactttcttagaaaacgagggcacacaatgattagcgctaactttctctttcatgtgtccaacttaagattttctagtgaggcagagttatttccccttacatgcttggtttaatggaaagggcctggctttcagttttgttcatattcagctaccaagacccaatcagttaataactttgcccagagttgaaagaaaaattcctctgggtacagagttaaattcctctgcgtgtggaaggccatagtggttaaaaagttaggcttcggagccagatcaacatagattcagatgtgcctctgctgctcaatgtgtgatgagggcaaattgctgaactcaagtctcaagtttcctcatctgtctgatggggatcataacgcacatcacctgacgttgtaataattgcctgacaatgtgtataaggcactcgtgtaagatctggcacttggcaagagtaaaatgcattttagcctatactttttactcttcatttgtaaaattgtggtaaagggattggccctggagggagtagggtgaggtggcattttcaggaaggtagcacaaggttacagggaggacaatagaaatgtacaggatggctgaagactcagtaagtaaatagcattgcttcttacagcaggccggaggagatctctatatttttctttattagagaaaatttaagggatattgatttttaaagggaagatttatattttaattttaaagaggaaaatttatcagctcctatatatttattagacattttgggggggaaacagtgaatgaatgagactggtcccatttgatgtatgctgtcaaagtttataaactatctratgaattagtaagaacatatcaaacaagacaaagaggctcattgttaatgtgcgcaggtgaggctttgcaggctgcttgtgggtgagggtaaaagttttcttaacctcaagcctggattctgaccatagaaacattcctcctgagtgagtagtgcttctagagtgctttccttcaaggacctctccggcatctggctcaatcacatgccatctttttctcctttacatctgcttccttgccccactttggcacccagctaagtgtgggcagatggtgtggccttggggactccagaagggccttggtgtccttcagtagcatggagtgtatagcagggtctgcccgtgaaggaccagggaggtgaagggccttacaggactcatgtggaatgcttgtgaatgcattatttccaaatatccctgagtatttgcaagcgtttttatatacctttacttccattttgctttgacaacaccattaccattcsttgacgatgaggaactgatcggaaataaacctaattgttatttgcttaacagtttcaagacctgcaacttgcagcagtctcctgacggtctctgtacattttctctgtccccttctaatctattcaccacattgtagctggagtgattttttttttttaaacagaaatctgatcatgagctttcttggtttaaaactccttcacggctgccatttgcttacaggtttagggctgaaatccttgccatggcttggcttacaggactctgtgggtctagcctctgctgactttgctcctcagcaccaacctattcatctttcatccttccctctttccagaaaacctaaaggtggagccctgtctrctccatctgctgccctggttactctcatccagggcattcattctctttttataagtactgtgaggccttttcacaatttgttactactgcatagttatgtacttatttcttgccagtctccctcacaaggctgcaaacttcaggagagtgcagaccgcagcctgttcagtcctcatggtatatgaagcctgttgcattacaggtcctgagcctccatttgttgaataatttcattaattaattaaccaattaattaatttcctctaaagggtttgaaaccccaactattaaggcttatgttgaaaggacaatttaaaggaaaataaactgttagaagagggagagatagaagccccagaaacttggaatgagtcagatcttacagctgagcaggaacscaagctttgaggaaagctttatttatttaaataggagtctcataaggaaggcagaaaaaggaaacccaagcagatgacttggttcctattatctgctgagaggaagctcatctggagtgatgactttttcctggcactaaatttgacctgaaaattataaaatgaatccatacagaataaaaaataccctcctgctcccattatggatgatgtcttctattgtagtttgccgaagggacagagtttgtgagagggagtgagttgagatgaggtggagatgaaagcctgtatataatttagagagaacttggggcaaactagaaagatagcctgtggtctgagatgagggccgatgccacagacatggggacccctttcctttctggcagcattttcctgtgtgtattctggggggccttcaaggtattctgtgacaaaagggttctctagtcagataggtttgcaaaacactgcgtattatatcctggcccacccttgaagttgtataatgcataccaataaataaagaccctgagaagtgagagtcttatagtgaagagatgtttagctgtttaatccaccatttttcaagcttatttgacctcagaaaacataatcatagaacttccctcaaaacagacctgagtaatgctaatttaggagttggagagaacaagaagtaccagcatgagatcaaggtagagaaactcaattatctttgtagaaacatttctactttgaaatagaaatagaatgatctaagctgaaatagatttttttgkgtgtgttttattatagtagtggttggagtaggggtccccaaaaagtaaggattaagggagtgaggatctttcctttatgaaaatggtatggaccmgtgtcatttaatggagggttttggtggttaggaggacaggctactgggtgtgagttcagggtctaccatgttttagctggatgacataagaaattgcctaccatcacagtgcctccttcctcacctgtgaaatgtgggtaataatagtaatgactacaagagctcttctaagaattaaatgtgatgatgcatgtataatgctgagaacagtgcctggttcaaagtaagagcttaataaatgttagctattagtattgctgattaaagaatgccaaggaattaataagcatggaaagattggagccctttactcagagcaaaatctagaaatgtctaatagccaaaatattcttctcatggggccttttccagcttgaggcaaatgataatatgtttagaagctgatggggtaatagtttcccagctggagaaaaacctgagtcttcatacaaggagagagaaccacaatgtgtgttcctgcagtactgctgtggaagtcatgctgtatgcaagtacgtccaaatcaataatcataagtagccccgatggctgaacccaaagtctttctttataatcttttatattatttctttaaaagactctgcctgtaaaagaatctgaatctagtaaacttactcgtgatttaatttgagctctgtttgaggtgttggctctgtttgttgattatgccaggttcttttyggtttctaagcagttgaatcaagtgatagaatgtctggttttctagttgcttcatacatgaagttgcatatccatccatctatccatctatccttccatccatccatccatccacgcagtaaatatttatcagtcaagtactactaaccacttccaatttatgaagcatcctcacaaagcccccaaatgtggtttaaatatagcactaggaattctttaggcctctgaaagttacttatgaaaatgacggagactgttctgtcttattttcttatcctcctaatttacaagttctgttctgtgtacactgtgactctgtaagagtagtgttggagactagattaaatgtagatctaaaataccctgtccataggcagagataggtaaagaatggctaattactaaataattaataatagctggtgatgctgctggcccttatttgamctttacataagcacagctgcctctgggctcatcccaggggctatctttatcaacactagagtgtgataataaatgagtttctctaggaatttttctttttgttcaggcactgtctctgaagagtgttccatgggaaaacaatcctcatgatatacatttttttaatagataaaactttggcagatccattttcaaccctggcattcagacctcctaaaattgctatyagctaatagagatttaggatatagaaagctgggaaggcagtcaaattggttcccggccactaaggccctgcatgcataagtatcacatgagggctatggacaccaagaccaatcaggccaggcttttcaggaagctctgctcagaatcaggtggagaacattcttaagcagtagtcaattattattcttgaatattaatcacaattagtgcaaaagactacctcttgccactaccagaattattttgtatatagagatcttatatgagcatgggaaaatttattttttaaatgctactctctgggaaacaaagtcattcactcaccaggtgtttattgagttaattttacgccagacactttgctaggcctagtgatacaaggtgaatgaggcatggcattgcccctaaggaaatataaaatagtatagagtttcaacttaagtgtcagatccaatctattaattggtagtggctgcctggaggattgtgttggggagaattctgaggctttgtctggacacagtgattgattagaacaatcttccttgaggatagaaaggggataatggtagatgtaccacccattttctgtacctagtcttctgagagacyggcaggcagttgcagctccatatgttaggtactataggaggggatcatataggatactctgggaacacctaattctgcacatggagcagaaaatagcatcacaggcggttgaaactttgaactgagacctgaaaattagtaggagatcccccccggtgaataaacaagagaagtgcattttaggcaaagaagcaaagttggacctggaagcaagcaatggtaggatgtgttgggaaaggcaaattgttctttgtactgggaaactttgccaagaccagatctcactgaaggatttggatgttaggcccaggagccttggaggactgtgagacaacactaaaaaaataccgatccttgaaaaatattaatctgaaaagaaggcactgatggcaggcaccctttagagctctggcctctggtctgttctgttcaacctctatactgatggcttggttagacaaagatgacgtgcatgttgatcagattaatagaagacacartgtttggaagttttgtgagcctgtggrtgacttaatctgaaaccagatgtctcaaacagcttgaacaattccaaaccagaggatatttgctagggaaaatataaattctgtactctggctgaaacaaccaattgtacaagagcaggatggaagaatatttagcctggcaataatatgtgtgacaagagtyagattttggttacaaatgtcaccagtctacaatgtgacatgtccacactgagaaaatagtaatgatgggcatgaagagttctaaaaaagttctaatcatcctgtctccttctgtcatgggcctactacaaaaggagtgttcattttggtaaagatgttaagataaaaattagctggcatgagtccagaggaaaacatctaggctgaggagatattttggttgatgattttagggttactaaacccagaaagagaaaattaaggactgtcttcaaatattttgaagataatcagtagcctagcacttaggcttatgttgtatggagtgatgaaaaatgggtagacatttctggaaagcaaatttcagctcaggttctcaatgaagcctccaatgatgggagcttctttgaagtggaaagggcaaataataagtttcctgtccgagaagtgaggatgcagagaatgggttaacacttgttggaaagattgtagaagggatttatgtattagatattgtttgggctcaaaggtccttccaactctgagatttttttcattctagaggaaaaaaaatatccctacactgtactgtctttgaagccagaaaaagaacatctataaatttgagcccaacctttaagttgtgtctcttgttggggcaggtttcttgacttgctgtgatgacagtggagcctttctatccctcatctggactttacttgttgtaatcttaaaagtcctctctctctctttttatttttttaacatctccttcctctgttttctgggccactcactcaaagacaccccataaaatatttgcccgggaaagaaggcaccttccaataaaaatacctataacctggaggacaagacacaaaagccttatttctcagctctgagcttttgttaaaacctgtgttatgactgggtgaaatgagctggcctcagagaacaggccagaaaacacagggaatcctttggctgattggcatcctctgccattggtgactctccataacccatgttgttgtctctggccgccagcaccccatcagatgttttgccagcttgagttctgagtctgatttctcatgccagcttcatcttggtgttgctgaataaaggagtttcccaccatcacgatacaccttcccctgcccctaggagaaatcttcctccagagggatgggcagccatgtggctaaatgggttcctgctcagaggcgaggaggtgaggaagaacacagtgcatgtgctgagcagagatccagctcctactcctggtttcttccaaaacctgcctgttaatcacctgtttacattgccaagcatgcttgactgggtaatgatagtagggggaaaagcagtgaaaggaacatcacaggttttactcaagtggagtaatcccttcctgatttacaggcatttcggtggctttggtgcagacagagtggctggtctcattcttttcacaccaatggccagcagcccccagaaagcagttggactcttcgtacccctttgatgtcccctcttgggtgattcccacgtggagggtggtgccactgggcttggttgcagtctgccaccccaccttcccagttagcattcccacctgctgttcctggtgactcttggtaaagtcagactgttggtgcctgcacttgtgggtgttatgtgagggacacatggagaccagtttgctgtagtctcttctctcactggcctgccccggtgccatgatctkaggataccacagctgaaagggaactcagaggtcatcaagcctgacccctttcattttggcaatgaggaaacaaaggactaaagaggtgaaggaaattgctcaaggtcacgcagctagttggtgacagggactgcagcctcagccttttgattcataaaccagggatcctttttctctcctaggttaaagcattgcccttttttaaatgaatatatttatttattcagaaattcagcaaatatttattgaactgtgacagagatgaataaagtctgtctccacaaacaactcatagacctggggaggagacaggggattatacaaattaactcaatgtggaaagtgctggtaaatggaggtaagaatagaaggctattctttmccttctccgggaaaagtgcctgacttgtgttttggttatggtgtgtttttttttttgaggagagtcakaaaaggcaccaaggtaacctggagacataaaatagcatagtgacccaggaaatgggctctggaaccagactgccttcatgtgaatccaagcgctgctgctcacctgctgagtaactctgggcaagttgctttttgtgtctctaatttccactctaaaaatgtgaggaaattgataatacttatctcctagatttattgtaggagttcagtgggttaatacatggaaaacactttaaaagtgtattggcatatagaaaaaaacataatagctatcattattaytattatttcaagagctgtatttgaatagtatgctgagtaatgagacagatccttatgtttcaatggtgaccaaagatttagaaatgttagcatagttgccagtgaaagatgctggttttgcttggggctcctagggaaaccaggcacgtagatgggaatggacgggtacagtctggaagcagtggatgagaagggatttggggaagaagaaagccagaaggctagcatttcttttttccttcatggttttatctaagttggggccacagaggggtgaatattgttctgttgaacaaacagggggatatggcagtgtctggggctttgggggaycagtggtggtttctgggtatggcttttgttctgaaggagcttccttccagaagtggggacgtgtgcccacagatgcctgtgccctgaagaggtgcaacaacgaggtttctcttttgggaaagaggagagagaccagtatcttaagatgttgtcatctggttccaattttctctcctcacctctttagcatctcttacctaattatttgcttcctgaaagcatttttctcccaagagtaggtgcccagagatgcccttgggtataggatcaatgcaaccgagcagattgattcctccaaacgtgaaccctcatatgttagatcagtggtccccaacctttttggcaccagggactagtttcatgaaaggyagttcttccacagtggtggggggatgcttttggaatgatccaagcacattacgtttattttgcactctctattattattacattgtagtaaataatgaaataattacacaactcaccataatgtagaatcggtgggagccctgagcttgttttcccacaactagatgatcccatctggggtgatgggagacagtgtcagatcatcagacattagattctcataaggagcatgcaacctagatccctcgcatgcgcagttcacagtagagttcacgctcctatgagaatctaatgccatcgctggctgatctgacaggaagtggagctcargtggtgatgtgagcgatgaggagtggctataaatacagatgaagctttggtcactctcccaccgctcacctcctgctgtgcaaccccgttcctaacaggccatggactagtactagtcgtggccctggaagctggggacccctgtgttagaccatttcatatgggctgcattcttttttggaaaatgaggtggttgcaatgcatggttcttaaggtcccttcttagcacaaacattcttgttcttgggccctggtattatggatattayacacatggtttttgctacttgccagggatccgggaaggtctgtggcacccggtaatttataattctgctgaggcaaggatttggccagaaggagtcacatggctggtgagtcaacttagctgatcacccaatctccacactcagttcctggcacttactaactgaggttgcaaaggtctctgcatcttctccttcagaatgttgaaggttggctgctacatcattttcccttagatttagagaagaaaagtttttctactagagctcatatttctctcttcttccatagcggcttttatttaaactattaggagagaaaaccctccatactcgaccacccacctccacactggcacaaatccagcctaaatcagaaccgtcagctcaccctgagccgggctgtggacttttcttccaggcaggtgggataggaatgggagttgaagtttgagcaacttttgaattattgcagttacctggatatatgatgtttttctgctgtgtataaagtgggctagaaggatcctcactcttccacactctgtcctcctcccaaaagaatttcctatttgttcaaggtgcaggaytgacagcccaggagaccttgtgtctccacctgggcaggtcagaccatggcctatgtgggtggcttgcagcatgtctgtggaaagtgggcacagaccaccttwgagggacaaaggggcggttgtctgagggcccctttaggagctcaccttcctttgccctactatttcctgttttgttttgcgttttgggatggggggggtttggggatgtataggccatgcttgttcaccctgagttgctgtcctttcttcccataacaatgtctgaagaaagaagaggagggtgggcttgaaattgtgatggggctaatgcttattttgaatacatgaggtaattttttgggtttttgtttactttattcttgctgttgaggtataattaatatagatgaattatgtgtttggttccatcagtcttaatagtcatgtccactcatgaaactacctaaagcaagctatagaacatttgcgttatttcagaaagttcccttgtgctcctttctagtcaattgtactaccctgcctcccatccctactcccacacctctacccagaggcaatcactttctggcttctatcaccatagtttatacacagggtaattttaaaaagcgtgtattcactgcaacctgtgtaaatccaaaaagggttacagttctttggggactgtttttaaaaaaatcagaaggctggagctagaagcagctttctcccataccttgaacaaatctttgacaatgatgggcctaggtgacctgatctctaaaacrattataataataattcctaccacatagcagaaaatgataataatagctgcatactgttattgaccacttcactcttctgaacattttacttcattatcttatttaatcttcaraatgacaccttgagatgtgtaccattttttctattttaacacatggcgaaaccagagctttcagaggggaagtaacttgcttagggccacagagcagtcagtcataattcaaatcaggagcctttgtgtccagggctktaacctagagcaggcctatgagagacggactctwgtgaactgaagtagcagctaagcagaggtcattattattttaaaagcagtatctattggtcagagaggacagtcttcctttttttctattttattaccttttaaatatttacatagaaaaaaatctagttttcagaatgcttgacatcagtgggtatctgcaaattagaactgtgggtactaagtttaagccttgtgctaccaacaggaaacatgaaaaaaagtctgtcgttaagactgatgcccagctgggcacggtggttcatacctgtaatcctagcactttgggaagatgaggtgggaggactgcttgagcccaggagtttgagaccagcctgggcaaactccagatagggagatcccatctttacaaaaaaaactttaaaaattagctgggcatggtgcatgtgcctgtggtcccagctacttgggaggctgagacaggaggatcagttgagctcaggagatcaagactgcagtgcgctataattgtaccactgcactccagtgtgggtgacagggcaagaccatgtctccaaaaaacaaaaaaagactgatgctccttctacttgtttctttcccacagaaaagcattgtgatggatctgtaaatattatttataaatataaatgacaataaagtgaaatattaattgatataattatcagtgatataatttaaatttttatagctatcatttgagttcctaatatgtgccaagcatatgctcagcatttgacatatattatttcaacatataatgcataagagacattgtrttagttatctattgctgtataaccaataaccccaaaatttarcaggttaaacccataaaagttcattatctcatatagtttctaagggtcaagaatccacatgcaacttggctgagtggttcatgagattgccgtcatgctgtcagctgcatctgcagtctctaaaggcctgaccagggctggaagttctgcttccaggctcactcagtgacttttggtaggaaaattccttgacatatgagcaaggaatccatgagtctgcttaagacatggctttcccagtgagtcrtatgacagaggaggagagagagagcccaagatggaagtcacagtcttttataacctaatttacagaagtgacatgccatcacttctrccatatactattagtcatagagtttgactgtggtaaatataggagggactacacaaggatgtgaaagccaggaggtggaaacactagggctatcttgaaggctggttaccataggcattattagccccattttactgctgagaaatgcatgctcagagaggttccataagttcccaaagtcatctacccaggaagtgagcaggctgggatttgaacactgatctggtgaactgcactgcctgtatgctttccagaatgaatacccaatgcagagagtcctggaagaaygaagtgcatgcarccctggctttgggtattctagcatgtttctgagggtgcccccggatggctgtttgctcacagatacctatctttatatagttagtatgtccctgaagagcagggcataaaccaaagatttgcaaattcaattcatttcagattcatgatggaagttcaatatttaagggacttctgcttatatcttcctgtatcacttggtgatttatcattggcttttaaataagcattcaggtagtggagtataccagtagtattgcaattgtgggtgaatgaaactaccctgaagggaagattttgtttttctcttctagagtaaatgtggaattcaatcttatttaaaaatattttgagatccaagaaggatactaataaaccatgtgaaagtctagttatgtttaagattctaggtggttggtgtatagatggtgttttcccagaccatcccaagccatcctggcttaccacatccagaaaagggcatttttatagttgcctccactgcaagaggacctgaccactgagatacatcttcctgtcgtgacctacttaagggaatttcattttagggaaagaattcaggaagattatatggtctgtagctggcctattaaaaatgtaaacatctatctgctttttaatgtccataccaagcaaataatcaaagttacacatacttctgaagctccttttctttggagatctcggactattttatagaaacaggaaaatgtcacctttctagtcctgtttaccaactcatttttcttattaatttgctaatctgtcctgcctaggttaagggaatttgttattcattctactcatttactcatttaacacttatttcatacctgtcctgtgctacatgtaataggtataaaattccatactagatatgaggggaaaaaagatgaaaaagactaatttcctgccctcagggagctcatagtccaatgggagattcaacaaagagaaagaaggttacaactcaaggtaatctttgatttgtcaggagtcatgcaggaaagagtaatttactctggttagggagtactgaaagatttatcttgggtgatgatggatctagaaggatgagggggagtttgctaaaagaagaagcaaggaagggaaatgaaagtttggggtggtggtggaggagtttcaggtagaagaaatcattcacaaaggcataaaagtgagagacagcctggtccattttggarcaagaaattgggccataattgatgtttgtatctctaccttccagagtctcagaaactagaatgtttttctaggactgttccaaatccaaatgttgtctacggccataccacgctgaacaygcccgttctcatccaaatgttgtatcatttatcmcccaaaatatagtgtatgacaaggagctcaaaacttattctcaatgccatgactaatagtgttttaaaactatatttttctgcctggtgttcatcatgacccttggggacatatctgggacatgtcacatgggctcaccatgagtcaggtatgggaatgtcacatgtcaaactacttttgctaatcaaatacacaaaatgctgattccctcactgttcttgagatttgcagcagtcacaagttccagtttgctaagaaattctcctatgcctgattggttatattattgtttccatctctttgcatcattagggccctgttgttacaagaaacagcaaaataaaagtatttctcttttcgttgtggtaaattggaaataccctagagactgtcaaagagggatgtgaaaatatttcagaaatattatttcatgcctcctgactacaggatggtggygaggactccttygtctgaggcacttagagctgttgaaggtgtgttgcctggaaatgcacctcatgggaagacttgcaggtgtgagcggttgcctaggaatgtcatttcaggattggtaagtgtgatgttaattttaggtgtcaacttgactaggctaagggaggcccaggtaactggtaaagcattatttctgggtgtgcctgtgaagatttccagaagaaattagcatttgaatcagtagactgagtacagaatatctgccctcagatattcatgcctcgrgtatgcatcatccaatctgcagagggcccggtagaacagaaagatggaagatgggtgaatttgatgtcaccttgagctaggacacttatcttcttctgtctrtggacatcaaagatcctagttcttgggcctttggacgctgggacttacacctgtgctaccctaatcctggttctcagacctttggactcagactrcattataccactgactttctggttctctcacttggcttttggagatggcatattgtcggattgctcagcctccatgattgtatgacccaacccccataatgaatttctacatatatatatcttcttggttctggttcactggagaactctaattcagcaagtcaaaggaggaaagtatattcacctttagtttgtccctactacttagtgattttattcacttctactttaattcaataagcattcattaattcacttctaatggaccatgaatagtgctaggtgctggaaatgcaaagattaatggactatgattaagacacagttcatttccttgaatctcacaattgaataggggaaaaggtacaaggaacggttatactatggtgcaaagatagatgtgtacgggggagctgggcacttcgctgcatctgggagggcagrggaggctctgaaggagatgataacaaattggatctgaaaagatgagttaagaatctgtctgacccagaggtttcatgggtctttaagcacattaaggagacttgagtgtggtttataaggtatgatttgtacaaaaagcacaaatcatattcctgtaaacacttgaaagtatcacagtttcacatccatgtagtgagctgtaactatgtttattgtatatttattgtctattttacagatgtgaaagcctgagaaggcagatagataaatgttacttgccctaggtcaccaaccagtgattagccactgaggactgaaacccagtattttttttcttacagtaaaacccatgcttatggaagtccatactggacagcagtcttgggtttggctaagctctgccaccactaatgagccctgtaaactcggacaagttgccaaccttctctaaacttaggctttctcatctgcagagtggagggagtaggacttgaggcccttctagctatgcagtctgtgatttctagagacagaacagggaagggcaataggggtgacaggagagaccagaagctgccgtcacaaagactagctttatggcaagcctgtttcccaaaagcacaggcccttcagtggccagtgaaactgatgtgtttggatttatcaagtagctttgccaaggaccagctggcagaagaaagcaaaaagmagcacggcagatttaaagatgagttcatttctatggtgtcagccgcagagggtgcggtttccctgtctctagagtggtggacacagtctaccactgtgtttcttcgaggggagattgtgcatgtttcttcgaggggagattgactgtgtgcttaggcagtaaacatcttctgggcacagtgtcactgggaggatttttgtattgagagggcagtgaggcgtgaaacctcagactcctgtggtacttcctgctacccagtgatgtcagaggcttgctgctcacagtccccagcttagggccctgtttctccagctctctgcttacatcatgtgggagaggagcagcagccatgagaaaacctagctcctggaagtgcagagatagagactgggataaaagaggggggtaaaaaaagaattcattaaatttggccttgaagatggttatttacttgtttgctgtgcttgctaatatgccatatgaatagaaaagaggctgatttttgatgacaccatttcaagagtatccttcatgatgtccaggttaaaaggtttttgtgggtttcttaattttgttgtttactgactgggcgtggacatatggactcttattttttttctggttgcctttgctacatttacaggcttccgtgtttctaagaaacgaagcagccgtcttttcatcaattaatggtatcaaaagtatcggtaatctctggatggtgctatacaaagtgggtcaagagatatacagtggtccccccttatctgtgtcctgggaatatgttccaggattcttggtagatgcctaaactgcagatagtaccaaattctatatatactaaacatgaatttctttttccttttttacaatttcatgcatagaagattcatttttactgtagatcttagtgacctcagcatacgatttttttctttcctcattaagtcaagatctttttcaccttttcacttcaatcttttaccttatcactttatagtttattggcaaatccaaatgccagcatcactactcttgtgcttttggactcttagtaagtaaaattaaggttacttgaacataagtgcgtgatattgtggcagtcgatctgatcaccaagacagctactaagtgactcatgggcaggtagcatagaaagtgggaatatgctggacaaaggggtgactcacattctgggcaggatggagcaggatggcccaagatttcattatgctactgagaatggtgtataatttaaaacttacgaattatttctgcaattttccattccatattttcagaccatggtaccttgggtaactaaaaccatggaaaccaaaactacagataaggggggagaccactatattctaaaagtttataagagaaagcaatttgatggtgatatcaaatgccattgcattgatctctgcaaaaacccttcccattcattaatgcattcctacatacatagacatatagcctcccatcatcttcacacaccacagacaccttacatttgtgcacttgatttttgtgaagctgatgtttatactgatcatgttcaggatggggctcctgtagcacaggggaggtttttgggacaggtgggtaagagaaatataaggaaggaagagcaaaaaggacttgattctttattgtttatacaccaaaaccactgccttatgcataatccctccttctgggcactgggtagtgagttggcaaagtgagaaagacgaaactggtagttacaaatattctacaaattgttagaataaacactggttttcatttgagttggccattaggttggaatctgcttggccaaaaggtcaaaaccctttctttggcaagagtgatgcatcttaagtgtactttattttgccaagtagactaaagaccttcaaatctttgacagaggtgtgggaaatcctacagcacatgttttctctcagtctagaaaaactcctggacgtggattacaggagcttttagatcttagaatgctctttataaaacatatttggatgacacatgacatggagaaagttatggcatgcttgtgttttatgtaagtatgtgatttgatcagggcttagaaaagtttatcaagctttttagatataattttgtaatctctcaagatagagatggcatttaatggcgkgatagttggccaataaaggtcactggacaatttaacagaatgttgcattcttgtaatatattcttgttcttctttgaacacaggactattactcagatttagaaatactagttatctgcatttttcttcattgtctctgttagacagtgggatatagtattgtctttagtttggctacactgctgggcttgaaactgtgggtaaaggctaacactcacttaagaaaataaaccatgtatcttggtttcatgaagaagatggttagacctgagaaagaggatgatctctgttgaccaaggtggaatttgaagtggaggtagtgtgaagtcagggtgaggttttggcatgtttagtctcccagacagaaaagatgaaggccaagaattgatattcacacatctcgattaggtacctggcatatcattagcctttcttgaagtcattgattcacagactgggctgatagtgaattttgaggtgctctgtcaatctcttctccctgtcattttcccaygaaggaaccaagtctcagagttgagatcattaaccgtgaacatttaccagctgttaaatagatatgttctttgataactgttgaaaaattttacaattttttcttttcgtcttgattctaggtgccctatgattttctttctattttgtcttgccttttttatttgatttgatactgagtgttttgtgctcagaaaataatacccagtggtgtcttggagttggcatctgtgasattagaactatgacccctctaagttctggataccctctgttcagtaaaagggctcacaggtcgctagatggacttggaggtcctgatatccagcctcctctaagatgaacgcttccacctacagtgccctagatgagtggctaacccctgcttgagtctttcattcacaatgtgcttcctccttaaccaaaaaagccactcccatcattacatattagatttcatatcatatcatatttattcaatgacttctatcagattgttaaaaaataaggatattttgttaaaaaataatataaatataccctttctgaagttgttttgatagctcctttgatagcaggtggaatttttaaacaatgkctttggtgcctggattgtsaggattttgcttggattctggtggcatttctgaaaatgtgactaatgacccctccagtgttctagaatctgtgttcagtaacttgaactccatgccatctgaagccttctccaaagtatgtgctgggtccctcctttactctgaaagatttccataacacttggtagacactaaagaatgcttcctccaccttctccttcattataaactgacttgttggacttaacagttcctttctcatctaatcaaggagctggattctgtttctcaataatgtaatcacagtaagatggygatattggcgaagcaccggaaatgactggcaggacactggggaaaaactgactagtctacagtttccttagaagacagcctgaaattgcttataagcagaggggagcaggtcactgaaaatgtagactcgtgtgtgaacacatctaacccttgatttggggggcattggggggctgctttctggaaagccccttatgtatgccttgcacacccacatctcaccttggagccttatttcagatgcagaataaaaagaccagagttcgagttctgactctctattaattattagctgttgagcttgggtaaatcccttaatctctttgaggttaataataactaccccagagagctattaaatgtgtcaaatgaagtaataggtatgggaatgctttgtaaactctacaaggtcataaaaagtcaagctgttgttattaacagtattttctgtaaaattttcctggctattccagctctcaggattttgcatttctcttattcactattggtactgccctttggccctttcacgtattcatctgtgatgctggtcagcccttcccctggatagaaattttctctctagcaagtttatggctttcatatttttaattttgtactatttttaaaaatgtaaccttcgacaaaataaaaggatatgcataacatacataaattttaaagcataagactgttttagtcaacatttattgagaacctatgaaatgcttgacattgtaccaggtcctggggatacccagacgaataagacaacccttgccatgagacatctccctatctgagagtgggcacagatggcagtgttcatattcaataaacaggaaaaagggaagagaggcttttccacttagtgaaatcgaggctatgttctgaaagtgtttactgttttccacataaagtttccttgtttctcggttccttctttctttttcctaaaatgtaagctcaatgagtctttaagctatgtcttccakaaatattttttgaacacctactgtggagctaggtacccaacaggacatcagcagcagaagggcagagatatttgtctcttttgttcactgatatattcccagacaatatctgctacatagaagtgcttaataaatatttatcaaatgaactgtcacattttattagttaatactagctgtcataactgataatccttggtaactcaaactcagcttaataaaataaaagtacatttcttgctcatgtaaagcccaacttgaagtagattgaatgaccctgctccatacagtcattcagggacccagcctgcagaggttctgccatcttcaacctgtgtcttctttagttaacttactgccaatctccagccaggagacagaggagagggaaggcgtggagggttccaaaagggcctttttggccggagctcattctgttgtctgctacatttagacaactggaggggttggggcaagaaatgtagatccttgctggtctcatcccagcaataattttgcatattgaaaggagtgcacaaatctttgaacagctggccatctctgccttatggacaaaatgccatttgttttctgttcacatgtgggtctttcatgacctgtgagctccttggggtcaaaggctatatattattcaattctgttatccctagttcctagtatagtacagcaggtaaatagatgttttctgaattgaaagtaaaaaaaatcgtttttctgttggatgtcgggcaccataatagatgcttacatttttttttttggataaaggaggtttttttttaaaaaaaggaaagaataaaagaagaagaaaccatttgctataataaagatctgcaaagcatggtaccgggttccaggatggtaggtgttcaagaaacacatattgaaaaaaagggaaagaaaaagaagagaaagagaatgaaaggacaaaggaggagggaaagaaagaaggaaggaaggaaagagagagagaaaaaataaaaaggaaagaagagagggaaagtagaaaggagacagaggaaagaagggggtgaaagagaagttgaacaagaggaagaacagggaatgaagtgagagagggagagaaaagagggaagagagagagaacgagaacacaggaggttcctgagaggtaagttgtgtggcgccgtactcactgcagagggagtttttccccctgcctaggaggtcagggaaggcttcccagagagaccttgctctttggcttctgcttttcttggtccttctggcctaatttctgcaactttatgatctgcccaccccaatagaggacaaaaatatctccctgttgtctgatggggaaatgaagttaataaatctcctggaaagtttgtgcttctccatggaaacagtacataaagtactcctgccacccaccaagaagcaccgggacgggcaaagctctccatcacacaggacctgcttcttcaagcctacagtttctcaggccaggttctgtgcagcccagacacagttgttcagatctggggtgtggaccaggtggtgccagaggccctaagaatactctgtttactttgccttcctcatcagtctctttcattcctaactcactgagtttctccacaaaatccacattcagaagattttcagtaatttgactgactgtagcagcatacacagccatgagtatactgtgcccagatgcctgccagagtctcccgaccacaaacccagcacgttgatagttgtgtccttgccatatacacagtggaatcttttgccttttctttccttttgtgcctttaacattttcccctttgtatctcctaaatttgcatactttgtagcaattcttcaaaacgatattaatatgcccattttatagatgagggatctgaggctcagaaagtttcagtgtcttgtttatgctgcctggcatcagtctgaattgctccgagccttaagcccaagcctcttttcaacagtgctgcagccctgtcaaagatgtacttgtgaattcaaaacagcactcaggcatataggttacattggcaccaggaaacctaagcagtatttccatgaccaaattctaagtgaattcaacaccaaaggagaaaaggaaatgttctttgctctctgtatagattcctcttctgcttgcttgggttttacaaagttcttctaatttttatgtgcgattggacaatgcagttttggtaaagttgctaaaaccataactgttactcttggttttaaatatcaaaccaggtaaaagggagggaggaacttaatgttacagaagggaaaaatgacttaaatatccgaacagacaccatatgggaggctttttactcccctttcctcctttaaaaacagtgtgttatttctccctctagattccagttactatggagggatttaggatttagtgagactagtgttgctgaattagctttgtaagacaagtctgtttactttttatactaattttcatgcttaccactgactctgattagtttgaagaaagctatttctaagaatctgttcttaacattatagaaaggaaaagttggccgggcgtggtgactcatgcttgtaatcccagcaccttgggaggccaaggcgggcagatcacctgaggtcaggagttcgagaycaccctggccaacatagtgaaaccttgtctctactaaaaatacaaaaattagttgggtatggtggcaggcacctgtagtcccagctacttgggaggctgaggcaggataatcgcttgagcctgggaggtggaagttgcagtgagccaaggtggtggcgttgcactccagcctggacaacagagtgagactccatctcaaaaaaaaaaaaaaaaaaaggaaaagttaatgatttaattttctttagctgggcatctggtaaccatgtatcagaaggtgaagcctgtgaggtgccttagagagcatggaatgctgcccccatcccatggattaggaaattgaggtctgtgtaattaatatgaataattattaccatttttcttacattaaaatatattaaaaaccatagagaaaaagacacaggtgatctgcaattccatgtctaaaggaagcccctattaatatttttatttaccactcatctattttctattcgtatgcattatatattaatttaacatcttgctgtatgtatctgttttgaaatgtaatttaaaaaaaatctaaatatatcatgaacatgcctcatgttatggttgcattcttcatttatttaacaaatgataatcactaacacttaacatggctctgtgggccaggcattctcctatgcacattacaaacagtaactcacatatcctcataatgagcttctgaggtggtagcattattaccstcatgttacaggtgaggrtgctgaggcccagaggggttacataacctgcagggtcatgcagttaggaagtggcagagccagaatggtcacccattctgtatgacttttctgtctcccgggacctggcctggcccgctgtaagctagcaaacgtgtgtgctgaatgaatactggtgtttaaaagactgacatggtgcatgagaacagggtcttcctggtttggggaatggtgctgattcacacttggcatgtgtttatttcctgaaggttctacggccagcagagctctatcctgacaatgtttctgaaccaccgatcacctacaggtgtgcagaggttatgacacagcagttttacacttggccttgggagttgttgtccggttccccattatccccagtttacacactttcactaagtcaagattccatgtctgtagctgtaatagcagtgtaatagcactgtgctcaagggcctggagtgttccttgatgtgttttgggatttctagccaaatgaactcagtataagttcatctcacttttcagattctaatgatgtctttagagattttgtcctaaatcagtgaacagaatttgattctgagggaatttaatttggaaaaaaaaaaccacccagatacatactttcctccttgtagagtaaaacctctctttattaatttttttttcttaaaggatacattagcccttttaattatatcttttgcttttctggggtccagcataacctattctgtatgggttatacatacttccttctatcatatattaatgaatacaactccctttagatggagattgtgctagctagtgtacaaactagataggccctgacctcaagaagctagcaagctagtgagaaagataaataaacaaagatactctgttctgtttctttatttatcctaagacatatggataaagagtaaacaaaggatacacgactctaaatactgcaatacagtatagtggagaaaggttgagtatgaacttgggaataaggaaatatctttttttatggtgacgttattgaaacatccaaaccatgatatatttaagttatattttcgatggttggacttcaaggcttttttgaatatattcagtttaagtctgcagataataggaaaagagcttatccttagctttaaaaaattctttgttcatagctatttaaatggaaaagaaggaagaattgtcatatgcaacattttaaatataattcatagtttcatgtgaattagtggaattaacagtaaccagggaaacttccgaaccttagtgtggtcagaccctagtagacaataacagaccttttttttttyttttaagagtcttgctctgttgcccaggcaggagggcagtggcttaatcatgagatactgcagcctcgacctcccaagcttcagtgatcctctcacctcagcctcctgaatagttgggaccacaggcacatgccaccatgcccagctattttttttttaatttacttattgtagagacaaggacccaccaggattcccaggctggtctcgaactcctggctccagcagtcctcctgcctcagccccccaaagtgctgagattacaggcatgagccaccgttgcccagccaaaagatgtggattataaatctagctccatcactagccacagctgtattacaatctgcattcagctgtgagttcagacacctgaaaagtattggcttaataagttatggagagttcctaaaactcatgttttaattctctcatgtaatgaaaacaggagataggcagtagacatttccatggaaactgacatttccatcccataatgtcttctgggacccagacaccttttctgtttccsccagtcatccttagtgtgtgcttctcatctgtagtcctaagtttgctgatcctccttctgcctcacgtccatgttcttgttagaagaatgagatgggcaaagtgtaggcacaagctgaatcagccctctttcaaaagcttgctcagaaaccctacctagtcacttcccagtccatctcatgtgccaaaaccatgtcacatgaccaccctcagctgccagggaggctggaaaaagctttttagctgagcacattgttgcccccaataaaatcagggttctgttaagataagggaaaaggaggggctggatatcaggtaggagtctactaatctctgccctatcagctgggaaataaacttaatcggcagttagctaacttttttgaatgcaccctccctgccttttcttcattaaatcttcacagacctaggttcagattaaagtatattttctttagttgaatttcgggttggagtgccagggatatttctcccttccactcccacttgatgatgtcattcatttgaaatatagttgggttcatttatttagtttgtcttccattttaggtttttttttttacccacttcactgattttatttatgtgtttgtctgtttatgtgtgaaacattcatatgttttggaagtcagaatgatacaaaaagaaatactcaaagacatgtccctctcatcttccttctgctcctttccaccctcccatcatttccacctcattcctgctcaccccatgtccataggtgctcagtctcatttgtttctggtttaactttactgtatttgcttttgcaaaatgtgcacagattatataactatatagctatataagcatatataaacataactatatatatctatatagttgtatgacatatagatatatttttatatatagatatattttctcattctctttttttcttacacagcaggtagcatactttagatattctttactcaagagtctatgtagatagttataagaaacgaaataatcatgagaccagggagaatgacaggtgtccagtaaaagaggtaaaaccaaacaatacaagggagagacctctgcttaggaaaggttttatgaaggaggctgcatttgagcagagtcttgagaatgggggatatggcaggaaagggaaggatttttctagacattgatagaagaggagaacagtcagggaatggtagggaagcggggccaggtcaggggcatcagttcaggggagccccatgatggagctgaagaackcaagtctctagggaagagtgtgacaagattgcgatgatacaggaagtgaaatctgagtgttgtgtgctttttgtggattacgggtttctagagaatttagacatcatctagtgattcattttaaactgacgttgtgtgcccatgttatagaggaggaaactgaggcccagataaacaaggatcttgctcaaggtctcatagccagatgttggcagagttggaagagccatgcccttgactcayagtcccaggctcttttcctcaggatttccccaggatgtaaggtggcccctgtgcttcatagacctggcagtttttcctttgccagcttgtgtctggacttctcaattcatttagtcccaagtctccaaatccaaccagactaacagcaactttaaaccagcctgttatgaattgaggtgtgtcccttcctccttctctttaaattcgtatattgaaggcctaagcctaactcyttaggaagagactatatttggagatggggctgttaaacagattaagttaaaatgaagtcattagggtgagccctaatcctatttgactgttgtccttataagacgaggagattaggaaactcatccctacagaagaaagaccagtgaagatgcgaggagaggacagaagacagccatctgtaagccaaggagggaagcttcagaggaggccaacctgctgatatcttgatctcagactcctaatttccagaattgtgagacaaattcctgttgtttgattctgtggcacttggttatagcagccctagcatatcagcccatgccttaacctacattttaactggctcctcgtgggatcgcacacccaggctggtgtcttagctcctgcttgttacagctcctcatccttcctgttgttaagagccttccctgggccctatcttatgtcacctactcagccacactgcttcagaggcaagagagtagtggaggggagtttgtcttagtgcagagaacatggagggcagattgggagtctgatggagccactcactggccaagaaaataaattgcctaaccttctggattcaatagtgcagttgaactaggaatctctgaagccatttccatctcctcaattctataagcaatgtggacacaaactatttgttgattttaagtgcatactcagggatttaaaggtattttttaaaattatgctttttagcttttttaatattctcaaatgttttgccttactacagaccttaatatacccaggatattaacaagttttaaaaatcaggtgatgggattatgagttttaattttcttccttatgctttaagttcctctgtatgtgaagaaaactaatcaactttctaatgcagatggtaatgaaacaaagggtatacaagtttatattaattgacatatagcatgcagaaacggatgtagtttttaagataataaaatgtgaaaacactagttaagttgaggatggaaaaagctgtcacaagatayctataatctgttgtttgggtcatggcaaagcatacatggtaatagacatgcaccatcatggaaaagctcatcctattgacgttctagcttgaccttaggaagaagaaggtgcagataagagtctaacttaaaattagaaaaaaggaactaaattcaaaaattataaacaaaacaaccaaatagtctcataagaaaaatgcgaaaattttgctgtaatttatagctcaattcctcaagtaacaggaatttttagttacttaactcgataataattaacataaaataatgtacttgaggttattgggacttcatagatcagggaatatcataattattactgataattagctaaatgtaatcaaacggttccatttagaatgtttttaggtaatctggattcttgttatttcctatagacattttataagcaaaggtggaatacaacatgcttataatatggggaagaacagatcttggcaaatgggattgttttgaggccttgttctagggcactaaccaaaacaaactagatgaaaaatcatccacctctgtgaacgtttcagagtcaactgcctgttctacacaccctcagcctcatagatacgggtcctgataacccgaagtcctatgctttggtatggattacaggagtgatctctcctcctgtgtcctcttttgtagaaagcaaggatcattttgtaaacatctggtttcacctcagaagcgcacgtgctatcaagatttgtgtgtatgtgtgtgtttgtaaaagacattttatgtatgcctgcgaatgacctttccaagaatcttgcacagcttgtggctattcaggcctgttccatggatttttcttcaatgcaaatccagctgtgtcagttcccgtaacccctcctgtgcctgctcaaggttaagcgctgcagtctgctctttagtaagtgtccagagggtaattacccaggtgcatctgggtggggtttaacccctttcacccccaccctgtctgccagattcatgggggagattcagatgtgcaagagaggcagttagtgaaatcagttccctctcttggggtaatttgatcttgtcaaacaatgctttttacagaacatatgtgctttagttttattttaagtttctgaaataccattctccattttgctcaccactgaggcatatgtacaaatccaaagaccctcttttgttacacgtgaaactttattcttatttttttgtcaaaagaaaagtcctaagtttcccaaatccaaagcaaagtgaatgcttcaatattactttatccagagccacaggcaggagagaaaagttgtgaaaatcaattcaggaaagaccaggaggaaaacaaaatgatcgccccagaaatgaatatttaactgttgtttgttggttggatttgggagaagagaaggtaaaatggtttaaaaggcaaaatattaaactgcttagattatggacagctctctccacagctttcgcccccagatactttgggtctcatgatgctagaatatctgtcgtatctcagaggctaggacattctaggctgagagtggttgttataatattttgcccaggagtatggtgtgggagcagcacgttggacagggacttggcgatgttggcaaataataagcatggggcttgggcggccggctggtgattgcttaagccaggcaaattacttaagctttctgagcctcagtttccttctctgtaaagaggccattgattcccacctcctggggttattttaaagatgaaatgaaaccagctatgctaagtgttcagtgcttgccaggcacattacacttaagtggtagctgttattttattatttaaaaagatagctttgccacaaaccagatatgtgacattgagtaagtcargccatgtangtggctgggctktggttttctcatataaaatgtgaaatttagagctatagtcccttctacttctaaagttcactgagcctttgaatcccctcttaagcattagttcactggaagaatagtttctgtgcctagcagtgtgcaaggttgccaaagttcagattaaattcttaccaggaggttactagaacttgaaacacttcttgtgcatggatttcaatgtaattaatcatttgaaaggtgaaaacatgtgttccaatcctgggcagtgacttatcccagtgcccaggtgagttactagcaaatcttangtcttgggcagttctttttgtcctgataccaaagctagagaaataaatctgctttatggctcctcagtcttatttatgaatcaaaaaatcctttcatatccaaaatctatattattctgcatctgaaacttttctgatcttcttcactcctttacaataatattatctaatgcatagataatgcatggttgcttccagagtactttgatttatataattacactcacttgctcctcagaacaattccatgtggcaggtctgttatcacccccaattcacagataaggaaactgaaggctggatttgctgagatcatatagccaagagttgtcggatatgggttacatactcatgtctttcactgcaaaacacacatttctccccctgaagcaagctccctctaaagtgccagagtattttgtttatgaatgaggagtgacaaagcaaaaaatgaggtcacagttggaaataggatatggaaatgctggttccttcatgacccacaggctcagatctgtgattcccaacatctttttatatgagggcctatttttctttggtaaacagaagtttattattttattacacaggcaaaatacagatgtgcaaaagagaaatatgttaatactctggtgattattagtgttaacattttggtgtcttaacctcttcgctcccctgtttatgtatttatatgtatagggatgtgtattcaccagaatgttcttaatttgcacatactgttgagaacccatctttactaacaaaacatggtggattgcccacagatagttgtatgggatctagattttgcatctcccctgataggcttatcctgcctgcctcttgctgaattttgctagaaagttgttactaccaccttgtactacctcactccccaggggaaaactgcagctcagtctgcgtagctcctggtgcagcagaacccagcagtgccagcagccaggcctgatccggcccctaccatgaaagccctgacttctcccaccatgccaggactcagatgaagaatgtgccagggagtgggaagtggtgtctccagtggcctccatagctactgatacaatgcagaagtgcagggagttaaggcccacaggtgaaccttggccaaggggagatagaagcgcaggagactgttctgacccatatgtggtttccatatagcctttgtcttggtgacctagcaaacaggcacttttttgtgaagttgtgacagcttagtaactaatgcaccactctatatttgctctatcttgatgtctacctcacctcctcctgccccctgcgcacctgctttccaccctgggaaccccacccctgccccgataaagcttgagcacgaatacttttcctcagctccttcttttctcttttttaacttaggaaactgagctgatggtcattacatttatagtatctctgttcagtaagtacttacaaacaaaaattcaattgcttttagtgaatggattttattaattacaatagcatctgtatgcacttgaagaaaagtagtatattgatgttatcttcagatgccatttggtgataggtgaattaaaggattccttgaagccactctgtgcctctctctacctgcatgtcctcaagaagaagccacagttgggttgtttaggtgagatacaggtcatcatagctattttaccctcaacttgaccttcgtgctgtagttaaagactctcagacagaaacctcagtccatccagtctcttcctccagctgcctttcaagtgcgtgaagttttgaagtctgcacacgttttctcagggtgaggcactgtacacatctgggtcagctttattccagttttctttttttttaaatatataaagtcaatcagtgtgagtaactgctacatgagaccacggagaaaatgaaataaatatgttggaaatgctagaaagtgatctgcagttgtttattcgcctcagtctcacttcctggcttattttaaagcattcaaagggtttgaacaatcttttgagttgtttggcgtgctgcaaaaaatatrgtctgttctctaatatgaaagaattttacactgtgcttcctggcctggaagtgtgtgggagagtgaggaaaacagggagaaactagtctcaagggacgggacctcttgtgctgattaacattctcttaacaaggcacttaatcwattatataattcagtgcacttaatctatgaagcagtattcayggggctttcttttgtttctcaaggccagggatgctgtcttgtacatctttgcactctccaacagtgctacatttaacaggtactagctgcactctttgaatgatgaggtggttggtgaacttttcagctagctaagtcaattatggtgagttgcacaagatgcccatgttacaaagaataaatgctagaaaaatgatttatatatggacaaattactgaccaagacaatgtccttgtttgtacaatggacattgttcaggcagagctcatgggttgcattcacagaaagggctyattggctggtttaaacagaaaccaagaagagaggggtcaatgaaggcaggactggtgaaggaaggctgtgtccagggccttatagggatgaaaggggatgagacagtggacctatggactgtgaattctgagttccagtctttgcctcttgaaatttagtgtcacttttgagkcctgtcccctccaggaagcttttcctgatccctgaaccagttaactaacctcctatgaccccatagccctgtgttgggacctttatcctggtgtgctcctgcatggccatttgtgttcttcctgataccgtcctctagatactaagtcatgtctgtgagggctgcgctttttctggttcatccatgtgactcccagactgccttgcactcaggccactgcacaaatgcctgtcgaagtagacgttccaacccaaaggttcagaacaacaaggacgtgcatccagcctttgtagtgcagtgggttgaagagtgatgccctgaaaaagatgtggccacatcccttctcaccagccctgggctgcattctatttaacagttttggttttttacgtcagagaaaaagagatgacttttgtataagtcattgttattgactctgtctctctccaacttgagaactgcaggaagattatttgctcattgcctggccttcaggtgtctgatggaacaggaatcaaatsatagacactttgaacctctcctttgccatgatgcttggacaaaaaacttgtggcctcaattctttaactgaggagccttgtagaataacctctggagttaaacatacctgggtttgaacctcgactattactcatttctgtggtgtggcctaatctccttatgcctcagtgttctcatctgtaaaatgggcataacaatgaccacctcttacagttgttgttctgggcattagaatgatactctatccgttagtacaggggtccccaacctcaacatctgtccagggctagttaggagccgagcctcacagcagaaggtgagtggcaggtgagcgagcattactacctgagccctgcctcctgtcagatcagcattagattctcatagaagtgcaaaccctattgtgaactgtgcatgccagggacctaggttgtgtgatccttatgagaatctaactaatgcctgatgatctgagatggaatagatcccgaaaccatcccccccacccccaaccctggtccatagaaaaactgtctttcatgaaactggtcctcagtgccaaaaaggttaaggaccgctgtagatagtagatactgttggttgtagtattgtgtcattacgttgtttgtactagtgaaatcactaagactcttgttccagggaagagaagaaacaaaaaactgaaggaataaaaagtttaagccacaaagcattaataggaacacttggacctgtacaagagatatgctgaggggcatggggaaggaattccttccttctcaagctgtaggtgtcaggctttggccgtgaaaatgacagtggattttctactcmttcagcaaactttctggaaaccccatcacctgccacgtgtgtgtggaggtgctgtgtgggtatacaaaggcgaattaagatgtgatcctgggtcagggacagtggctgccacctgtaatcccagcactttggaagaccaaggtggaaggctcacttgagcccagaagtttgagaccaacctgagaaacagagtgagatccccatctttacaaaaaaaaaaaaaaaaatactagctagctgagcatggtggcatgtgtctatagttccagcaactctggaggctgaggtgggaagatcacttgaacccagaaattcaaggctgcagcaagccatgatggtaccattgtactccagcctgttcaacagagtgagaccctatctcaaaaaaaaaaaaaacaaaaaacagaagacatggtcctgatctctactctcagggtttcatactctattgagggaagataaagtttattataatgcaaggagaaaccactctaaatgcagcatttacaaaacgctctgagagcataggggtctgtctgagggaagtggagaaaggcagagctattgccatttaggtcggatcttggatgagttaggagttcttcaggaggggtaggaaggatagataacatgtacaaaggcaaagcaatgcaaaaatacaatggtatgatgttggctgtgactggcatcttatgttatagggctggggagagacagttaagcagaacattcagccggagttgtatccttgacactgttgggctaagaggctgggttgccttgttttagtttgaggaaggctgtggacattttaaagggagggaatgatacgggctgttctcatctgatacttgtgcttctcttctccctgttcttttgagttggactgtggccacggaagggcagaggaggagaaatcttccagcagtcatggggagacacagatatcctttatcttagttgggattaacaaaacaaattaactttgggtgtgaggagaagcgcttcagataagaaatgggcaaacttggcgggggttgctgatagtgacaccacatcttccctgtctttacttggggaccatttatttttattttccccctctctttaaaagctgttgtatctctaggaaaaaaaaaaggctccaccttcaggaatgcagtgtggttttacttctggtaggtgaagaaaatttagcttctggatttttctatgcttgataaagggtatagtgtgtaaatgtaggaaacaaaactatctctaaccagatctcaaattttatgaaagaaacacaaaatatggatatattaatgtagaatagacatgtgtaatatacattgccctttgggttgcaaggtttttttctatatttctatattttcttctgtatttctataaatatatttctatattttttctgggagaaaaataaatcttaaatattttaaacaaaagttctcagtgagtgtgatctctgtactcaaccttggaaacaaaaacagatttcttgggaggaggagggataaaattgggggtatgctgtgtattttgggaagaatttggcttctttcttgctgatacctttcactagttgccgtaagattcaggtggttctttcattattcattctacatgtattcattgagcaactattcatcaaccagctgtacctttctggacaggcttattttggactgaaaggcattcccttgcctgtcccacggcctccccctgagattttcttagctgcgctcagtgtggccacaacaccccgtgattctgtcatcacctcccttgctacgaggctgctctagagccctccataaacaagctgtccaggctgtttggataagagcaggggaaagacaataataaactcgggaggatggcatgaccaaggtgattcgcactggaggtttttaatggctttttacacatgatgagcactttattgtctgcagtttaaaacgccgtcctcacacggtggctctgtgaatgccagcctctcccggggagccttccctagcagtgcagcctcaaattcagggaaggttctggttgtttcttctgtgaacaaatatcagaagttcctatgcctgtgtcaggagctctaggttaggtgtataaaagagatggctaagtttgggaagccgcattagtgtttttgtttttgttttttaaagttttaagattaaaaaaaataaattgttagacttcactagctcttgctttctccttttcagcactggctgaataaccagaacctgagctgaacttgagtattcagaaggtgaagcaaagaggaaaatgttttattagaaacaggctttctagctgtgacaaattatatgtgaaatttcaagtacagacccgcagggttgtgatgacttcaagaatgatcaagtgtggcccagtctaggaaagtggagggacaggaaccctgcgtgcctggtttattgtgtggtttcacttcctagggagaggaaggcaggaggagagagaaagtagcatgctgcagggtgctgctgagttcaggctgtggctgtccccagtatttcagctcatgccggtaatcagcaggcctccaggaggaagagttgggagctgttatgcaaagctgagaacctgtaagtcgaggtaggaagaagacagttcaaatcccttcggatgactcttgggcagtctaaagtctgatcccaatttatctttccagattgttctattaacctggccaaacaccaaatcttttgtgtacacatgaccgttggaaccctcttctctgcttggcaaactctaaaccctccttcaagaaccagttcagaagtgatcagtgtaatcagccattttaaaaaattggtttaaatctgtacccctccacccccatttctgcttcatctctccccaaggcagaatcagtctctcttctctgttgcttccatgcaccttggctgatggacactgttagaattgatgctcacagcttgggagagcagatggggtctgggagagcctcctgagttcactggcacaggatcatacaagacaatatgtgtgaaagtcagtggttaattgcaaagcactgtaccactgtgttcatagctaccctttattgaatacatcgtgcttggtattttctcatcaaatcctcacaacaaccatttgaaggtaggtattatagtcatctttcttttaaacatacaaaaactgagtctctaagaggttaagaagtgggctgcccatggtcacattaaatagtaagtggcaaagttacattaaacccagttctgactccaccatctcaacccatgtcaccatttttctgggcctgtgggcaatgcagacgtgagggagacctggtctttgctgttaaagcttctaatctgggatggagataaggcagtcactgccccctggtgtatagtctaaggtgggatacaggctctaagaagggtgcacataaaaagtgtttggagagcaataaagaggctttgtggagagagctttccttccctgcaccttgaggagtgggcagggtttttatagcagacttagagaatagggaatggcagaaactacatgaataaatgcttagtggagtataagaagagtgcaatggagagaagggtatgagactaaggctatcttaatcatatgactattaccaaggacttagagcccacaacatctcccaccctctgccccctatccttggtcttttatgatgggagatggttgctagcctgcatttagggatagctatgcttatacagaacttctcacacagagtagtrctgcttccctgggtttggaagcatttttgattttgccagaaagattggcagggggtggggtggggtggatgcatgtgaagccggggkggtgtgctacaattggcacttggtgctccctgaaccaaatatactaaatatcttgtaatggatgcatcagtcctacccagggaataattctcccactccggagacccagtatctcctgtgtgggatcccccatctacaagtatacatgtaaactttcccctgggccactgcagtgtccctctgggaaacatgaatctgttcctggcacctctctagayactctagaatggttcagttgttttatccctatacatacttgacctccagaacatgctatttatgctactcccaaagcttatagctgaaaacaaacatttctaccctatttttcttcccttgaaatatcctctggctctgaggtcatttaaggaataggcagcccttgcagatttttgtaagtttcctcttcgcatgaacaataactgcaaaatgatccatctgatctggctaccrttgttgaaggcaagaggatacaaagagcattcatcgggccaggcgccttctcaagaagggctcatcaaggtggaaaaccaagtggcacatacttgtggagaaagtttgaaaggagtaggggttaagggagtggtagggattgaggaaaagcctaataacrtggtaataggagataacagactacaaaacccctgtgaaaccaggaataaaagagccccatgcttcacaaatacaagattgaatgagtttcatgtttaatgtaaatacacctgccatttgttctctgaagcactggttacaggttttgagataaaatagagttttgaacattgtgccagtgtaatttgcctttgcccaggcatagactgtacactttgttcctgaacagtccttagagacaacatagtgctctgatcagctcaaaggtcccacctcctgatgtgagacctctgcttccacctggcctgcatctgagactccttggctattgacagagtagggggaagtgagacagtggcccagggtgccagtgatctcatggctaaagtggatcattttactctcctgcattgaagttactcactgcattaagggtaaagagcaaaaccctcaatttctcctataaagccctggcctaccttttgctcaagtctcaccattctctctgcagttgctcaggcctactttcagttcctagactgttactgtgcagggtccagcctcagggcctttgctgtcctctgcgtgtgagcccttctgctcccttccccttcagctttcaattcttctttccttaagtcaacattacatattatttctttacggacactktccctgaacccaacctcacagcagaagacatcaggtgacctcttacattggtcactgggcaccatactttccctgtggctcctgtcccagtttataattatacatttrtgtgattacctgatgaatgtctcctcttccactggactgtgaattccatgagggtaattctggcactcagtctaagcctgacacctggcaggtactcaaagggtatttgtttaagaaattaattattaaatgtatcacagatacatcagaagatgcaaataagcaaacaggaagaaaaaaagcaatcacagttctacaaccaaagaaaagccactttccattttttggcatatactttaaaattttttttctattctataaaataatatgattttcccttaatagtatggtaaacaggattaagcatccactaaatttaatttgccatcattttattcaaccaatcccctattgctagactcaaatcagatttgtatgatctattgtttcatggaaaccgatgcaaaattataaaaaattaaatcatttttgcttctcaatcagcattttactttatccaaaaggagtatatgatgagaaatcaagagtgactgtccaggaaaatggagatgtggcagatggagctgcagacmacgtggggagagccctggccacaggaaatgactgtggttggtagaggggaaagtatkggacagttaaggagttgccacctgcccctggtggaggcaaatgttgttttgtggaaagcacgtggcataatgacagggcctctgcaggctcagtgatgtgggtgagcaaaatggctgtcttgggattatctaggagcttctgaaggcagtagggtggtggctaatttcttaatgctgctctcccatcctagtgatgggcagagaggatgagaaagccagctctggggagacaactgttgttccaaagtgaggastcaccactacctgccatctcgcagactcttgtctagtgcccccttgaggccatgcttgttgttagccctgactcgggtgccccggcacctgccgtaaaccaagctagacccagattgcgtttgggtgcctggaacaggagaagttttaggaatttatgttagagattcaccatgttgtactttctgccaaagcgtccytccctgagtcagaatagtggaaggctgactatattccacccagcacgacgcactgaatgcttggtatgagcagcacatcatacgacaggaatctcacaacaaagcaatgaagtagttaccactatgatctccaccttatagatgaagtacctgagacttggaaagtgtcaaaaccagaatttgaacgcaggtctgtctgagcccagaccctttgctttttaaaccactctttatgaagaatctcagtaggttcttaagaacggggcgtggtactctctagagcgtttgtgacccaacactatgaattgaaacaaggcaagctctgtgctcccatttggggaaagttaatatttcacatgctctcgagaatttaggagcttggtaaaaacttactattaaacagggcttttctttaattccttttgtttaaaaattttcttgtgaaacactctatatactgtgcctccctctgagacgtcagtggtgccagagaccgttagggagtttgtgtaaatagagagagggccaaatgctgcccacacaagtagtgaggcatgaggctgagtgcgtggaacagttccatagctagccctaggctctgaagagtgtcctgagacctcatctgggtcccaaaatcggtgggcagtgctgtctccgcgagacaatgaccagcatgaggaratacctttaaccattcatctttttaaaaagataagtttgctaagcaaataaaaccagttagccttgaaagttcagtattaatgaatgttaatgcatatcttgatgattttctaaaaaactgacaaatcttccaaaagacaggaatatctagagggtaaataacaggactaaaatgctttgaaacatctttgaaatgatggttcaatgcacagggtcaaagggtaggactggttctcttcaagcattttaaaaaaatgcctcatttttatttaacattgttttgggaaggagtgcattatattgacacattgagaaaaaaattcctttttgtttttctaaaactaataggagcttaggcattatgattaaggaccaaaaagagccaatgccgatgaatgccctctttcttcagctgtaaaatttaatggccgctaccgagaggtttttcttttaatcagcaaaaaatttattttgtccttgacattttatgccaaaaatcagcccagagaatgtgttttatagcctgggctgaattcccctaaaggtagagttttcctatgagcagtgttcattgaattggctttttttttttttttttgcactagataactatattaatttattagataatctttttattgtttcagcaagatagaggaaacttacacagagacagcagagcataatgggtaagcatctgggttcttttggaagacgagatattggtttccattggccttgctacttcctgtctttctgaccttgagtaaattactcttccagagcctgtttctttgttcaattggggatcataatagtgccgccgtcatcatgctgtcatgattaatgcacctaaagcatttagcacagctgtcagcacttattgagtattgactaattattagcgatgcacagtgatctataacttaaagcttcgtctcagaatatgccttcttatgatctgatagtaataggaatcagcagaaaataaggtggttcaactatccgggaaaactaccaaatatccgcttagcagaggcaaaataaatgtagcttaaatgcagctgaaaatgctgaaarctgcttttgtttctcatgttatagaaatgcagttatttttattaaaagtgatgggaaatccatctgtaatctcctgtctttcttttatctgtttgtaaaaatagctcagtaaacccataaatgccaagaccctgttcagtgtgagaaacattgttgggcaggatgggaaagttcaaagaaatatcagatgcaatccctgctttggtgsaatatttggtgtaacttggaaaattaaatggaaaaaaaattaaacaacaaaacagcacccagctgccaaataagtgaggaaggaaagacctcaggctgaagcactggtgatgggaggagggatttatttgagctggtttttcaaaggatgggtaaggaaagaatagcaggaaggcgtctcataggtatggtttaatggtaagagcaaagtcagtgtagtggcaaagaacaaggcaagagggtggagtggttagcaagtgaaggctcattaatgcttaaggctacctttgaaacagaagtgtctgtctgaccggattcaggaggcctgtccatcacgccattctccaccaccatgattcattactccagagtctcttatcttcaaatcaaaagcaagacgagaggcagatacagatatgaggaagtgctttgcttttcgctactctgccaaacatagtttacataccaacactgataatctgtcagcccacctctcctggacacttaatcatttccctggaatccactggaataatttttttatgcattacaaagtatgcttcagagtgtctatttcttaagataagtttgcattcctttaaccaagtggcattcccacaaagccccaaggtggcccgtgttacacattccttcttacagccaaagtggtcagttaggaaggcagctaccttcatggcctgttagtaagaatgttggacacttgttgggcatttactctgtgggagacactgttctcagtgctttacatgtccaaattcatttaactctccagaagagggagcagtaggagagaagggtgatgaacagaccctacaaacggactaaattattaaataatgaatcagcaattagttctaaaaatgtttatgtagtgcttactgtgtgccagacaccatgattaaargacaatcgaagtaactcggtaatcacctctgaactgccagtatgggtgttttatcaccttccatgttctgtgttgacggtttattgaacacattttgagttcttcagggcagtgcttattaaattcagygtgcgtttggatcgcctgggaatcatggtaaaatgcagattccgatttgaaagtgctgtggtggagcctgcgagtttgcatttctaacaagctcatgggggtggcgacgctgcacatccaggtgacctcttgaagtagcaagatcttagagaaccaagtaaatggcagaggaaatacaagcaggataagacaggaacatattgtcactttcacaccagaagaggcagtaggcctggatttggccccaggccccagtttaacatgatcattatggttgttgtcgctaccatgtgcaccaaaggaatctaagagcttggaaccttaaggcccaatggcacggtttacaatgctaacacaccttaaagttaaaggaagaatgtacgctatcctaggaacatgactgataaggtgcggcagagagagtggggtggggcgggtggggtgggaggctagaagtcaggaaacctgtgttctcatcagggctcatttacagacttgctatgtgacctagtttaatcactgagcctttcagtgtcccgatatcctcatctacaaagcagactggtaaacatctgctctgcccacccaggactgcagaagtgagacaggatgcacaaaagctcttgggaaaaccaaagaaacactgcaaatgtgcatttttataattaaaaaatatagagtctgtcttcagcagtaggcaggaaagagggggtatctcaggagctcccactttggtttatgtctctctgagggcttgttatgcttctcagcctattctgtattcaggagatgcatagagcttctggcttcatgctgtttcagagcagcccacttcagccttttctttaccaatagaaacccctagactatcacagcttgtccttcttgcactgaacccattaagaataaagaaagtctctgggctggggagtggaagtgagggacataacatttactgagtattttatgtgagttattttacttaatcttcacaacactcctaggaggaaggtagtytgaattatgaaattgttccaatttcatagatgaggcacctaaagctcagacaggctcacttgcctggggtttggttttgtttctctttgtaaaaggtaagwcttttcaatttagtaggtcaaaacacgtgattctctccttttcataagactataaagttagcaacctctggtatctggttaacagttcactttgtgcaggttattccagaggtagatagcatgagtttatgtcgaagccsaggattttgtgccaaacatccgtctctttgcaacagaattggagaattgttccagaattctttgaattcttaatttgcagaatttcataaagagttctacagctcacttttcctaggaatagaggagagcggcaactgaagacagcaggctttttctttttagtattgatgatgatgatgatgagctttaacacagcttatccaggtaatcctcatgtagtgctgtgatgttgatggttttgttacccatattttagagaagaggaaactagagacttagagggttaagagacttatacacagcctaactattccaagtgtttaggactaagtggactttagtcttggtttttccagctccaactctgagggttgtttccatattcccctgtattacatggattaaccagtgttagtgaccatccggctaagaaattagcagtggctctcagtggaaaagagctacttgattctaatgatagtaataatgaaaacaactgccagcttcctgtgctgttggtagggcctcctgggttggccctgtcacatcccatcatgtcacggggcatgtgagatcacggggctgaaataaccctgggcgactgatgtaaaacagattgcgtgtgacacctgcccttgggcttcccagcgtggcacttcagcccctcttggctcagaaagcatttaatatacccacagagtgctgggttcccccccaaaactttctgcaaacttccttgtaactctggaacaggatcccaggccatgtggaatcttgaaaaggtgattgacactggagacgcaaggtcctgttggtttgggctggttactcaatgtctttgagtctcagtttttcacctgcaagtgggaataaggatagtactccgttctctgagttgtgagggttaattgagccagtggtgccagatcacagtaggtacccaggcaaagaggattgttgtagcttactttcttctggattacatcatccttaatttttctctttccctctcctctcagaagtcatcacaaattctgacacttctaaattatgccttaagcctatctatattgtgtctagctaccaccttagtctaaatcagcttcacctctagcctagattactatactagcttcttacctggtcttctgcttgtactcccacttgacagagcatctagagtgattttattaaaatataaaccagatcattcattcgcttttgtaaaactcttcagcrgtttccaattgcactttgaatcaatctgtaccccttaccctgcaaactgccacctgctgtggtccctgcccacttacccacctccactggatgcccctcgatacccagctcactgtgcctcggtcatgacgrccttctttttcttccttggatgcaccaaaaccagggggcctgaggacctttgcatgtgctgtttgtcccctttgcctggaatgctattctccaagatctttgcatagctggaaattttgtagctctaaacacggggttcttccatttcataagactataaagctagcaacctctggtatctggttaacagttcactttgtgcaggttattccagatgcagatagcatgggtttaggttttcatttagagaaccacctgacctctccgtagaaactcaccacattctctcccccagtgactttctaacacattacagtgttttaattttcttcatgtactcagcactacttgaagttttctcatgtatttgttgacagtttatctccacccactagaaggtaactctggccagggttacagcactagttctaaccagtgtctgctgtataagaggcactcagcaaatattgattgattgaatgaatacattttttattatatattaaaaataagtagaaatgaatttttaaaaataagagggaagtctttcaatgtctatattcaagccgaggtttgggatccagtggccatggacaggcctgatgggaaggggtgggtggaagaatcactcgtcttcagagcattgcggtatggtgagagaccatctcatacagcctactgcctcccgatactttcattcactcgttcagttatttgaaaagagctcactgtgtgctgctctatgtgctgaactctgggctcatagcaactaaccatgaaagacctggctctgcctttaccgagcttaaagtttgacagtgaagactggcactgagtgcaagaattttccattgaaacaagtatttaacaagagagcagcacaggagggcctgggagcattttgtaggaggccctcttctggaggatcagggagtcatctctaaaggagtgacatctaatctaaatctggagaatgcctgaccctgtccacattttctcatcagcccttgagaacggtggaaggttttgcggattggaccagcaaaggggatgcttttttttttttttttttttttttaagaaaaaacttcctccacccagatgacacctttttctttctttattttttattttttatttttttattattatactttaagttttagggtacatgtgcacattgtgcaggttagttacatatgtatacatgtgccatgctggtgcgctgcacccactaactcatcatctagcattaggtatatctcccaatgctatccctcccccttccccccaccccacaacagtccccagagtgtgatattccccttcctgtgtccatgtgatctcattgttcaattctcacctatgagtgagaatatgcggtgtctggttttttgttcttgcgatagtttactgagaatgatgatttccaatttcatccatgtccctacaaaggacatgaactcatcattttttatggctgcatagtattccatggtgtatatgtgccacattttcttaatccagtctatcattgttggacatttgggttggttccaagtttttgctatcgtgaataatgccgcaataaacatacgtgtgcatgtgtctttatagcagcatgatttatagtcctttgggtatatacccagtaatgggatggctgggccaaatggtatttccagttctagatccctgaggaatcgccacactgacttccacaatggttgaactagtttacagtcccaccaacagtgtaaaagttttcctatttctccacatcctctccagcacctgttgtttcctgactttttaatgattgccattctaactggtgtgagatggtatctcattgtggttttgatttgcatttctctgatggccagtgatgatgagcattttttcatgtgtgttttggctgcataaatgtcttcttttgagaagtgtctgttcatgtccatcgcccactttttgatggggttgtttgtttttttcttgtaaatttgtttgagttcattgtagattctggatattagccctttgtcagatgagtaggttgcgaaaattttctcccattctgtaggttgcctgttcactctgatggcagtttcttttgctgtgcagaagctctttagtttaattagatcccatttgtcaattttgtcttttgttgccattgcttttggtgttttagacatgaagtccttgtccatgcctaagtcctgaatggtaatgcctaggttttcttctagggtttttatggttttaggtctaacgtttaagtctttaatccatcttgaattgatttttgtataaggtgtaaggaagggatccagtttcagctttctacatatggctagccagttttcccagcaccatttattaaatagggaatcctttccccattgcttgtttttctcaggtttgtcaaagatcagatagttgtagatatgtggcgttatttctgagggctctgttctgttccattgatctatatctctgttttggtaccagtaccatgctgttactgtagccttgtagtatagtttgaagtcaggtagtgtgatgcctccagctttgttctttcagcttaggattgacttggcgatgcgggctcttttttggttccatatgaactttaaagtagttttttccaattctgtgaagaaaggcattggtagcttgatggggatggcattgaatctgtaaattaccttgggcagtatggccattttcacgatattgattcttcctacccatgagcatggaatgttcttccatttgtttgtatcctcttttatttccttgagcagtggtttgtagttctccttgaagaggtccttcacatcccttgtaagttggattcctaggtattttattctctttgaagcaattgtgaatgggagttcagtcatgatttggctctctgtttgtctgttgttgatgtataagaatgcttgtgatttttgtacattgattttgtatcctgagactttgctgaagttgcttatcagcttaaggagattttgggctgagacaatggggttttctagatatacaatcatgtcgtctgcaaacagggacaatttgacttcctcttttcctaattgaataccctttatttccttctcctgcctgattgccctggccagaacttccaacactatgttgaataggagtggtgagagagggcatccctgtcttgtgccagttttcaaagggaatgcttccagtttttgtccattcagtatgatattggctgtggttttgtcatagatagctcttattattttgaaatacgtcccatcaatacctaatttattgagagtttttagcatgaagggttgttgaattttgtcaaaggctttttctgcatctattgagataatcatgtggtttttgtctttggctctgtttatatgctggattacatttattgatttgcgtatattgaaccagccttgcatcccagggatgaagcccacttgatcatggtggataagctttttgatgtgctgctggatttgttttgccagtattttattgaggatttttgcatcaatgttcatcaaggatattggtctaaaattctctttttttgttgtgtctctgcctggctttggtatcagaatgatgctggcctcataaaatgagttagagaggattccctctttttcttaaaaaaaaaaaaaaatagagtagcctctctgaactagcagcagtcctggggggatgttgatatcctcattttagacgaggaacctgtggctcatggaaataaggtgaattgttcatattcacaccactagtaattggtgggttaggcccatgtatccatgactcaaagccccatcccttttcagacaactagaggtgtacccactccattgcaatcatgaggaatttaagtttcaggacattccatcttgyttcttttgtttcctcaaygactaggcctgttctggatttttaggagttaaaatttggctgatgctcttttcaatcctaacaaaatrtctcactatccatagtcctttgcgatccactgacaagtgagaaaccaaaatgtaaggggttcccytttttttttttttttgccagccagcctaatgatttggcatgctggcaactgcgtggttttgaaccgtgaggctgctctgagtacctgcatccttgtcctcatggaagtcaccaaaaccgtttgtcaaatggccaattccatcttatacagggagtcggggaaatgctcatgaaattgatcttgaagcacttggcaatcgcaagctccataagaatcctgggtaggagtaattaacttattttggaggacggatttacttaggaaagctccaactgcaatgagggtgggcccttttcttgttgctcctggcatgtgctcttctccaagtaacatttgcagcagtctgggtggtttgtctgcttagagccatccagaaaagttggtgggaaaagccaagaggccattggcactcagagactggggttggcaccagtcacagtgagaagcattacttttattagcaacttagtcattttacagcaggcgtggcaraagtgcctcctatgcagacgcaagacgctaatatggttattagggtaagaggagcagatatgcccagtatcccacaaaattctcaaattataaacatagcacacctttcactaatgtggtgataagacttagcttatataggcttgcatcctgaaaaacctgctctcagtctctcctaggtcatggctgtggtgtttgaatcctaattctgccattactagctgtgggactttgtcatcacaagactagcttccctgttctcatctgtaaaataaggatgttaatggcatctacctactagaattgtttcaaggaataaatgggttaatacaaataaagctcttagaacagtgcctggcacttagtsstcagtgagtccttgggataaccctctagagaggccaagatctgggctgtgctgcggactgctctttaccttatcctaacaatgaaaggacacagtgtgccctctgtcaggccctgttacaggccgaagctcataaaagtcagagggagaggtttggaaatttaacccagctggggcatcccagatgaaaaggattagtatttaaagagccgttacagtttatactagcaaacacacaaataggcagattgacacttcctgcctcagggatatggggcttccaccctttccagactccacaatccgctttgctgtgtgttttctctttcttcccttttcttgtttaatataatgtttgcttcctttgcccatcagtaagcactgaatattggacatctatcctgtagaggactgggattgctggtgtgataagtcatgattcctgaccttggggaattttgcaatgttacaagcaagctgggaaatagacacgtatgtgtgagcatgtttaccctggccaaatcccatttattctttaaatcccatctcaaatatcacctcccctaggaagctttcccagagttctcctagcagagtttcagttctctctctctctctctcggttgctttcataaaactttgccttttaccttattggagatgtgattgtctgcttctctgactcacatattagattaggagccccttgagggcagagaccatggaaaagcagcctagagggatgttatatagttcttatttatctccatagcttctagtacttggggatgcagtgtatgcttattggtcaaaatggtaaataaatgtaaatggtaaataataatagctaacactgagtacctcttgaaaagcagttcttatyccttctctgctgtaatgataactaacatttactaaaggctttcttttgttcagtatgctttttccttcagtagctcatgtgatcatcctgccttaggaggaagtataattaacagattataaatgaagagactagaggcacaaggaggttttgggtaactcatgctagaattcagatccagcaatctggcccagaacctggtctcttaacaactagattaatctgcctctcactgtgagtctgtagacagagtgttaggacttttttttattattattattatttaagttctgggatacatgtgcagaacgtgcaggtttgttacataagtatacacatgccatggttgtttgctgcacccatgaacccgtcatctacattagatatttctcctaatgctatccctcctctagccccccacccgctgacaggccccagtgtgtgatgttcccttccctgagtccatgtgttytcattgtttaatgggttctcctctctcttactttaaaggcagggattccggcttattggactctgctgtgaactgactaaagtcattatctgttcaacagtggtcaggttctttctggtgggtttgggaaccacatttcctccccagcaacccaagttacaatgaaagcaagtcataggctaaattattcacaagtacaagcatttattagccagcaagcataaaaatcatcgtaaatctcttttctttaggctccaagtaattccttctttctgtccttgagccccatgaaccatccttgcmtaaaaaattcaggataagacaagcataatattctgatatcagggttggccagtcttccagctgcatcaggtggtagacttactgggtgggacacacaagaccttacagaagtttggacctaggtacgactcctcttgttcatgctagagtggagatgcccatatgatgttgtaagccaatcatatttcctgaccatcgctcattttatgaatgaaaaattatttctaatgccccatattaactgatcctcattaatgactcctcaaatgcagatttagatagcaatatgtgaagtggttacagtttcctcctttatattcttaccaacttctattcacatgtgtgaattcctaattagtgtacttgaaatgttaataactatggcagggatgtaggtccctatttaggctacacaaatgttaactatccatcctcagagttagattaaatttaacttagaaacacacatgttcatctcaatatcagtactcaagagctttaaagtaaatcacagaaggccggatgcagtggctcagcttacgcctgtgatcccaacacctggggaggccaagaaaggcggatcagttgaggtcaggagtttgagaccagtctggtcagcatagcaaaaccccatctccactaaaaagacaaaaattagctgggcatggtggtgggtgcctgtaatcccagctactctggaggctgaggcacgagaatcacttgaacctgggaggcggaggttgcagtgagccgagatggcgctaccatactccaacctgggtgacagagtgagactctgtctcaaaacataaagtaaaataaagtaaatcacagacaatataagcagaagtgcttagaggttgtgtagaacagtggaaagaggtgtacgtagctctgaggtcagacaaaatgggttcgaatcccagcttctctgtggcagtgggccagtgaccacatctcagaacctcgagtacagtagtcttcctttatccaaggttttgctttccagggtttcagttaccctcagtcaactgtggtccaaaaatattaaatggaagattccagaaataaacaacttctaggtttaaaattacatgctgtcccaagtagtatggtgaaatctcacgccttcctgcttagttctgcctgggacctgcatccttcctttgtcctgcgtatctaagctgtctacaatttctagagcctattagtcacttcatagccatctgggttatcagatagatcctcacagtgtatactcatcttggtatcacagtgcttgtgwttgagtaactcttattttatttaataatggcctcaaagtgcaagagtagtgatgctggcatattactatgttctgttttattattagttattattgttaatctcttactgttcctaatttataaatgatactttatcacaggtatgtgtgtataggggaaaattgtatatatagggttctgtactatacatgatttcaggcatccactggggtctaggaacgtaccccctttggatgaggggaaactgctatactcatattatgtactcataataatgcctaccttacatgcttgcagtgaggattaaattagataatatttataaagtacctagctcaggggctggcactgagccatcgaatacataaagccagtattattaacctcagttactggcctgtagcaagatgctcaatagacctgaggagaatgagtgaaggggaggttgcctggcatgggaggaagaggtggaaaaggtgcaggggtgatagataggattcttggctggcctatgggggccccagctgagtgggaatggagaggaagtgggttgatggagtcccattgtgtgcagaaagaggggacctctgcttgggtggaaaatgaggaaaaaaggcagcactcaggtctcggcaagaatagcccggcctcccttccttcagcccatcttctgaactagaaaaaggctgttgggtgctgtatgagaagtgaggcctaccaatgagagtcatcatcatgtaaattctctaccatcctggcttggtcggtagcatttctactgcccccaaagccaaggaagaatgatgcccctgatggttcttcccatttagaaggaactgcagtttacacacattaccttayctgattctcagatgtcctcaagtgatgttatcatgatctatcattattttccctgctttatagaagggaaaacagtcccagaggaggtaggtgactcctttagccagtaagtgacagaggcaggatttgaacctgcatccagctgatcctgttgctcttgctgtagaggagaggcagtgtatgggtattctcccagcttgcttggtattcattccactgatttttacctggagcttgaagactggaactgggtggtagaatggcaggtgtagggccagagctggtagagtgggtggtgacagttctgagccttctttgcccacctgtctgacagccctttatctctgtaataattgccaagagtcctgaaagatgcctcttcccttcccagttgcaaggcctgagattgagcccagggatcttgccagccttaattgacttgtgttgaaaattataagaactgaccctctttttaattttccctaaattaaacactgtggagggatcaaatggaaaatgaccaagagtcctgagaaaggattatccatctggcatctgatggaacttgagagacagggcagcatagtagtggtgcctgctgcatcttatagctgtgggaccttggccaagcttctggacctttcacagtgcgtttcatttccttatatgtaaaacagggttaataattctggcctcagatggttgtgacagtcattgagattctccatgttacttgcatggtactaggcaggagcttaatcagtgtccctttacatccccagaagtgggcttaaatagcccagtaggagtatgaaaccctcaatcaaatgtctggcatataataggtgctcaataagtatttgctgaatgaataagcatggttgctttgctctctttcgtaagttttctaactccatcgcagaagggttaagagaccattaagatcttgccatttcttgggcagagatactaacatttattgaacaccaactgctttgtacgttttatctaattgcaacaattctgaaaatctttactatgcctgtaatttaaatgaagaaattagggccttgagaggttcaatgagaaaaccaaggtcacccagctaattggtgaagttgggatctgtaggcagagctgtgactataaagcctgtgttcccaccagcaaatgtcatgcagtgttgaacatacacatcccaggtgagacatgccctctgcctggactgaacatacaagacccagagcaagttccgcaccttcgtgtctggatgtggggtcagtacagcttctgcacaatgagccacagtgaataaggaagtacagagaagcagggtgagggctgatgggagcaccaaggcttgggagctgggctctgtctcagatttggcctccagctagctgctgctttgcaggtgcaggattcagtttgggttgttggtggtggtgaggaggtatgtcagggagagcaataaagcagtgataaacatccctcatggtaaatcccctatggtgaacataagggatttgatgataagaacgaggtcaagatcctgtaggtgaactccactggtatggacctgggtggccggtatggagcaagaggccttgagcttcccagtaagggcctggctctgagctagacccccctggtttgaaccgagccataccagtcaccctctgtgtgactttggacaagagacttacactcattaaggctcagtttgctcatctgttagatgggcatgatgctggtgacaccaacctcatggacttgctgtgtggatcaaaatggtatcagacccatacaatcttcagcatagtacctggctcctgtagtaagcatataacaaatattaggtgctatcattgacacaaaggccacattttaccctcaacttcatttatttcctaaatggatcctgtgggatggttttgacagataaaactgtttaccaaattcttaccccgtgacttggacttgcaaggactgcaaggcggaatctaatttaacacttatttaaatttaacagaaagaaaacatttgggttggctttgtcagggtttcctttttttaaaaaagtatattttacaattttggcttttgagatatcagggtcttgagggacagacagcttacgtctaatgtctgggcctgagaagatcctgtaagagacaggtctgtggggtcaaattggcctttcagactgagcctgccatagattttctgaggatttagatgatgtgaaggggagttaacccatcccacattgtaaattattttttcaaaggaaggatgagggagccaagtaacaatttatcatgcttcttttacattttgactctgcaagaatttagcaatctgccatccatctccagctctgtttgatttgggagaatttttttttttttttttttgggtagaggggagaatgattgtaaaccaaatgttgaaaagtagcctgttggttttttgttrcagtgtaaaatatggttcagtaattcattgcccaacctccctcccctgccaacaccaccaccaaagaaacaaaaactaatgtccctgctcctggacagcaagagttaattttcagcctttggttaggaaaacagaatggagggagctgtatgaactttatgcttatagcttagttctgcaagcccaggagatcattggtcagcatcagatgagctaagatgcagttctgcaactgctgaggaccaggtcctgtttaccagcagagggcacagcctgtgccaaggtacagctaatgggaagtcagagacagagtgaaatggtcaggttaattgtagagggtggcacagatcaggcctaggtgtgctgaactaagtaaaatcaaatttctctaacggaaaccccaaaaagttattaaaacacaacctccctctaatcatttaccacatggtttttaaattctgtgggtagtttaccaagaaggcctcttaggattatatataatgtccacatacttgattactgagaaaggaaaccaagactatatttaatcacaaactgtacagtgtcagaaaaagtcctgctaccctgtcttgtcactgccctgagtggcagtaatttatagcttgaaacagcagctggagcaggaaggagcctttaaagcagtcacatttgttggttaactttggttaacccagaggtcaaaagcagtttctgtctagcacattagataacttttgaaacgtttgacatattgcagktagcattacaggaacatccacacttgtgataaaaggagttatttatgaggtagctgtggtttcaaatgtaaaggagaaaaaaaagtcctkcaaattatgaaagctttggtaaaaatcccaagttggatgttgctggcatttctgagagggtgaaagggagattaaccaggaataaaatgggaaagtccatttaagtacacactggcatcccagtggcattacctgctgattgaaagaccgttatggagaaaggattaatgccttcagccttaccattagttgtcttttatgtcatgagttgctatgaagaactctactattggtgctttccagctgacctcttattgtccagaaataagtgaagaagatctattggttccaaacacattatcacggagcacttgcaatctattcgytttctgccttggtttatcaaagctaagcaaggggtgctctaaagtgaaaaggtggagaccttagattcagctgctttctgaagtctctcctcttctcccacagaacagtcattgtggtatttcataaaaaatgcatgctttggggggaataatgactgttttctaaaacacccttaccttaaatgcttgaaggttttgctggaatgctaaccttccagcatttaaggaatatatgactaagttaagaattattttttaacgcatgttatgggaaagttgaagttaattggagagaaagaaatttaacttgacaccattatatttcttcttccttctttccttccttgtctacattcaagtcacacaccacacaatgtagtgatctgggaactggccttggaataacacatcctgccgatgccatttttagctagagatctggggcaggtgatgttacccttctgagcactttccttagctccttgtaaagttgctatcaggaacaaatgaagttctatgtataagagtcctctgaacatttgcaaagtactgagcaaatgtacagtggtgaatataaattccctgagggcaggggccgtctctgatttaggcctcttcatattgccattaccaaacacagggccatttgttgactcaatgaggcaatcagccagtagacaactttatctcatcaatagcccagtttttattatgtgtccagtgtgtttcctgtctggagctttgatagtttttagagctagaagccaatgatatggttgagaaacatatcaattaggagatgtctgataattggccaaggaattgggccaagatgttattaattttcggcttccttcacttgactataagctcctccaggccaggggtcatgtctcattcatctttctatctcttagtgactgaggtttagcacaatgctttgcacttctcagtgagccggcagtgcttctggatggaatgttcagtggccctgggccgtccttttactgccatcccagacccattgccactccctgttctgaattgagatctgaacttcagcaggtttgtggacttgctcttcttccactctaggaatgccctttcaggtaccaacactgcaagatggacccttctacattctgcagtgagttcattgcataatctctattgcccactttagagcgcagacatccttctaacttctgcagatgtcattgaagttgtttttttttttaattatatggctgaatcatttatacatgtgtggtgaccacatctcatcttctagtgcaagctgctctggatagccatcttgggcatggctggctcagagaagtgagtggtcctaacrttgaatagagaaaggaaggagccacattggcagtacagttgtaaatcagagcctgaaggtgcaggtggttttgggaaatgagagttttctgaacctagaggcaagaagaaatatgtcatagaggaagttaatatttcattagtgtgtttttagtgttcatgtgacatggattgcaaaggaggaaactactgagtctgtagatgttgattagttacttgttccagtgttaatatatttcctgttgctgtagagcccgtgtagacaggcatttagacttgatcacacattcagaaggttcacagttggtctactacagtgctcttctgcctaaacaccaccagattctccctagccctccttccaaatcctggctccctcttctgtttccagtctcagctgagattttacatcctcagggaagccttcyttgatatcccccagagaatatagagttggcctcccatatccrtgggttctggatccatggattcaaccaaagtcaaatggaaaatatcagaaaaaaaatstgtctgtgctttatatgagcagaattttttcttctcattattccctagacaatagagtatagaatctatttacacagcacttacattttattaggtattataagtaatctggagatgatttaaagtatacaggaggatatgcataggttatatgcaaatactaagccattttatatcacggtcttgagcatccatagattttggtatctgaggggatcctggaactaatctcccatgatactgaaggatgactgtatctggcttggtgctccagagccccctgcacctccccttagtgactttccccacactgagcaccatttatggccattacctttttactcaaggtcccttgaggcctgagtgtgcccacttgctccccactgtattcccagtgccttgcagggggagttgcttcacaaatactgaycggattgctgtkcaatgaaatctccgtgaagcccatgatattaatcacatctttcactaaggtaggtttcaaatttttgtttgtccttgtaatttttttgttttaatttttaaaatttggaatttagcctgggtgcagtggcttgtgcccataaacctagcactttgggaggccaaggcagaaggatcacttcagcctgggaggtcracaccaccctgaacaacatagggagaccctgtctctacaacaaaacaaaataaaacaaataggtgtggtggcacatgcctgtagtcccagctacttgggaggctgaggtgagaggattgctggggcccaggaggtggaggctgaagtgagcagtgattgtgccaccgcactgcagcttgggtgacggagggagaccctgtctcaataaataaatgaataaaaataaaaattggaattttactaaggagcaaatttctgctttaaattcatttcatataataccctgggtcattgtctgaaggaagaaggatcaggttgatttccagaatgcccaaatcactccttaagtttctgaaccaattgagaagcagttgtctttcccagattcttttcattgtggctggcagtggtttccaacctttgctgcacattagaattgtgtaggcatcttttaaaaatccccatgcccaggtcagctttaagccaatgaaatcagatatttggggacgagagcatattttgagggtcctaggtgatcctaatgtgcagcaaagttaaggaatacaggagtatggactattttttcgagagggtggtatgccaggtatatagcccctaagaagtaaaaattttgcttattttcctgaaatctagagaaacaaaacttaaataaatacttttggagaacacattctacattctattttaatgaaaaaatttccaggcatatcaaaaacaatgttattcacaaaaaacaatgtaagttaaacgaaatacaaatgggcttctacagtatatttcaaagtatgtgctttggatttggattctgattttacagttcgccagctgtgttacctcgaatagggaacattatacctctctgaaacatgcaaaattagggatgaaaacacctaccatggaggggtgttacaaagattagaaagaatgtccttggaggatctagtacttaatgttggctccatttctccttctctttcctgcacgttttgagttaatgcattcagctttctttcctaaacctgtcaccacagacaagcctgctacaaggatccctgaagtttagagagattgacttccccaagtactttctcagttaccaaggataattcattcaacgggtttctacactcattttcttgtgaaggaagaaacatgagtgggaagggaggaagttaggagttggacctgagtatcctgtatacaggagtgtctgaaagtgcactgttgtgatccatccatcttttaggaagagttggatgatgattttctggctctgtagtgactcatgagccacacagggaaggcaggtttttattcattcagtcatttgagcaacagctacatgccagaccgagaagtgttaagagtgtcagaccactctaaagaaccaggggtcctcaagtaaaaaggctaattccatggtttgggcagggaaggtacaaattaagcctggagcactttgttgtaccagaaagtatacaaacatgatcagtgatgtcaagaagacagagagaaaccagcttgaaggtcttctgctggccaaatctgggacactttgagtgatggaatagataaggacagcaatggattataaggcattgaataaaatatgaagccacaagtctattcggtgacaggtaggtaagtacgtagatagatagatagacagatagatagatagatagatagatagatagatagatagatagatagatagtgaagraaaggaaagggctcttccttaacagtgtaatgccaactgacatatgtgacatgtgatatatgtggaggaagtagtgaatttgtaaagtcatcattttgcaaccctagaattgttgggcaaaaatcatcaatggatgttaaatctagagagagaggggttgataaggaacaggatatttgtatgggtttaaagtatctccccacatattgcttattggctaagactgggcaaatggtaactatacagtggaaaaaatggacaacatctcagccagatgatcaggttaatatcatgaatgagaagcagatggacatcacaaggcatccaggtgtccagatgcaggtacgtgatgcactgggaagggcacagcatcatttgtgtagtattctgaccaacactgcgtaacccgaatttaatcaggaggaaatatcaagcaaactgagtgaagaacattccacataataactgtcctgtatttgtcataggccaatgtcatgaaaagcaaaggctgaggaactgttcyaagttaaaggagactaaagagacatggtcactaaatgcaatgggtaaccctggactgggttttgtgctggagggtagaaaaaacaaatgctctgaagtacattattgaaacaattgaaaaaactgggatatggcctctggattagatatatataaatattatacacatatatttaaaaatacatactgaaatattaaggggcaaagggatatggtatatgcaacttattcatctgtagttcagaaaaaataaatacacacacagaatgatacagctgtgctgaaatgttgaaattcacaagtctgggtagataaaggatatataggagttgtctggattactctggcgttgtctggattgttctctaagtttgaaataatttcaaagtaaaaggttttttaagtattggagtacagtaaataaatggagcccggctgtctgccaccacttagctgtcttactttggacaagtcactgagcctttctaaccctcagtttccttgcctttcaagtggggataacataatatcagttctttttgcattatagggttgtgtgcatgacaggtattctaactgcaaagatgtgtagacatagctgtgacattttcatctaaacccttccatacctccagggctttgtatggatcataaggctttgttcccttctatgtattagacacttgtgtttataaaccatgaggagatgatactactactaccagtaccattaataataacatcttggctagccttaaaaagtaataatcatatctgacacttacatagtactccagcttgaatagtactcatgagcctccgggtgccagacactgttctaagtactttacwtgcgttatctcatttaacccttacaaaattatctccattttacagaggaggaaaccgtggcaagaagrggaggcagagtgaagattcaaattcaggcattctactctcagtttatgctctcagccagagccctccagtgaaacctttttctcctgtgcccagcaccctgcctggcacggtctggtgcagacctgataaatgtctatagaatgaatggtgggaaagagtgtttagaaagtgtaagggctctgcaactaaaaggacctgacctagaatcttcactctttcttcagtctctacattcagcttttctgagccttggttcccatgtttgataaaaacaatcctggcagagaagaggtatttaacaaatggtcatgattcttctccttctcctttgtctttttgttcttatctttccttctgaacatttccttgtgtataatgttaatactacttttaaccaggtgtttctcctctttagtgtctattatgatttttatgtaccatttttttttcatatttgtgatgacttattttacttaagtgcctccacttagattttcttaagggcaagagccacgccattttcatctttgtgtccttattgctctgtatgatgcatggccttaggagtagggccattgctagcccgtctctcactttggtgaaatttagaaaaaggcggttccttttagaaaaagctttgcagggaggagagctgtgcagcagataccagtatgtgaagaaaagacaccctgtccttggagggttacatttctcttttaggaggcacagcttggcaacgaagctatattctacctyctactcttccccaccgctgggcattttgtgtaatctgcaaaataaatgataaagttggcttggcatggtggcttatgcctgtaattccagcagattgggaagctgaggccagaagatcatatgagcccaggagttcgagagcagcctgrgcaatacagtgagactctatctctacaaaaaataataaaattagccaggcatggtggagcgtgacgattgtcccagctactcaggaggctgaagtgggaggatcacttgagcccaggaggtagagactgcagcaagctgtgattacaccaccrctgcactccagcctgagcaacagagcaaaaccctgtctttaaaaaaaaaaaaaaaaaaaaagattaagtgcagcagccatgcctatgagctactcaggacatattgaatgaatgaataggtacacagatgacacctccttcctggattcctttatcttttcaaacttcagactcccattgtgccacaactcactcagcctgagagatgatcccaaggctgcttgttgaactgtgggaatggttgctcctctgtagcaatccttgagtgaagcccaagggaaggctaaacctcagcccaggcaccgacacccaaactcaaattacccttcccaggttagagcaattggtctcagcttggatacagctcagggcaagcccctgtgcttcacagccttgctctttaggaagtccgtagaggaacccagctccactggtccctcaccagtgtggtctccaagtccttcctggagagccattctccccaggcccaggaagggaaaaaagctcatctggtaactgctggcattagcagagcagataccgggtgagagctctgtctctgcaggctggaggtggagccatgtggttaactgctccccgccaccaagctggctggtcacatttgcagagagaaccttgactttgtcatttgattataggtagaggcattcctaattttcacttgtgatttattattgttcttttcccattaaaataattttcttctaagatgcaaagtactaagtatttgttatagaaaagttatgataatgcaaacaaaaagaaaagagagaaaccaataatacagctcagacataatcactgtaaataccagagtttattctttcgtctctgtcttttctgcacacaggcacacacacatacacacacatacacaacatagcatcaccttcatttactcattgcattttggagacttcattcattgcttggaaatttagagattatattgatttgtgaaagcagttgaatgatctaggaatataaagtattattagcatgttgggaatggaggtgagattataccttaaattccacagatatatgcttctagtctctcatgcctgaaataaacttgctggaatgtgagtcttttatgccaagcatttgatacacaaagaacctacttcccaggagattggctaaaccaagcacgttgtgttcatctttatgatgaaatacagatttcccattaaaaggaaaatctcttcctttcagaaggttgaaaaagatgacacttcacaaaaaaaggaagaagaaaaaaaagaatcccagctggttaaatttagggtgcggaaagagatccaatcggcagataatccctggccatgggcccacagcattttcatttgattgtgcattggatacattttcattcattttaagcccttgcctttcagtattttgttccttggagacaggcaaactagtatcaatagctctcttagcctatgtcaaatggtttgatttacttaagtggtctatttcgttattccagtaaggaggaacttgtatttgttgatgcatttctgagaatgattgtgcaaagaaatgctgaaattctaatcatttttcttctatcctctcagtggtctccttgttttaaatggaaagatgttggataaaattgtgagtgtggttcatgggatgagggtgctctggatgcagagtcaggagacctggcttctcacccagctctgacactgacatcatggatacatccttggccaaatctcctaattgccttgggccttaatttccttgtctgaaaagttgggataatcatctcttctctgcttttcccacaggggtgttataaggataaaatgacctaattcagtgtctctcaacctctcttgcatattaaaattacctggggaagtgttaaaaaaataccttttgtcaggccccacccagaccagttagaatccagggtgacctgggctttggtaattttttatatcccaggagattatattgtggaagaagggttgaaaatcatcgaacatccaggcgataatatattggaaggcctgagaatgcaaattatgggaaaaggttaaaacgacccacattagtatggtcctctgtagttttcaaacggtgtcacttggagacttgttaagggtctataaggcagtggacttmaaacttttttgactgttaaactaaaaaagatcatatctcggtatacacatgcaataacatgtaaatacactcagtcccatgtaaatacagctttcacggaacaatattttctgtgtgtgattcactctaatattttttattattttccatttcattgcagtttaaactagtccatttcatttctttcattttatgtgggtgcagagccatggaattgatttaatgatctgttgtacagtcccctgacctatagtttgaaaaacactgatgaagagatggcctatttctggggagcaggctcacccattgtttaatgttgtttccttctagtaccagaatcagtctactgttgcctggatcgactttcccactctccctcccttttatacctttacttgctacatcaaacatacccagcagggttgtcctggttctacacttatttggcccttaattgggtgacttagagccttgccttctcttctgcattctaatctctgaagtgatagatcttaaacattatactttattcctcacatgagatttgttaaacaaattcaagacatattgtcaattgaattacatatagtttactaaatagattcttagcaaaaatacaagaaggtgcagttcataggttgctctagctgcaacatggtgctagtgataattttrgtccctctactttggagaactggggagcccccaggccagatcatagaggaatcatctccctcttgttctgccggatcttttcttccatgcttcctggtcctcctaggcaattgtgctatcagaagtaagtttgtttcagctacagagaattctcagcttctctcctgcactcattaaagtttggctgtcatagcccagacacatcctctgtgacatttctttatccctggcttggtactgcttctgttggctggtgtgtggctctgggcaggtgcttgaggctcatagttctctctcaggacacacacactataatattcaacctaatcaaatagctattggttcctcctctctgctttactgccaaggggactagaaggtttgggtataaatttgggcaggaagagaacatcttccagatataactatctctgaaaacctcccccagcgtttttccccaatgtctgtttaaccagttttgtgtctgcttaatttatgctatattgcctctaactttgtttgacagtggcacagaatcgaatgtattcaagttaaaaaaatgttttygtggtgtacaacatatgttttgatatataggtacagtgtggaatggctaaatcaattttcaacatatactaattgagcatatacctcaacttttgtttttgtcatgtaatttttaaggcaatctttgaagaaagatataatttccactatataaaggaagtaacagaggctcagaggggtgagatgatttatatgactattaagggtcagaggtaggatttgaattcaggtatttagattctaaatcatggcctctttcttctacatccaggctctgtatatctgtgacaggcacaggtcatccttgcttcctcaaggcatgttggatccaagacagaaaaactggtacaaaggatatcctaatgccagacgtgatcttgtcaagggttgaggtggtggataccaccacatgcctggctcctaacggagggagtaaggcttcaccagacctctgacccttctgaagccatacctttcacagtcaggtttgcctgaagctaccatgattcaccagcataccaaatccttcctgccagtggaggctacattaggctgggaaaggaatcttgtgaaaaaatagatctacttctcctgacccgtgttctccaggggattcagggagtcctctctcagactgctgtctcggttccacggtgattggcgtcctgagtaaatactctgatagactaaacacacgttgcccatgttggcccaggagcagcagtccgggagcgcgcccagtacagtcccctgtatggcagcccaacttgttaatcatcgcactggcaggctagccagaatggggatatttagcttggggcttatgcattaccatctatgctaatatggcattcttagaactataatttccgttctgacctccatggatactccttatagagaacacagacataaaacaattcttgaaatgtcaggaagaaattgcatctaatggagggtacctctgccaaggaaaacatacttcagtgttaaagcattcccatccaaacagggaaatttgaaaactgctcttgggtctgcattgaagcctgagcatttttccatgccctttaataacctgtaatgtatgtaccagccagctccactgcaggctccccatcaaccaagagggcttactgtgaaggaggtggggtggccggcgggaggtgatagctgagacctgtgtgagctggtgtcagctagaagaccttcctgggggctaaagcaagaagatttataatgggaacatataccacatgacataatgtcctacctgcatctgttacagtggagaatatgatccccagttgggtcttgaacccttggccctcctgatacctgataccaatgaagcctatcctccaccctttaggatttcatattaggagacacacaatctgtcttctgaaatcatgctggtgaacagataccacttagtaataataatattatgttgctaatagttgctgtcattatgagtgtttataatatgccaggaataaatactttacctaaattatctcatttttaccctgtcagtaacactgcattgggtactgctgttttctccactttacagagaaaactgccgcacagaatcgttagatcacttggccaaggtcacacaggtagtaagttactgacgtggaatttaaaattgatttagccagtccacactgttctagacctgtgcaagttgatcccctgagataataaaacaaacaaacaatgaaaagaaattatcttatcctctacacatttctattttatgtagatgttttacaatagatactataatagtacagaacttcatgtatgtaagttctgaataaataaatatacatatataatagaggtttgtggtccaattttttttttttttttactgatttacaaacatttggagattgctatacttaactataaagttcaatggaaagaagagagtttcttttcctgataactgatattgataatattatgggaaatctgatacttccagagggtataagccagatatttttgtctcatttgctcaccaccatattcccagtaccaaccctaatgcctagtagatgttcagtaaagaagatggccatgaagtttggaaaccagtgaacatacataatgctgactgaatgtttgtgtccactctctgctgccacggattcttatattgaaaccctaacccccaatatgatggtattaggagatggggcctttggaaggtgattaggtcatgaggacaaagcccttctgaattggattagtgtccttataaaagaaggcccagaaagctcccttattctttctgccatgagatttacagcaaaaagaaagccctgtatgaaccaggaagcgaggccttactggactctgaatctgcctctgctggtgccttgatcttagacttcccaggctccaaaactgtgagatttaagtttctgttgtgtataagccacacggtctatgatattctgttatgccagcctgaactaagacacacagtaaatttttcattgctatgacattataactcatgatatgttctgtgacattgtacaatatgcttaatgagctaccctacatgtgctccagtgtgctgtgcagaactgcagtgagccaggtgtactttcctcaagccccgctcaggcatctgaaccattccatataaagaaggcaggagtgagtgcttgcacagaaaggggttagggcaagtcggggacatggaaaagaaaaaaggaaaggctaaaatagacgaaatcaggtccgaattcaatttcatcaggtgatttttcctgattacctattgctccttaccttcttaccaatgactttcttttttcccactccattccccaccccccagagaaggaaaggtttttgcctgagtggaggtaatggggtaagcttccattaaggtggaagatttgagcctggcttgggataggcrggagaacagccacatttgaataatgtttctgtagaaacctgaacttatttcattctgtgagatagcctggttttctgcccattttgtgaattaagaaacagaggcttagagtgttccagcagctttcccaagcttacctggagggtttcctttttacgggtgctattttctttctgcttcactcctccaggagctggcccacattcacagaatgtgtctggaaagtgccataattcctccaggtgcaaagggcttagtaatttactccttcagtctcctgcttgattgtctcaaaattgaaaaggtttcatgccattttcagacatgcttaagtttctcaaagggggtagcccgggaacttgagacttcagtagtttttccttcttgaatgcccctgtccagccagtgccctaacttgtacaaatcaaggaaaatggtttgtgtggggtggaggtggggtgaatgttttcatttttcattagacgacattcgtaaacatacttgtgttttctgggttggtccagttgtcttgaccttcgttttgtaagtatcttgaagattcctttctcatccaaatctgttagaatcaccgcagtttccaaagttggctaaacatcagaatcacctgaggtgcttgttaaacacagggaatgtcctgatagcctctggagattctgattaagtggaccagttaccagaaagcagccccaatccaggccccatgagaggattcttggatcttgcgcaagacagaattcgaggcaagtccacagattaaagtgaaagcaagtttattaggaaattaaaggaataaaagaatgaccactccataggcagagcagccccagggctgctgtttggctgtttttaacggttatttcttgatcatatgatatattaggggtggattattcatgagttttctgggaattcttcctttcagaccatatagggtaacttccagatgttgccatggcatttgtaaactgctgtggtgctggtgggagtttaagtatggtaatgcattataattcacatataatgaccagtgaggacgaccagaggtcactttcatcgccatcttggttttggctgccttctttactgcatcctgttttagtagcagggtttttgtgacctgtattttgtgccaacctccaatgtcatcctgtgactctgaatgcttaacctcctgggaatacagggcaggagctttcagcctcattttacccaatgcctattcaagatggagtcactctggttccaaggcctctgacagacctagggcaagttccccaaatgtttgtttttaacaagcaccacaggtgaatgcaagggcagccagatttgggagccagtgagctatcaaacacttttaaggggaatacatgagagattccctgcaagagttaaactattttgataccacagtgaagggagcagaaaatgacattgaaatttcatcaaagctatacacctacacaggtgagattaccactcatcatgggaaaggatgatgaaaatacaaccaaaaaccttcatcgaacaatactctttactacatttactagaaaatcctagcaaattcaaaaataacatgtgaaataaagccctgaacttttcatcctttaggagcaggaagttctctttggggattggctgaagtagaaggagctctgcaagagccagtaagtggttccttgtctgtggttgttagcaaaagaatgaccatggctcacctcagaggtcacagagaagggaggtaaagaggacagttaatttctttaccaggatctaatttatcatttgggttttcagagaatgtgggaggtggctgttgggcttgttttcttttgcagcaaagctttttagagcatgactatgaggcaggcattgttccaggcaccctacactgttgcaccaaagtcccttaagagctgacgttcttgtggtaaagacagataataagcaactaaatgaaatactaatacagatcatgtcagtcaatgaaagtgatatgaggaaaatagggtaaaagaggggggctggggagaactcgtctctgaggaggggacaactttgaacggaggcctggctggcacagcaggtgccatcaggagacctgagagagaatgatctctcacacagaggcaaagggaataggaatgtgtgtgggaggatttcccagggagccatgaagatgacgttytgggctccaccctttatgcctctccaggggcctaggaggggccttagctattttgcatttgtaatttctcttaaagacacccccccctcaccaccagcccacatgctgcccactctgcctacccacacctagttatagaagctttagaccccataaaacctggatctgcccctgagaaccagaagtacraatatgctgaagtagggaacaagcttggtgtagtctaagagccttaagaaaaaagaaaattggtgyagacgagctgtgcttaagatggagtttaatagtagattcattcattcattggttcatttattaaatatcaatttactgagtgccaggcactactatgaaaaaaataaggtccctgtcctagtggagcatccattctagtaaagagaaacagaaaataaacaaatacctatataatgtcccaggtgacaatggttaaaaatgaaataggtcaaggggggatatagggttagggtacgatggggtrgtaaagtgtagctgttttgtaagggatgggaaaggaagggctctcacagttctggtctgagctgagatctggaggaggtgagagagtgggccatatgggggaagaatactccaggtggtggaatagcaaatagaaaggcccccaaacaggaacatgctgggccttttcgaggaaggtcctagaaattgagaaaagcagaactaggtgatggaggacctaggtaaggaatttggatttcattctatgagctgtgggcagcctttggacagccagtgctctagaagtctagggaaggagagagcatgggacatcagaggcctcacagctgactttaagatgggcctggaagtatccagtgggcagagttcagcatagaaagaaggccagtggcagccactgcagggccccaggcatggagctaggaaaggtaacctgtctgagggcctttgacagaccagtgctgcctggagctggagttctctgagggagagtgctggggatgaggttgcaaaggtacctttgcctgaagcatggagagccttgaagccaggccaggggaatttgatatttactaatgtgaatacctgagtgccctgagaatagtggggactccaaaatttctgtctaggagcaatttraggatagctctcaggtggagggtaggggtgatggaaggggtagaggatctgtcttagagctagcaagcaaaagattttacctaggttgtgtatttacttgagggtggttttgggaaagggcagtggtaaagttttgaggtcttgccctaaagctacactgcatagcaaacacactgtttttacttggatggtatcctatttggggttactaaggggatggggatcaatgaaaattatggggcattaatccttggctctgtcctgggagaatgaaaattacataatgaaaggtgtgatttagaaaggtggtcaagagtgagtgtggggaggcattcactcattcatccattcatccacttagcaattgtttatgaatactccaatgtgccaagtggcagaatggaacttgtatattcctgtgttcacactctgttcctaccacttactacttgtgtcatcttgggcagcttttatttaatctcttagaacctcagtttccttgtctatagaataataataccagcagtcccctcttatctgtgtgggatatgttccaagatgcccactggatgccaaaaaccatggataacactgagccctatatttactatgtttcctacacatgtgtacctatgacaacaataataactagtaagataggacaattatattaatataccgtaataaaagtcgtgtgaatacagtcatgatccctctctctcaaaagattgttatactgtaccacatgtaactgaaacagtagaaagtgaaactgtggataaagggggactgttgtaacatgcctaccctagtggtgcttgtgattagagagaatgtgcatacagtgtccaacccagtgcttggcacctagtaggtgctcaataaatggtggcgcctactgggttgcagtagatggagagtactgtaggcagaaagttgttactgtggcagcacagatttcccacagtaagggccttcattagggcaagggtgaggtttgtagggcaggagatagttttgagaggcttggaagaacatcttgaataggacttgggtcctgaaggataagatgataatgtgaagataatatgaaggtcttcagcagagaaaatgtggaactagatgcccaaacaagaaggaaaattgggaagaaagtagactggggaaggagtcacactttaggttgaatctggggcagcagccaagtggagagagtctctagatttggagaatacagtggtttgcaggagtgagacctgggctaagcagacacattgattttaatatcactgtgatggcatactagtcaggatacaaacttggttgctataacaaagactcccagataacagtgacatatgtaagagagatgtcagagtaatccatgcagggctttggatccttgtccttttgctccacttttactaattggtagccctcatttgaatgggccaaggtggcacgtcagtgtgcctacattccactcccagggagggggagatgggaaaaagtgagggcacacccagctcatttgagggcacaacctagatactgcaaacccaacttctcacattctgcaggccagacttggtcatatggtcacacctagctgcaagggaggctggacaatgtatactttattccaagaggcctgattcttagctacagttctattattttggaagagggaagaacagatattcaggacagctagcaatctctgccataagcagtgttaaataaagacctgagattggatgagaacatggagaaaaagagtgtgacagaagtatggtctgccctcagtatccatgggtttttgcatccatggattcaaccaacctgggatcaaaattattggaaaaaacattgtgtctgtacaggcatttttttcttgtcattacttcctaaacaatacagtataacagctatttacatgaaattaacattgtattatgtattataagtaacctggagatgacttaaagtatatgggagcrtgtgcataggtgatgtccaaatagtatgccattttatgtcagggacttgatcatccttggattttggtatctgttgggggtcctggaaccaatcccccaagataccaagggacgactgtaattagttggattccattatggcaatggagaaagacctaagaagttaacgaaaaacatggaagatagacaagtaggcaaaatgggatggtgtgggttgtgggatggagcagtggttagctgtgtctgatcctgcaaaatgcaagagaattccatttggtgattagtaacatattgggtggtgacaagcaaagtctggactgcagaggttaaggcatagacaattagaggcagtggacgtggattaggctagagaggtttggcaaacacaaggaccttggaaactccaagggccagccaggttacgtgaaattaagttcaaatgtctgaaggggtttacagatattaattttactttttttcctaattaggaagaagctttaaaaaaatcctcttaactacaaggacctaatccttttggggagtttgctaatataagcataaattttttctttggcagtttttttccccatctccctcagataaccttatctcaattttgaatcagaaatcttatttatagcttttctggagagaattatttcaaagggggcagattctttgccctttggacttattttctttttaagaacagataagttatccctcgtttttctcaggagagacagttaaattattaatttaaaaataatgattttgagctgaaagggggcgtaaatcaaagttggagaaataaatccagctgcttcctgtttttgtgtttcttttcttcttattcttcttcttttgaagggaaactaaaaatgccaaagtttcatttatcccccaggaccagaagagaacttagcacagctcacaatccttaatagacctggaatgaaactgggaatggcatggccttccaggatccttccttccaccctctagctttcccccaccaccgtagcagtttccatttttaccgttatcccaagtacattgcyaagcaagtgtgactcaggggctctctcggctagaaggcctctgagcctagttttgaaggccatctgagtcctaggcctttgtgcgtgacccataattatctctgcaaagatgtgtccgttgagtacttatatgggaagagaaggcagaagggcagctgcagcactccctgcacctggtgactcgctctgctggcctcagcccatggggatgaggcccatgtaggtggtggtagttctggtgctcccagccctgttagagcatgtgcagtctggagatcagatgagatgggtttgaggcctctgagcttacacacacactggatgttaggaaaaggaactgtcacggatgtttcacaggcattgagtgggcaactagtctgagtcccacagtgagtccctgtctctgaatacatttcttctgtatcgctctagctgggtggctggtcctcctcagctgatcagtcccagcagagctcatttctaaagaggccagggagtcactgatcagcagagctcagccctcaggaagctgaagaggaaagtggatggaaccagtggccccaagagcaacaatcccagattcttacccaagccctggaagctaactcgtagggtcattgaggagtgagtgagttaacgcaggtgaagggcttgacatagtacatagcacattgtaagcatttaagaaacattggctgttatttattatcagctggacccaaggcagtggcccaaattcccttaattcccactaattcagtgtgtctgaggggtccttaatactggcattgatttactttgtgaatcactcacaaacattgtgatgccttgtggaaaatgcttgtggaaccaactctgttgagaaagacatttttaaaacttaagtttttaaatattttgaaagcaatagatgcctgtagtgaaagaattcgaacctgactgaagagtataaagaaataagtcttctcccacttttcccctaattctcagtcctatttcttaaacttcaaaatggttacttggatatccttctgaaactttaatgtaatggagttgaaaacactaccttgcagatatgctaagaaaatgtagcatctattttattaattaactacttttccccaagtgctacctccttcctagttggggagggccaatagaagtgggtaatagagttgaatttaagccctggcatctggacttgacatcctctgcttcaggtctggctgggcgtcttgggctggtgtctgttaaggaagtctatggctggtgaacttgtaggcagttctcctggtagagattatatgcaatgacaaatgtagcaaacatctcctatcaccatcggctccttctgcattttcctgagaacagtggtagccttggagtaccttcctgcagcctgaatgtgctcaactgccagtgttactatgtcgttgtaatttcatgcaactgcaggatctttgggtatgggggtccctctgtcccccgaggaattcctagtgggaagtagggtacatgctccaagcagctttctcttaacaaacataactctgaccctcttcatctttctggaatttcattcccatgtgggagatgcgaatccatgatgccaacaagcaaacctcttctttttccttctcctgttgccccaacaacagaggatgaggacccccscttgcatcctattctcctcctgccctcattgtcccrccttccctgagggagtgggagagtggctgctgggaagggaatggaaagcacatgggttgcatatcttcaaaacatgatctccactgcatgaagtctgtcagtctgtctgtcagttgatctggccattcattcatctaacgtttgtctacatagtgttttgtaacttgctctttaaccaattgataaccctttttttgtttgttttttgttttttttttttttggagacagagtctcaccctgttgcccaggctggagtgcaatggtgcaatctcagctcactgcaacttccgcctccggggttcaaatgattctcctgcctcagcctcccgagtagctgggattataggctcatgccaccacacccagctaattttttgtatctttagtagagatggggtttcaccatgttggccaggctggtctcaaacttctgatctcataatctgcctgcctcggcctctcaaagtgctgggactacaggcatgagccactgcaccctgcctcaataactcttaatgacctttccattgcagcacttaccacaattcctcattctttctaacagctgtatagaattttgtcatatagctatatcaaattttatttactcattttcttactgacatgaattatttattattatgcaagtatgtctgaaaaatactttatgccctctgcctatgttttctttcctcttcctttgcaaatttccttacttgtcacctagtgtacaatcaatagtatgacagttaacttattcttttttgtgagtcccgcagatactctccatgcctcctgtatgcctgtaatcctttgcttaacaatttgacaacgagaacataggattatggtttcgggggaagaagcagcaataatggcagttaaattttyaattccccaggtgcatatgtcttccttaagtgcatactctgagtcccaagtgagaggagaacatatttagaaagaattgtaaattatttctctttgccaagaggaagggaaggagggtcaaattacgtggttgatcagttaggataaatcctgaatatggtagcttccacaatttaaagttttatcctcttacataaaagaggtctggatgtaggtggcagtccaatgctcatatagtggatctatgaaatcatatctttctgctacacctatgtccgtagtatgtagtttttacccttaggaccacaaaatagctgctggcactccatccatcacatcaacattccaggcagggaaaagtaaaagggtaaaggacaaatgaagcatrtgtcagctatctgtctgcctttttaggagctttcacagcatcccacataacacttctttttgcatctcactgaacagaacttggtcacatgcccacatctacctgtacctaggcacagtgccatcctgaataaaactagagatctgttagtaaagaataagggaagagttgtgtattagtctgttctcacactgctaataaagacatacccgagactcggtaatttataaaggaaagagatttaattgactcacagttcagcatggcttaggaggcctcaggaaacttacaatcatgactgaaggggaagcaaacatgtccttcttcacaagcagcaaggagaagaagaatgaacaaaagggggaaaagccccttataaaaccatcagatcttgtgagaactcactcactgtcatgagaagagcaggagggtaaccacccccatgattcaattacgtcccactaggtccctccaatgacacgtggggattaggggaacaagataagatttgggtggggacacagccaaaccatatcaagatgatactgggtagacagctagcagtaactgtctcttgtgatttgatccatggtttggatttctcctttcaccgagtgctgacatatgggtaatagttgctactcagagcagagatgtgcaatggcttcagttgatttcctcaccctcccccatcgtctgggtttcttcctccttccttctaaggatcttgcctcctgaatgatcagggaaccccagtgtagcatttggccataatgtagaagcatatcacatgtttaaagtttctttttctcaacctcttcttcaaaacttatctgttgtgtgcaccmtctttgctgggcacagttagacagccggcttgctacccgaatcaacatgagctaaggagctaggattcactggcttcccattccagctccagttcccattgccctccttacccttccaagtscttaccctccagctgtgccaaatcccctgccttggattcttcatgtccttcaataagtccagacacttgcaccagcagccccttcaacctggagtgtcctcctcatcccttcacttcttctgcagcccattcccagcgttctctgctcattttaaatgacccattttgagcatcacctcccacgagaaggcctctctaatcccttagcatcactatccgcttttgatgtcacagagtcccccaaatgcactgctgtgacagcatgtatcacactgggtcatcagagttaacacacaagcccatttcccccaggtagaccctgcacttttccagggcaggacagtaaatttaccacacaacctcttacatctaaaagaaacgttgttactcattgttgaatgaaagagaatgaatgacaactttcagtacttagatctacagagagaataaaagaattttccctctggtggggagatcttttgggaacgggagaccttcccacagccgtgttgtgatgaaggtatctccttacttcgtcgaagcacgagcatgcttggaattgctgttatattaaagttcccaacagcagctctgtggtcaagaccgtcaagggagaaggtcttagtttgtgcagctgaagggactcatgagacatcatcagccacttgaataaaatgctgggctttctataatggtttatttttgaataggaacaggtccttggcactaatcctgtttgaatcctggagctctgtttagcagaaagatgagccggagacctcaggttacatttgttgctcaagtttgaccagacacttgtgtaagtgtgtgtcatgccggactttgcttaagtaattaacattcctgtcaaggctccttaaaagggtcctgtgttatagagcccctcaaaaggctgatttaaaactttgaactctcagcctttccattcattgccaattactgatatgcttaaatttcatttttctaaaaaaatacaaaaaggattaggtttttgaggagaaatgtttattattaggagaaccaaccttggaaagtaaggtgattttgaaagaagagagtaagtgtagaagtggtattagagaatgtgttgaggagggagtctgaaaatattttttaaattaggaaacaggagaattaacatgactatgacaacagctttcaaatgttttagggactgtcatgaggataagcaatttgatgtaccagagggctgaactagcattttcttttctttcttacctttcctttcttttttctttctctttttccctttccttcttccctccattcatcctttcctcctttttgacattccctctttttttttaaactccccttaagctcctttaatattataaggtctggaacaaaaaaacaacaaatactggcaaggatgtggaaaacggggaacccatacactgttggtggagatataaattagtacagccattatggaaaacagtatggagattcctcacaaaactaaaactagaacttccatatgatccaataatcctgttactgggtacatatccaaaggaaacaaaatcagtacattaaagagatgtctgcattcctatgtttattgctgcagtattcacagtagtcataatatggaatcaacctaagtgtccatcaatggatgaatgaataatgaaaatgtggtacatatacacaatggaatattactcagacgtaaatataatcaaatcttgtcatttgtggcaacatgggtgagcctggaggacattatattaagtagaatatgccaagcacagaaagacaaataccgcatgttctcactcatatgtggaagctaaaaaaagttgatctcttagaagcagagagtagaatcgtggttaccagaggctgggaagggtaggggagagtggagagggatatgaaattacagttaatggatatgaaattacggttagataggaggaataagttctagttttcgacagcacagtagggtgatcatagttaagaacagcttagtgtacatttcaaaataactagaagagagaaactgaatgttccaaacccaaataaatgacaaatgtttaagatgatggatattccaactaccctgatttgatcactatgcattgtgtacatatattgaaataggacatttatctcataaatatgtacaattattatgtgtcatttaaaaatttaaaaaataaaattacccagcactttgagaggcccaggcaggaggatccgttgagcccaggagttcaagaccagcctgggcaacatggcaaaaccccatgtctactaaaaatacaaaagttatctgggcatgttagggtgcatctatagtcccagctacttgggaggctgaggttcaaggattgcttgagcccaggaggcagaggttgctgtgagctgagattgcaccactggactccaccttgggtgacagagtgagactgtctcaaaaaataaatgaaataaaattatttttaaaaagattataaggtctgtaagaataggagatggatctaacttgttaacagagctcctcttgaataagtgaacgaagaaatgaatgttattacaatgtgccaagcactgagaatacggagatgaaagacataagctagaaaagaaaaatgacaaatggttcactgcaatctggagatgttaagtacctggagatgtaagtacagaactgctaagggagtgggagagggtaggtgtctgcccctaactgcagaaggaggagaagaggactgagaaaagcctccctggagttggtgatgatttaactgcatctcaaataatgatcagayatccatcagatgagggagcggggagagtgcctcaggcagggtcaaatgtgagcagagccgggagtggagagtgtcacgatggaggctgagctacctgtgggaaagtcaaaggtgggtctgatgggagatgatgctaggtgaggtcagtggggccacacagtgtatagcaagtgaaggaatgtgggttccatctggatgtgatgggatacacccstggattttaagcaggaggccgactggtaactgcgtgaagggcacctctgaggggaaggagaaaattcaggagctgttcagtagaccaggcaagatggttctcaagaccaggtgaaggctggaacttggacatatagggtagagattggagaagaagggacagatatgagaagtattaggacttccttcttgttcgggttggttgactagatagacgatagtgcctggtgtacactagacagtgagtttctcagttatagatgacatctgttatctttacacccttaatctctatatcagtatctgatacctagtaaggtttgaactttaatactgttttcttaacaagtgctttaattaataaattatttcatgatagtaacttaatgtgccatatgtgacaaagagtgctattttttttctcctaatatctatttctcttttagaaaaataattctgggctgggcgcagtggctcatgcctttaatcccaacactttaggaggccgaggtgggtggatcacctgaggtcgggagtttgataccagcctgaccaacatggtgaaaccccatctctactaaaaaatacaaaaattagccaggcatggtggtgcacacctgtaatcccagctacttgggaggctgaggcaagagaatcgcttgaacctgggaggtggaagttgcagtgagcccatatcctgccaatgcactccagcctgggtgacagagcaagactctgtctcaaaaaaacaaaacaaaacaaaaaaaaaaacaaaacaaaaagaaaggaagaaaaaaaagaattctgatttgtagatgagtactttgctttccagtgtaagaaaagctacatttcccaggctcctttacggataggtgtggtcatatgactaagtcctcaccaagaagatccaagtagaagtgttttctggaaccccaagaaagactcctaaaaggtgaagaggaagaaccttcagcccctccccgctgctctcctctccatccttcctgctgtctagaatgcagacgcactgcctggggtaccagcatccgtctttctaaggatggcagagcagtaagatagaagaaatctggccttttctgaccgtgaagctactgtatcagtcttatatttttttgagcaaaagacacacttccatttatactacttactttaattttaactttttggatacatgtagctgagcctagtcctaactgggacacttaggaagtgttcaggtatgtaatctcttttgactttaacagctactctgtaagatatgatcatccttatttgacaagtgaggaaactgagattcagaggtattatttgatttctttaggggcatatagccacctaagtcttctgacagagttcacagctctttgctaccagatcccacttcccttagcaggcacacagcaaatgcttattaaatggaattcgcccaaactgcactgtgtttctatacctgctttgggttgggtttcatagcaagagttcagtgtcttgttggcttccctgggataaataaaatcaattctatcctctttcttcatacatatacctacatatgtatatgtgtgtttatataaaaactgacatagcagtctgaattcaacttacccattccaccaattcttcatcaaatatttatacaaatcttattgtatgtctagaactgtgccaggagtagtgaaaacaaaaataaacaaaaataaataaatcacattcccttccccactcggagcttacagttgatcttcgagggttctgacgaatttatttcccttcctaattctgaggtgatagtagattaatatgccactttatcagtttgtatgaaattagttgggcttttcaaagaaagcccataccctcagcagtggggcagttttgatggcacaccatgtgctgatattaacacgtggtggtctgatttaagttgtgattcttggtttctggatgtgtgctgtcacatttcacctactgtgtctgagcacctggttatgtgggccagaggcatgacctgaagcttcagcaactttttgagaactgaggatgagtttctaagctgggccttaagatgcttcgcagttgaaaacctaggcaagggatgtgctaagagtttgcttaggtgtgaagtctgtgttcaactttccttatggccttatctctcaacaggtacaaggaaataaaaagaaagttctagtattatgattgtttgttgaacacttttaaatatggcatgcactttacatactatcatttcattctaagaactccatgaagtatcatcatctgtattttacagatgaaaaaactgagattcagagaagttaagaaatttgcccaacgttaacacagctggtaaatggcagagctcaaatccagctctatatgactccaaagctccacactaaactggcccgccttctttggttactttagatgtgtgtatttacaatccatcctcattgaggctggaccagaagagtgagaccaccttgcttctcggcacttgctcatggcaaaagttgccagtactaactggttactacgatgaagagtgttgtcgttggaaactttagtaatagtgtttctgcatttaacatctccccagacattacatttgcttaggaaaaaaaccaacttgttaaacctgtcttagcaaactgaccacaatttgtaatattttctttaaaggaagaaaaattaaaccctgagtttccaaaatcccataaagacagtggaagggctctttccaccagggacttgcgtagttgcatgttgttgcctccgagaattgaaagtgtttaaagcattattttattctattgtgctgttatcacctcaatcagtataattctacacttttatttcctggtctagggactcagttttgatgagatttattgctttaaagaggatagcccttttttggagactatttagtttcagattagttgacaaagtaacgaacaagcttggggtgatcttgaactaaataaacgtcatgggaggcagtggtgctatcaatgaataccgcaaggactgtggagtcaggtaaacctggctcctctattcactaactgtgtgatcttatacaagtcactaaacctctctaagcctcagtttattcccctttaaagtggggataggactgttactgatagtaaccccttgtaggattgttatgaggattaaatccgatgttagagcttgggtgtagtgcctgacacagggcaaatgctgaacacctgccactcatggttcgttatcattcttatctttatgttctatcatgtaatttcgccaatgtggttaaaaccagttagttccctcggaagttgtcaaacaaggagacaggcataatatgctcagcaattggagatgccgctctcttggttcagttactcagagctgtcaaagcgacagtcggaatccccttcctggagtgttggctgtgcctcctgggtctcccgcgtggattcctcacagatggcagggcacatcccagctcggcatgtcgacatagtcaccaccatggcttttaatgagaaccattcattgtagatggacgcttttgagttttgtacagagataaacagatggcaaggtttgtataatttcctgctgggtaatctggtactagaagtatgatctatctggaaactacaaagtgttacctagtctaaggtgagtttttacaacagaagttaaggaaaggctgaatgggtctcttatggaattatgcccaaatgttttaccctcaactctcattcaggctgttaagtacagttctgtcccatctcaactaagcagtcttaacttagagcttcctgtttctttgttttgtctttttgtaattactttttctgtttgtttggctgcctctgaaaatactgtttcagggcagtcaagttttagctttcctttcaactgagggaactggcattgcatatggtgaggctcatcttctttactggaaaatgaccaagcattgaaccaatcgcttgaaaagytcttacttcagatcaatttcctgtaccaaatgatatcaccttactaggaggccttcactcttgtttttcaatgacccttatttcctctgcttatatgcttgcattctactttggttaggtgctgcctcatcagactggactcttaaactcaatcaaatttagttatttgagcccaccaggtttgggattttctaaaattagttcttaaggggacttgatatgatttaggagaagctcaaatgaaaggaattactgtaagtaaaagatttagaatggtgcttggcacataataagcactcaataaatgctagcaattgtggtggttgttattattccatcattttatgcaacttgttggatagattctgtatccaattgtgggaataagtataagaatttttcattccttctggagaaatgacatcatgagaacccagactgagaaaaaacattcctgcatacaaggtgaagggtgacatattaaagatactatcctataacataaaaaaaatacacagtttcctttactggctcctcttacttttttaaatttggaaatggattctcgctatgatgctcaggctggcctttgaactsctaggctccatcgatcctcctgcctcagtctcctgagtagctgggactacaggtgcatgccaccacccctggcctccactcatcttaggagttctcctcctctatccctaccaccatcatcaaccctgttgggttcacctctatttccagcatcgaatacagtacctggcatttagaagatgttccgttggcactgaactgctctaaagtgacctgccccagtcctaattctgccatgtactatttgtgtgactttatcactaaagtcagtgataaaatcagagtttgccctcagggccccagcttcctcaatcatagaattggagggggagcttggactctaggatctcctgagttcctcctggctctgaaacttgatgtcaccttggggcatttgggtttctgttgactggtggtgtgctggaacactttatgcataaacattcatgtgaggatgaagtatagttttacacatgttttttatcctggaaagtgaaattagtttgggaagttcttcttacaatagatacacaaattccttcttacattttgtttcctttaaggcctatggaaactggtggggttgtctgtgtgcatatgcctgtgcatacttctgcatctgtttataatttacagatagatggtaagaattttttctgtcagatccaagaatgttaaatagttgtatccgaagctagtcatccacttttaggaatatgttctagcgaaatagcctggaatgtagataacgatttatggataaagtgactataacaattttatttacagtactgacaagcagaatacaaaataaaatgctcagcaataggagaatgattatataaacttgataagaatatttatactaaagagccatatacaaagatattttgttccacctcagctatttagaacagtagatataaaaagtagaggaaataaccccaaatgataatggttattactggatagtggatcatgaaatatttttattctcttattaacacttctctttctgtttttttttacaatgagtattatttttcgtatgagaaaaattatatttaaaagttcaaacctcatctgaaatatagacaatcctggtaataaacaccaaaaatgtcaatgcaggtttcttcactgcgtgggaaataccttgacagaaaacagtgagatggatcaaactattctgcccccgagtttattgtatacacccactagtttcatgcttggcatcaggaccttctttgaaaggtcctaactatagcatctgttggactgtctggctgggctccatgtccatggcactrcggttaaaggcggaaagagaaggtcaccctgtaaacttttctgccaatgaccacagcagcacagccagcatatgtctaaatgtgcaggaatttgttcaacacagagttcaatgtttatagaagggagtgcagacccaggaaataataaaatgaatgaatttaatttcccactaagtgttttgtgatggagagcattaaataggagcttccttggaatgctattaatgcagcaaaccctcagtatcactttactccaaatcctggattctctaagcctgcaggggggtgtgggagaagaaatcctatctgaaatcatccagactactgtagttatgccagtttctgattgtgtgaccttggacagtttactcattcactcacaaaatatttactgagttgctgctttttgtgccaggtgctgggaataaaagaatgaagaagatggaagacttgctgtcataaagattaatgcccattggggttggaaggagatgcagacaagatatttcacttcgttgcaactcttgttttctttgtcttttccttgaattctttggttcttcccagtttggtctcaggccttctctcacattgtgcaatctcacttgagagtttcaggctctcctgtccttgcagatactgcttactgaggaaggattggccatctataagtckaggctggggtgccctcctgagctatggactcatagcrctggtagtcagctggatagttccccttggcagtctaacaactgtgtataagttggcttgttcaaaactgagtttkgtgtcatctccacttctcttccctgcaaactggcttctcctgtgtttcctgtccccatgaatggccccattgtccatccagtgtccragccagaaatctccgctcttccatgtgttttccacccctccatgtgtgatgaaccgtccagttctgtggattccccctcccgtgttgatctcattcatttcagtccccttctttttaatctaaccactacctctcttgaggtttccctgccacctgtctttctccctttcacattccagacagatgaatctgtctccttgtaactctgatcacatgactcctctgcacagtgcctcctgcctggctgcccactgccctttctctttaatatggcactcctgagttctccagtctaattacctgcccwctttttcctcaaatcttaagactttagtcataaatcattactttcttttatccatatcatactcattttaccttatgacctttatatcttcatgcatgctgttacctctgtttagaatgttctctcccttgcgtcttcctcccccactccttccctcatttatctgaaccaccccatttcattctttagatattgaatcagacactacttcctccaggaaatctttatcgaattcccaagtctaggttggacacctctacttcctgttgccatagaccctgtacctcctccatcatcaccattaagacactgcttggtctccttgctatcaccagaagaccatgggcttggtgagggcagaggccaccactttttgtgtttctagaatctagcccagtaatatgtaattgtaggtacttaataaatattgattaaaagataaatttttgtttctccggatgacattagtctggacataaaagtaaggttacacagtaataataataacacaccaattgttttgttctsttggtccttccttggaccaaactctggttataactcttgcttcctttaggaagctcttcaacctctctggcaaactcacattgtgtagttcatgccactgaaccctaagatcaaccgcacttaaaaaaatacattggtataaaaggaatcatacatgggctgctgtctaagattctgattagaaaggagaaaaatgcctaagtaagaataatagttaacattcactgacagcgtcttctgccaggcgccttctaactactttacatgaattattttgatcctcccaacaacgctatgagcaaagtataattatttccattgtacagatgagaaagctgagatccagagaagttaagcaaccagcttcagggcacagagcagaagtggtggaaccaatgcaggcagtctgattccatggtcaccacccttgctgcctccctctatgaactctaaaaaatctttagcyctaaccttctatgtttctctggttgtcaaaagcaaaagcgagcctggctaataaggcatttgcaattgcagggcttcctctcactcagacagtatccctggttgctggaggacccagccagtacagatgggggtcagtcccctctaagccctctgtgatcacatccttatttcctagatagatgttcatgctgttcatgagagacagtatagcacagtggctaaaaagtggactctgaattctgactacctgagagcaaaccacaaccctttcactcattaggtatatgaccttgggcaaattatttaaaccccttaggcctcactttcctcatttatacaaggaggatattaataatattacttaacccataagctattataaggattaaaggagttaatatatgtgtaacacacttagaacaaggcttggcccacaataagcactaagtgtgcttagtccactttttgattagtatttttgtaattaaaataatcttgttaatatttactcaagctggtcttagagtgctttgattaagtaccaggttagctcaactactgattgagctgtagatatctggtagatacctaccagttctttcatctcattatgggctttaatatatatatgtattactcagaaagataaaaataaatcatctgcaaaaccccacttgaaaggttttcataaatcttgtaaaagttgggccaagtttaaagattgctgcccagattggtttaaagcccttcattgtctacaatctaatggggatgcttataaagggaggatctggaatggtctgtctggcagtgtgtgtggtcaccggaatcacggccttttatctacctgatgggtatgagtaggaggagttggctcaggctccaggaaagtcagcagatgataaagcccttgtcctcggtcttgctcatgccagcagttggagagcagtatattgtgtgttatcaggttctcagaccctagcctggcattcatgggctattctccagccttgatcaaacccacctttccactgtataccgttccacacttaccctttcttttgcttagaattttctcaccctatctgagtaagacctaatcctaaagaggcccagattaaaagccatttcattcctgaagttttttcttagcactctactggctgtgttcttttcctttgcactatgcctacgtctcatgcctgttttccctttctatatttgttgtgcttataggaatttgccatctaacctgggctctcaaatacttaaagttttcacatccatccttttatttagaccttaaaacagccccatgaggaatgtagcattttcatcctcacttttccgatgaggaacccagggctcagagaggttacgtgatttgcctaaaacacaaagttttaggcaaagttaagtcagactccaactttggtgcattttttctctgccccaggctccctccttgaagtcttatgtcatgtcttgctcaagtttgtatctccctgcagtgcctagcacagctttaggctcagtaaggtttttttatttatttattcaacttacatttattgtatctatgaggtgttagttaggtcttgggtactagcattaagcaaacatagatatttgtggaagaaaagaaggaaagaagggatgtggacatttttgttttacttagtaaggtgggtggcatacgattcataagctcaaatcccaaccagggcaggtaaaaatgagttaagaaggttgggcatgacccactgaaaagtaatggggactcttgctaactggacatcaatactgtctaatggaagcgaccacaacttaattccagttaatcattgccatgttggaatatgggcctagtgttttgagattttccattttttcaagaaaagctggaagtccagacttactatacagtttctttatagtcaatgttgccaactaatttgtttttattttttaattgaacagctaaacaatacatggctcatggttaccactaacctccttgaaatgctgaggattgagccaaccatgcagccagtggtgcccacgcttctgaggcagggagccagtgctcaggaagggcaggctgctgcttctctccttctccttgttagcccccatgtgggtctcacccacctgcaggcctgtcttggctttgcagcaatactccayctctttgcccctgccctcctagcttgtctcccgttctttccctgctgtcaggggtggtgactgccctgtctccttcgcagagatcctcgacactggatctcaccctctaatttagctccttgtctttattgcgatgaatgaggttgagcagatgacaagcagagatctctgggcagaagatcaaacgctccccctgggctgcccagagcatatttatgactgctgctttgggaagttccacccacgataatgcgatgcctgcagagagtgaacttatctaccctctccatacctctacccagtcccagtgggaagatagagatttgtaaagaagacctcagaaaacagaatccgtgacaatctgtttggaattttctcttcagctttgtgatttggtgactataaattaakagaacactcatgtaaaatatgactggagatagttgtgctaagtgactcctgcttcagggactagtcatagagtccccaatattgggacacagggtggctcaaaatacaattttaggggcatcagcaacagacttgctggatgtttgttaaaaaaaacccaatccctgaacttcatcccagatctaggggtggggtctgggaatatgcatcttaacaagaatcacagcagattctgatatatgtgaagattagaaacctgtaactaatgataataatgaacacagaaccctaagtattctaagtgctatgtatttatttcttacaacatgcctatgagacactggtttttctaagtgtggagtagatatcactgtttgcaattattttgggtgctacacggagacattttttaaaaaagatttcaaagttatgtgtttaacttacatataaaactcatatgtgtaataaacccactaaacactcataagttcatcaacattattgcttaagtaaaggctaaatgtatttaaataaaaatagtgaatcaatttaaagggaaatattaaataaatactaattctggtaacaaacattgtgagggtagaatggggaaaattcaagtttgcaaagcattgagatgagtggaaaagctctgtactgagtcaaagaatttgggtttaaaccttgaattaaattcttactagctgtgtggccttgagcaaatctctatctctctgagttttagcttcattcttagcaaaatggaaatattaaaacaaattcagctaggctgtggtgaaaagcatatgagaaaaaaaataaaagaacacttaataggtggtcaagaaatattattgaatataaatattactctaatctttctgaagtattaattcaatatgaggtgtttttcattgttgttgttttgagacagagtcccctgtcacgcaggctggagtgcagtggcgcaatctcagctcaatgcaaccttcgcttcccaggttcaagcaattcttctgcctcagcctccaatatgagtttttaatgtggacattacttgaatctcctttaaaacttgttagaaatgtaaacccttttttttcttttttattgtttttagagataggatcttgcgctgttgcccaggctggagtgcagtggtatgatcgtagcccactgtaaccgcacactcctgggctcaagcaatcctcctgcctcagcctcctgagtagctagaactatataggtgcacaccatcaccaccggctaccaactcttatttctcatatctttctctgagttatgttttcactacatttactgaggtatgagggggacagtgcagaacttgggttccacctctgcctttagctatcgatgtgatctctgacaagacattttgcctcattgtgcctcagttttataatctgtaaagtgggattgcactcaaagacttacaggttttctcccaacgtctttgtattggagctttttttaaattatctataataaactgagaacagtcagagcatagattaaatatcacttttgcccagtaggcaattggccagaactgctctacagtggcccaacttacaggtttcatcttctcacgttctttggaggtgctaacgagcagtaaaaccaaatggctggcagaaggaagaggaaaaaagaggatactggagcaaggaatttggattctcttcaagctcaaaatatctcccaaacgaataaaagttgattatgtttttatagtactatagttcgatggtacgatatatcttgttaatagaatcatgctggcactggactgaagagattcatgattaagttatgtctatttctttctgccttagaaatagcaatgaaacctggattttttttatatgggagctcttcagtctttaaaaaactgaattaataactgagatggcataattagctgcctggatgagctctcagaaatcaacttttctttgggtcagctgtcttccagttaagcagttatgcggaaacctttctttttcatgcccggaagtataaaacagaaaaatcatgggatgctgaaattgctgaacacacacgaagcggtgccacagtgtccccaccctgtgccaaagcaaatttctgagcgttatgtaatttctccctggctttgagctcccgtgatcctgtctgaggtttatgctatacaatctgctaaagctgagctctttcaggcacttccttggcgggtgacatcttgtcaatattagagacctgtgattgggagaggggagagaggctcccatcatttcagtctacatccagcaccctgcattttccaaaattcatgctggggattgctaaaacagacggcatttgttggctgaagagtaaatcacgactttygtgggtacattcattcatttggaaagtatttttgatcattcactgggctaatagtgctgtggggaatttgaaaaaatgtattttatatggtttcaaaaacaaagtctatggtagagcttttgccctcaaggaatttacagtcctttagagagccaagacatgcatttttaagttaactaacagcatgcacaaaaactagatacccctgtgatacactagtggtaaagctagcaaaaggtaatgtcatggagtgtgagttctggttgggtgatcttgtctaattctcttacattcccagtgaagaaacttaaccacagaaaagtaggaaaggccgacctgaggaagcacagccaggaaaggattgcatttaggcttgaatgcaaatctcataatgctttttgcactctgctttctgctaccccacagccatctctctatatgtttaagcatgaaagtggtgatttcagaaaactgttgatgctcagagggagaaaattggccaactttaggaatcaaaattccaatattgctccaggtaatgccagagaaacataatttgacctaatrtggtccacatctttcyagtccagtgtcaacatcattcattaactagatatacactgttatgtactataaaaccataaccaactttccaccattttggagaaatttctagcataaggagaatctagatccctggtttgtcggtgtcatcttttttcttcctccttttgtcagtcacttggtcatattgctcattagcaccttcaaatggatataggaaaatgaaactacaggttgagtatcccttatccaaaaatcttgggccagaagtgttttggagttcagaattttttggattttggaatatttgcatatatatggtgagatatctaggacacaggacatgggtctaaacacaaaattcattatgtttcatatacacctatattagtccattctcacactgctaataaagacataccccagactgggtaatttataaagaaaagagatttaattgactcacagttccgcatatctggggaagcctcaggaaacttagaatcatggcagaagggaaagcaaacatgttcttcttcacataatggcagcaaggagaagaatgagagtgaagtggggggaaagccccttataaaaccatcagatctcatgggaactcactcactatcacgagaacagcatggaggtaattgccccccatgattcatttacctcccattgggtccctcccatgacacatggggaattatgggaactacagttcaagatgagatttgggtgaggacacaggcaaaccatatcaacaccttacacacatagcttgaatatttatacaatattttttagtaattttgtgcctgaaacaaaattttgactgcattttgactgtgacctatcacatgaagtcgggtgtggaatttttcacctgtggtttcatgttggcgctccaaaagttttgggttttggagcattttggattttggatttttgggttagggatgctcaacctgtagtgagttggctgtcactcagcagctctggaaaattacctgtctgcactgaatttcctcatcagtaaaatggaaatgattatagtactgaccttgtaggattattctaaaaatcagagaagttcatgcagcttagaacagtgccaggcacatggcaaatgctatggcatacttaagcatcttcctctgtggtgcctcgtcatcaccatgtgattgtgccttgcttgtycctgtttcacttttcagagggagaaaagtggccaactttaagaatcaaaattctgatgttacttcrggaaatgcatagagccagagagacacaatttgacttagtatgatccacatcatcccctcaggytgaatagtggtggcatgcacatctataccaaaatgttttaccttttttgtagaaggaaaatatttgtatcttctattccatatcttagatctttataagagcacttaagttcaacctcctaagaaactgccaattttgttgatcaygatagtctgcacagattttcgtactatttagtgttgggagtgccttagggaccatcaacaacaggcccctccttttatccatgagactactgaggccttggaggttatttgtccatccatggcgggtgcacactagaggttatctggttagtagcccaactaagattagaacycaggaattttgatttaatctcaaatgacctcttttatttctgcatccgggaaggagaagaggaaagtaaaygggaaattcatgttatctatggaaaagttatcagtttgatgtttattaaatgatttgtttcaggagattgtttacaacttttatcttcctagacaataattttctgtaagagtaaagtcatggtcattaaggtagtcatattaatgtattcagtaagctgtgtggtgtggataattttggttttgacaataattatacttttattgaacacttcctgtgtgacagatcatttatgttcttttctgctgaaaattcagtatgggctgggatcacatttattttgtagattattctgtctgcaattcccaaatatagtgggcagcacatggtaaacactttgtaaataattgtaacatgttgtagttttgttatagcgttatgctttgtaaaattaaaagtagctatatccttctatgatccagaaatttcacttctggttatataaatcaaagaaatcctcatatggttctataagagaacatgtataagcatgttcatcacagcattgttggtgatagctgggaattggagacaatctgaacacacatctgtattagtcaaggttctccagagaaacagaaccaatatatataaagagatttattaccaggaattggctcatgcacttatggagcctggaaaatctgaagtctgtggggtgcgctggcaggttggagaccaggaaagggccgatgctgtagtttcaagtccaaaggctgtcaggccgaagacctgggaaagagtgaatgttgtagttcaagtctgaaggccatctgctggagtaattccctcttgcgctggggaggtcagccttttgttctattcaggcctttaactgattagatgaggaccacccacattatggagggcaatctttattcagaacctacccatttacattttaatctcatcctaaagcactctcatagaaatgtcaagaataatgtttgaccacatatctgggcccagccaagttgatgcataaaactaaccattgcaccatccctgtgaaattatataggtaaaatttaatggctgctgactcgggggtactgtatcaaataaacttccaaagaagaaagagatggtatgctcagaagagttcaactgaaaagaatttaatgaaggtgctgcttacgatggtaaacaaagttaaggaatcagcagagacaggcacccagggactaggaactaggcttgaagggtaaggggagagaatgatgcaattggaatccagtgagactggagccatagaagagggccatcctgccagaagctgtggccataaaggaatagacctactgccaaatgctcaataaggcagagagggagggataggtgaggggccagggtggtagcctgaaacccgacctctttcttctggccttcagtcttctttgggtgtccctcattggtcaaacacaaccagaagccagtgggcatggggctctgggtgatgtgtctgtagagatcagccttaggggcacagagctgggcaaggaatgactcagtggcctggaaagggcacatgatgaaaggccatcataaatagtatacagcagttagaaatgatggagtagatatgctcaaaaccacatggatgaatctgaaaacgtagtgcttggtgaaaaaggtaacaaatagaaagatctaaaacacaattctagttatgaaaataaaatacatatgcacaaaacaacaatgcacatctgccagactatttgggaacaaaagcatacacatcaaacactgtggaatagctgcatgtggtataggaaagtaatgtggattaaagggaataaatgagaaggagagagaggtctttcatggaccaatgatgataatgtgctatgaacagaggagagtgattaagtcaactccgtgcactaaggatccaactttatgagaaaaaaatatatttataaaaaatatataacatatatatatrtatatttggtattgatttttctgttatatggatgaggtaccttatccatctaactcatgctgccagattggaggaatttgaggcctgaggggttcaaggaactagcccagggttatgaaggtagtgggtgatctcytgaggaaatgagacgccatggatattcttgatgtagattcttctcttcagtgacattgtcatgaccccacctcattgagatatttgatccacacaatacagtgatttaaggcctgtgtgaatgtaaattactgctgttcatttttgtgctcctgcctgggaccagggaagaaattctccaaacatcctgctttccgagtttgaggacttactttaraaaagtactaccattggctttatacctatcattagctaaaccttctgtaaatggcatcattttgggagcaaggtaattgtcaggtcaggcctggatagacatatacctcctctgttatctgcaaggttgctttcaatctccttcttttccatctgtctacaggcatctcaatggtttatgttaaccttagaaaatagggcttgggtttagccacaggggatggaagatggccttagccacatggctgtggaagggaaggaggtagggatggccctagtcacactgggcctgtgtaaaagggccaaggagcacttgcccctccaagggcacttgtctctggggctgtacttgccacaaacctaatcctctccattacatagctctgcaggctaagttttcaggagacagcacagacggaaaagctccataaagctgttctgatcctcttagcactttgtgcaaggagcacagataagacttttgattctgggaattactggaagaaaaaatatacctttgtctgaatcactcatgctgccagattggagaaacctgaatcagtttgatgttgttcrtaacaacaacggtagtaatagtaataatgaaatctgtccccaccatttgtttacctactctgtaggaggtacagtgcttgaaggttggcatccgtgatctcattccattttcacacaaccttgcattttgctggcagagagaccaaagtcaaacaggttaagcaacttagccaagaatagagccagaaaatgacccagtcyaacagcctcctcagctcctgccctgtcctcacagtggttccatcccaaatgcagtagccaagtctgtcctgagacagggtggcattggggtggaagcccaggaaggctgaagcttcccaggtggggctaagtggaatgtccccaaggcccagattggtgcccattttaagggcagggtttccttgatgaggttgttctctcttcttgcctggagagaaagcctatgttatcttatgaaatatcccctcaggtaagaagggagtgcattytattatatatcaggacatggatcctgccagactgcagtgagtcaaggctgcttcatgatgtcttgagagctggtgtcctgggatcctttggctgggctggaaggttcagctggtccacatgggtaggaggatgtgttgggaaggcaggagaagaaggatggcctggcctagcggtttaagtttgctcctagagagcagaagtccyggcatagaaaaggggattcctgggctgtcacagwgagtccatattagtttctcttactctgatactcttcaaagtccatccaactggagtcacatactcccttcttctttttgcaagcagtgctcaaaagtgaatcaagcccactcagcccaatttgttgttaatgcttgttgctctcgcttgcctccctttttgttttctctttttaaggctgttttgtcctagtaacaaataatataaaaaataaaaataaaataaataataaaatactactactaataattggcaacaagcaccattctagttgctttatgtagatgatctcatttgatcctctgcagaaccttacaaattattatccccaattggcagatgaagaaactgaagcttggaaaggttaagaaacgagttcaaggtcgcccagctagaacattgaggagcagagaacagaatgctattttgtgttccttcaaagcctggcttactctctacttgaccacattgcctataaaatggggatggtaataacagttgccctgcttgctttgcaagcctgcggtgaggatcaaataagacagtaattgggaaagcactttgaaaattgcaaagcgctatgtaaatatatggtattattctaatgtatcacgggcctacaaaaacactgctcaaacatttcatttaagagaagacacaccaaaccattattcaataagataacaccatatgtgatcctttcatcattccaagaatgtttatcaagtccacaaaaccaaagccattagtaaggttttgttttctgggtaggctcagcaaacttggagcaagctcaagtggtctttaaatagtcaagttaaattgaagagaccgcattaagtgtcaaataattaaatgcccttacagactctgggagtttaagatatatgctttcaatacattagaatattcctaagagtagctttcaaggagttgaatgggaatccctttggtactaaagggagcggtaataataataacagaaaataatagcagtaattttaaccagtggagtagtgtgaagaacactggctatccaaccagactcctggtctactagatatataacctggaaaataatttaatctgtctgtgctttagttttcttgttggtaaaatgggagtagtaatagcaccgaccttgtaaaggctgttgtgatgattaaatgagcaattggaactgcacctgccatatatagtatgtactctgtaaatgttacctcatgctattattatgctttcttaagcacacaaaatattygcaaacaacataagaataaaatggtaaagaaactgacttcagctgtaataactaaggtcctccaatgtgccaggtatgatgctccatactttatatacattatctctttaatcatcataacaactctcagggagagattttctcactctccccctccgcattttacagatatggaaacggaagtccggaagactcagtgtgatcatctgaattgctctttaagacttttttattctttactactttcccaagttgccaaagcctggcagctagcagcaagtcctctgccctggatctgattggtcttgagaatggggaggactgtctagtgtttcagctgtgcctatgctgctgagagatgggcaataggggaagygggacccctctagaagtgatggctgagaaacttcaggctggactttccacaccttttcagggttctggagtgagtcagtgttactcagcccacttagggctattcttgaagctgctttgaaccagattttaaggttttagaaacattcggtaaggcaggagtgtggctggtaccctgcaatccctccagaatggtctggtttctaactgggttgatttaggatgacatcacatcagttcacagcattaaaactgcctttagcgcctcattgtccaaaaggacaatgtcctcattctttaatattgcggttgagtggagtaagttttgacttcagaacctaacaggcacagatctgaatcttggctctgtcatcaatgagctgaatgattttgagataaggtaaatttctcagagccacagtttccttatctactaaataatgcttccttgccagatcaaataagatgcaaagggacgcaaagtaccccacacctggtgtggcttacagtgagtacttactaaatgttacttcccttcctttctcttagcaaggcacacataaccctttctaaacacacctcgacctgtttattaacatactgtactttttttctatgtgcctgatagttcatgaagaccaagttgaaacatgcctttcctagttttgccacagaaatgagataatctatgtggaattacctagcttattgcctgggacaaaatgggctctaaataaggaagaatgagaaggtggctgaatggtaggagctaggaatgttggtaatattttctcctgaagcgkacccagacttctctgggaaacttgaatttaagaaagcttataagggagactgtgcagtggaaggggtctggtcaaggagaaacagagcactggtgcctgtatactgccctcccccaataaaatatttgtctcctctaccccacaagccagaccacagccattcacatttaaagcttgtggtttgtccatccttgggagggtgccacgtggaataggattatattaagtgcatagtgatggctttgtggctcaggcagggaaatgtccctggctaattgcacattagatactagtcctgtaaatgttattaggctgtgcaagctagctgctactattaactttatgttgaccttctttgtaccaaacacaagctctcaaaagagttctttgcagagtgccatttaagggctcgtgcagcctttagaagttgatttggggatgcctgggaatgcagtctcctggaattgcatttaggatcctgactcaatatgtattttcattctggtgtttcttttggtcctattccatgmgttggatagctgaacatggacagatatacaatatgaagtctctttggtttccatagtaacacattatttatctggcattgtcagctcattaactgttccacccaagtgaattttccaactaatcgaagcatttctcattaaatgccaaacagtttgttgtttaatggaaatctttcctaatggattacccacgcacctctgtcttccgaaggagggctgtcttttcacaatactgcttggacttcattgtgagtttttggatggtgctgtcatatatattactacatacccagggtgtgttgaactctggactaattgctctaagctgttaaattttttgagtccctgggtctccgcactttctcctgagtagttcccagtttatctgcctccatctcctttcctgatctcaatttgttgtgtctagtcaactccagactaggaaatctgataacgaagcttgtgaaaagtacgtataaacagcttctgagtgaaaacctcttgagcttttctaaggagtaagagcttcaatgcaacaaactgggctgattctccacaacagaaagcattctgcctcagacattgttttgtcagatatttgtttacctatcctgccaaatttgagtttcaggaacctaatccaaatgttaattcgaatttccaaatcaccaccgattgcccatccctaatcaaaaaattytaaatgctccaaaacctaaaacatttgagcaccaacatgatgccacaggtggaaaattccacacctgacctcatgtgatgggttggagtcaaaactttgtttcatacacaaaattattaaaaatataggggccaggcatggtggttcacacatgtatgtaatcccagcactttgggaggctgaggmaggagaatcacttgagtccaggagtttgagaccactctgggcaacacagaaagaccctgtctctttaaaaaataataatwattattattttatatatatataaagtaagattacctttatactatgtgtataatgtgtgtataaaaaataaattttgtgtttagatttaggtcccatccctaagatatctcattgtttgtatgcaaatattctaaaatctgaaaaaatccaaaatctaaaacacttctaattgcaagatttttggataagggatactcaacctggactatccaagtgctggctttaagtgggatgttacaaggccttcagaaaggtctgttcaatcatttcttgttcactgccaggcactgagcaaagcactggccacctagatagacatagtccttgcttttgggatactgaaagtctagatggaaaaaaacttagaaatatgcagataaacttgaaaaatggtatagaggggtgcatgactaggttctgcatagcacagagaagggaatgatgtctgcttagaagaatcaaagaccataagcaagaggagataatttgccctccctctrcctcccttttaaaaattcatttatgtctttctgtatttctcttgttcctatagtcaataaacacttattcaatacaaactatattcctttcactgarattgcagtagcatataaagcagatataattcctgttctcattttgacataaaggatgaatagaaagaaagggaagaggaatgaaaatgggcatcccaagaaagagaatcacggatcgaaagggcaggtgtgtttggaatggtgagctgtcatttagcatggctggaattatgggaaaggaggttgtaaagcatgctctgctgaggacttcaaactttattatatgtgcaggagatgcccagcaaaggttctaacccaggagttcttagaaaagtgtcaccaggctgggcgtggtggctcacgcctgtaatcccaacactttgggaggtggaggtgagaggatcccttgagcccaggarttcaagatcagtctagtcaacatggtggagactctctctacacagaaaatttttttttaattagccagacttggtggtgtgtacctgtggtcccaattactctgaaggctaaggcaggaggatcacttgagcccaggaggtcatggcggcaacaagccatatttgactcactccagcctgggtgacagagtgagaccctgtctcaaaaaaaaaaaagaaaaaaggaaagaaaagaagtgtgaccatatgatgggggattgtggcatgggaggtgggcagcagcagagaaccaaacccacaacatctaataaatgacatgtaattttcaacttcaactttaggtcttaaattttgggttttttgcctcaattacccagaatccatcaatagcttttctgttgtttctgcctctgctcttttcccttgaatgctgtcacacagatccaagcaattagagcctacagaaacaagtagaggctgcctgaccccaggaatgggctaatagatgactcagccatagttttgctgcagaattatgtcagtggaatttattaatgcctgaattatattccatgttgtactggttcttaacccacatcatgaggattaaatgagataatgcatgtgaaatcttcatgcctgacccataagcactaaataaacagcaattgtctttaacccgtgcttattccactctgtcacactgcctgccaacttaacgcacttggtcttttttcaaggtatatgkgctgtcagcttatcttcactgtactgttagctcctcaattgtgggatctgggaatgttaatctttgtatcatagtgacttttaagttagattatttaaacatgtcattctaatcataatgcagagacacatgcatgctttcagagagcagcagaaattcagttttaatttatcattgcattgaagctggaagaaaacctgagggtattgttctcagaagttttaacgagaacaacattctctttgcattatcaatgttcctcagtcgccacttggctggagcaactacctctggcttcagttagctatttacattcctctatttttatataaattgtgctatattagcatatatttcacactgtgacctagtgtttcccagatcctytaagccaggctatttgtacattagtcaacgtcaatggaagtaaaatagcaaattgagtacagactgtagccctgctgcattgcccactctgtcatgctgaaatggattccttattctaagaagatttgctgtgaaatacagtctatttacattaagaagacctctgtatatttaaggcataattgtttcagggccttcattaattcttgaactgcaagacctarattttcttttcttgtatcttttctataacaatggaagtcaggagtttccaaaaaaaataacaaattgttcctcattaaaatggaactgaaaatggttttctggaaatgtgctttacaaacaatgagagaatctgattgtaaatcaactccaggacccagctgtcycagggtccaggctgggaagctccaggataaaaggtagtctgtatttttatggaaaaataaaacaattttttacttccgtaattgatgaagtgcttatcttgtcatacaattttaaagtcggaagagatctcagaattcatttaatccagccccttcttggaaaataacttcttccttggtatctctgacatatggacatctagtctcttctagaatacttttagccatgggcaactcactcctttttcagaaaaaattgtggttaaacatatgtaacataaaattactttttaaycattttaggtgtgcagttcagctgcgttaagtacatttcacattgttgtgtaatcattaccaccatccaatgccagaaatttttcatctcctccaactagaactctgacccattaaacactaactytcgattccaccccaccctgcctctgcctcctggcaaccatcattctactttctgtccctatgattttgactastctatgtgccacatttaagtggaatcatatagtatttgtcctttgtgactggcctatttcagttatcataattgtcaagattcatccatgttagagcatgtgctagaattttcttcctttttaaggctgaataatattacattgtatgcacatgcacattttgtttatccattcatctgtcaatatacatttgggttgcttctaccttttggttgttataaatgctgccatgagtatgggtgtgcatatttgagtccctactttcaattcttttgtgtatatattcccaaaagcaattccagaagtggaattcctagattacatggaaattttatttttaattttttgtggaactgccatattgttttccacagtggctgtaccattttacattcctacgagcagtgcataagcattccagtttctccacatttttgccaacacttgtcattttctgtttttktttttttttttttttaaactctttagcgttgtaatggcatggactttggctttgaaacctggctcagccacatactaggtgtgggaatttgaacaaattatttattctctctgagcctgaggggtttttttggaaaatgtgggtaatggataatattaattttataaaattatgaggatgaaatgagaaaattcatgtaaaaatacttagttcaccatctgaaaataggaggctatcagtgaatatttgctctcgtttttttcgtggtcattgattagtccattaaatttagggctactctgatgttagactgacttcttcattttgaattaaaacctactttggtgtaactcctgtagcttgtgtaacagttgcctttaattcatcattcctgactctgctctttacaatgtcacatgataaataatatccccctcccacatgtcacctgtctgatatttgaaggcagctatcaagtattcactagtcttctcttgctttggtcgaacactctggtttccttcaactgtttcttaaatgatgtggtttctagatctctcatcatgtatatcagtcaattctggactacagtctagtagaataggataattggaaatcacaccatctctccccttattttggctttcctgccaaactrtgatgtccacatgaaagaacagatgcatggatatgcgtctctcaatcagttcaacacattgagcccttggccatggcttccatctcttactcaacctctccccttcctcattgctcagagtgcttgatgtctaaagcacttgctttcattgagtttaggatcaattataatttcaaattttctccattttgttttttctctcctgtcagctccttaagagagaccaaggactacctgttcccgtgtaccttcctcatggtcccactagcacccagcaggcatgaaggctgtacttttgaaataaaattcagtttcgctctgagacatggagctgtgtcttctgacacaatcacaaaaaccacagagggcattggctagagtttgagccttttctgttgctgaagggaatacctaaagacttgcccaggaagagaaggctagagtgggagagtatwttggctggaactccaaggagcactttgaacgtgggtcttcagacatgaaagtgtagggagggcttcactccaccccaccctgtcctgtaattcctggactcttcaatgccaagcgaaattatcagtttctaaatttgcccttaggagggtgaatagagtgccttagaaataccagtgctgtttctgaaagttcccaagcagttgaaagaattctggatgtttctgatttacatgcctaactcatctaaatgtcttttctttatgagctcgttgacatccaagaagacttttcagttttattatgaacctttttacctttaaaaacaaaaatcccaaacctctattcctgagaagggaagttgtaattttgtcaaagataaaatatttgaatggtgctctgtcccagctcctccactgtgtgtttgaaaacctagttcctcatgtattatcctcccaaacacatgttatgtgtttacattaaaaaaaggtaaaagccagattctcttcctttctttaaaaatagaacaaaaacaaaacaaaaagtgaaggagagggaggagtaactcatttcttggcattttaatagagtacccagaatcctcctaatataaggcactattatagttgaaaggcatattaaaactatgtataaatgaaaaactctgtcttttaaaaattgtttatttattagactggagtgcaatggtgcaataacagctcactataaccttgaactcctgggttcaagtgatcctcctgcctcaggctcctgaatagcttggaccacaggtgcatgacaccatgccagggttttttgtttgtttgttttttgttttgttttgcttttttgtagagtcagggtctcactatgctatctaagctggtcttgaactcctggccccaaaagatcctyctgacttggcctcccaaagtgctagaattatagactgagccaccgtgcccagcctaaaagccctatctttagtaaaggactggtagatttacttatgatggacatacatgagctttatggcatgagttttgtgacttctacattaaccactcagaacactgacaagctgtaaaaatattatagatcacagccatttttcagatatktgcagttgccagattgctgatatgcagatcttattttgcaaagtcaaggcaaagtggtcccttcttagtttgcctgtttgccatatatgcatttggaatgatgccacactgcctggtgagaccccaacaaaggcattacttggtggcgtagaaaaataaccaatttccaaggaaagacagaaagaggcaggtcttcttcacccatatgggcctgttgtcttccaggtctaatttgggctatgtttggtttatctgtgtggtagacttcacttttcttacattaattatttgtgatctgccacctggggaagttggaaaacatcagaagttaatgctgttgggtttctttaaggagaagaaagaaaggcctagaggtgtctttgcaacaaagaaggtagctattaacctttaagggtgttgtagaagccagtataacatcactaatgtggttgtcatgaaatgcaatgacccttctctcttctgtcacctgtctcgcttgactaactctaccactcacatttcatgattcagtgtggagaacataatgtgacraataggaaaggagaatgtaaacacytgtagtaatgtctgtctagtgtgaccaaaatccctgaccttatattttaacattgtaacttttgggaagaatttcttttgatacatgtttttattttatgaacttaaaaaaacccgacaacccttgtatatgtcagagtctgttagtactgtgtgatacattaaatagcagagaatggaacaaatatctgtggaataggttaattattattattattattatatttatttatttatttattttttgagatggagtcttgctctgtcgccaggctggtggagtgcagtggtgcaatctcggctcactgcaacttccgactccctggttcaagcgattctcctgcctcagcctcccgagtagctgggattacaggcacacaccaccacgcccagttaatttttgtatttttggtagggatgaggtttcaccatgttggccaggatggtcttgaactcctgacctcatgatccacccgccttggcctctcaaagtgctgggattacaggcgtgagccaccgtgtcaggccaggttaattatttaatgcagacttctgctcagggtatttgtgcttaaagagatggactgtatagacacatcctagtaaaaggcttgagttactggtagtttaaacagaagccactggtgaacaggggaaagaactattggttcaagtttaatttggcatctttttagcagtgacatttggcacatcaccctctaatccttggttttgtcaccaccaaaatgaagataataacacatcagcaaatgtttgtgaaaatgtataaatgtgctttgcaaactctcatggatagatagcatgttattagtatgattgytctgctaatgagtgtagactttgctgaagttctcctcctcctcttcttcctgcctcttcttcctgctcattactgtcacaactaccccttatgaatttgtgagccattagggtagattctgcatctcttaacccatgtctttttctgcctgccagtcagagtcagcaaatattagatacctaataagtgtccaacacgaaggatttaaagatcagtactcaaaatatacaaatatggacatgcagcgatacctaagkgactgtttacagttccccaaattagtatggctccctggggcagaaaaatcttttgtctacatttctaatgtctactcatccttaaaactcaactcaaaagtcagtatcccttgscaacctgagatgttcatttctgttgccctcctactcgctcttatgaggtgctctttctatggagtcccgtaaaactccgggcatacctcagaagaaacacttgtcatttgacagaggaatctttgagaattgaactctttttaataaaaattctcccattttgcacatggtatagaattttaagagtgcaaaaagatgtacagtaaaacatcctgcttgcccctgacttgaaaccaccagttccccttctctggtgtagacactgttcccaattttggggcatctcttttatagatattttataaagatgtatatttatacatgtaagagtatgcatacataatgcatattatacattccatatgtatctgtgtataagaacacacaagcacatttttgtttttgcataaattatattgttgtatacacactatgagtactttgcttttatttttaaacctaatgatttattttggtgattgttccaaatacagtgcatacagtttccttgtttttttataacagctgcattgtatttcattgtgaattttggatagccataatttatttaggtagtctgctattgctggacaagtaggttgtttccaatcattttatattatagacaatactgccatgaaaatgttgtaacaatatyatttcatgtatgtttgagggcatctgtcagattaaattcctagaagtggaattgatgtacacacagttattaacattttaaactttcatagatattgtcaagttgtaccaatttatgctgcttttgatataagggttcctgattgttcatatccctttcagtatagtgagttatcaaactcttcatatttccaatctgattggggagaaataacatctcattgaagttttatataacattttttatattatcagtcaggttatcatgtttgatatgtttaaagaccacttacatttccttatctgtaaattgtgcactcatatcctttgtccacttatctatttcctccttggattttttttctttctgattggtaggaaattttgcttactatattgtagccctttgccttttgagctgcaataattttgtctccctagtttgacatatgtcttttgatattaataacccatttatgcctaagtagcaattttttgaatttttgcaatcagacctcggcggggaccttgagcagtaggatatcaataactctcacgtgcttagccttccaataatggaacactagtcataaatggttaatacggtcaaatttattacctttttaaaggcttatagatttttgtgtcaaactttgaaaaggtcttcacactacaaggaccttgaagcagcaggtcagaaaaaatgcagacaatggagaaggcttgtggggaaaggcctgaagaagagggtcctcctagtggaatagctcacagtgtgggacggtgacatgaacttaagggagaggtagtaaagtgaaactcattgcattgcttctctctcccaagtgcttccaccagccacagcaaattcccccaaatacctccgtcatccctgactgaaaatggatgaccacattccatatgggaaaagtatacaccacctctgagcatcctcttatcagccagagatcaagttgcccatctcagaaggagatacacaggatcagacaggctgcctcatccatcaagtgcacagtagctttggtcgttcctgttcattgcagttgactggaaaggcctcctgaaatgctgatagctgtgggaggagggagagccctccctttccacatatgggcagatctttggcaaatccaaagrtggtcttgcatttttgtgaaagttcctatgcaggcagcgacaaacagctaggttgtttataaaagctgcaggtggaatgccatttcattttggatgtagatattgacacccggcaaccaagtcaaactgtttccatcagatgtaaaagccagaacagtcttggcaggttgatggctaatgaaaaggagttgcaaaattaattacatggaaaattatttttttttctaataagataatgaaaaaatacatacyggattagggaatgacaaactcaccaagcttaaatagcagttgttattagctgaactctgtacttttggatgtgagaatatcattcttcccrgatcattgtttgaaagagacctcctgtacttttgcctctctcaaatttgattaaatgagctgccaacacaagaccctgtcagactaagatgactctaataggcagttctccgtagcgcttcacaacaatgaaagtaagttcctccctccatttgtcttttgccttcagtttctcaaacttatttctgaatgcacaaggatttttgaaatctggtcagcttatttagtggaatgattatgggctttgcaatcagaaagactggatttcaaatcttggctttgtcaatctatggctttagattagttcttaacctcattgagccttagagttcycatctgtaaatggacatgtattacccacaaataattctatataacaaattaccccaaaatatagtgtcttaaaacaatgagcatttatttagctgaagaataaatgagctattatttattattatagctattatcaaaaaagattggttaggcggttctctgatctggactgagccaaggtgatctcggcacatgctattagccaaagcaagtctagattcaatggtacagaaatacactccayctcttcattggaggagatacaaaaagatgtggatacagggaggaataaattgtgggcattttatagtctactacactaccttataggaataaatgtgataatatagggagcatgcagctatcatatcacctatgcattcagaaaacgtctattgactacctactatgagtttggtgcaacattgatactgtgagatactgtgagtaacgtagaagaaagtaaaatctcatccccagcctcaagaagcatacaatcttattaaaaagatgtacccccaaagaaactgtagatcaccttacaaagtgcaaagtctcttaagagtggaacagataaaatactgtggggtttcagaagagggagaaattaaactaaaaggctctgggaagagattctcgtcccaacttatgctctgctaatgttttcctcgatttaactttgattattgatctccccaggctatcagtaatgacatggtgcaggaaacccagtccagacaggcgaaacattttaaactggtgcaatttcaggtgaattaagtatttgaacattgccagccatccagattctacacgcccaggctaatatggctggagcaaaaccatcttactgtcttgcaggatgatagtaatcctcttaaatttatctctctgattaagataatttccactaatccaggagtccctcaatcccatgaacttaaacacttgatttccagggacagccagaaggtataaatcacacttttaatatatttttctgaaaatagttctttttttcccccctttcacgcctcacagtttggagctttgaaataattgaattaacagtgcgctagagggggttagacaaaaacaaaaactgggaaagggactttaccagcagtgcagtagagagcctgagtggagccaggattgggtgaggagagatcatggctatgttctggcagttggtgacatgtcaggggaccttaggcaagttctctgcccragtctgggtttcttcaagtccaaccagggtatgattatctcaggccttgatcctttgcatgtggagtcatgagctaatgtctgttctgtgtacggactttcttgaaaggaaaagtgctacctaaatacaaggtacttgtattactgtaaggtcttggaatcttaatagctttctcaactgcagccaaagtgggcttctctttgtaaatgctttaagtggctgagaatcaaggctgaaaaggggtttgtttytctccccatctatgcctagagtaggatggctgcacgtttttagggcttgcccaatttgcccatttataatggagggctccacagacatcacagccattgaaatcctatgtaaaatagagaaaggctaagacaatactacacactgctttttgcargaaaataattttctatgtaaaagtatagttgtctaattcagtggtcaaccaattaagagaaccttcaagttagacctaaatatttggctttgaaagacgttcaagaggtaccagttttgttgttggttaatattcattgagctgtctcaatgttgaggttgctgcccacactgaaattttatgacaaaagcaaaagtaacattttaattggctaactccctttcccctagactcttaaattacattaaagttctcagttcatttaaagctttttgtgtttttcagttatttttacagacatattatctgggtttccttaccctggtggtttgtagaggatcggtgctaggctgcaggttatgtaagactcacctagggagattcaatagtttagagacaggggtcraaaaatcattattttttttaacatgctccccagctgagtttgggaatcattacattaaacactcttcaggctgtatctatgkttagtttctgtatctatgattagtgttttttttttttaaagtctttacccaattgtgagaactgctacttcgctaaaagtttaccatctgctggacattgaagtcatctccaaatattatcccagttaagcctcataacagtcctgcaaggtcattactattatgcccattttatgaatgaggaactgagtcttagaggtatgaagtaattttaagctggtgtgtaacagagctgggatttgtgtttgaacaacacaaagctgacacctttcatccttgtgctgaactgcctcccatctaacctattccaggatcatttagtagtcaggcaggacacaaagaaagcatgagacatgaccctccctctcaagaagtttactgtctgagaagaatgaaaggaagaacacatactcactggtggccaaaggaacataaaattaagtggaaaattgtaaagtagaaaattagggtaatttaaggttttttttttttgtcttttcaatagtaaactgagtatcattgaattagggggtttattttctttcctattaaattacatggttgttttgctgtgatttgaacatagtgtgaatcagaagcatccttctgtttgaggtcccaacatgaaaaatatttttattgatatcagtgttataatctttcaaggagatgcaatttgtgcatcaacatattctgttttacatattctattttgccattggtctctaaacacacaggttggagcagaaataatgtaacctgtacctagtaccatgttgaatggacaattattttatctttttcaggggctaagtgtaaactagaaagacaaaaggaactgaaagtttagaacgtcttagacaagtacattaggctaaccctccattcccagcagrtatttatgttgctagggaaataaaagccagaaagactcagttctgattgaagaatcaatttaggaggttgatatggtttrgctctgtgtccccacccaaatctcatcttgaattgtactctcataatttccatgtgttgagggacccagtgggagataattgaatcgtggggacggtttcccctgtactgttcttgtggtagtgactaagtctcacaagagctgatggttttataagggatttccacttttgcttctctctcatcctctcttgccaacgccatactgtaagaagtacctttcgccttcctccatgattgygaggcctctccagccacgtggaattgtgagtccattaaacctgtttttcttcccagtctcgggtatgtctttatcagcagcatgaaaacagactaatacagaaatacagacgtatacatggccaaggccaaatcactaaaactgagggaggcattctctgtttccaatagaaggctcctttgmgtatccaagtttgcaggcaaagacagatacgtgattatgacaggtgaagatgtacccactgtagaccatcttttctatgaagatcggagtctttcttggggaggtgctatcctcaccaggtctcagctcactgtttagttgtggtggaaaattctgttttaktcaaaggaagaaattagattatccaggattccatgtctatctaaatatctggtttgccataagccacataagcctcatcaccaaaatctttggtcaggacaagatcctccagaactgtgctaagccctttgtccttcccaggcccctattgcagcatttatcatattatactttaattttttgtttgcttctctgtgttcctaccagaaaatgagctccatgaagtaaagaactgtctcaattttgttcaccattatatcctagcacctggctagcacttagctagtctggaacagaataggtgctcaataaatatttgttagatggatggatggatggataaatcaatgaacaaacaaatgaatttaatatcattaaactccaaatgaacataaggagttgtgtagctccttgtggcaatatagttttctaaactgtctgctaatatactatggctttaggaaacacccagtataacttcattcccattgtgtataggacttaaccaagacttcacttgtttttaaagagtcaagaacaaactctcagtctgtcatggaattgcagctgtgaaagcatcttmcttgtgtctcttgtttcttttgagtggcatgtgactttgaattggccagagacaattagtaggtaatagatttttattataaaatggattataaaatatgaaatgaaaatgtacgtgggccatacaaaggggaaaatgaaatggcaaactccataagacaaagacagatgacacagaaagatgagtaagaagaaaaaattgcctggaggcactttttgggggaagcatgtttaaggaagggcagtcaagtggaaataggaaaaaaagagtaaagtttgttgatgtcattggaaacccgagatgtccacagctactgaaaggaaatgaaatggaacctctgtagggagctgagaccagtttctgagcgaagcattctgcagcatgcctcctcccttttatactctgtctttgccagcttcttctgaggccagaaataaacaaattattttattgtattaagcatccattgagtctccagtggcaccatggatgaatgagggagtgttaactttgggtccactcatttgaacttctccttggggaaaagcaagatatgaaccattttgaaatttattttaggactttccactgtccctaaggagatcctgcctccttagtaactagttgggatgtttctttcttgtctttaacaaacaaaacaaataacgacaaaaagaactagaaggccctggattggaaaamgttgctatggctgtagtggagtgagaccattactgagttatttgcacttcctccaatgtgccatggtctttctaatacataggtctcctcttaacccagaacaatctttcaaaggaccaccttcctgccctttgggattcctcctccccaaacgggaatatgtattcttcctcagtgatgtcttagaaccctgtgcctacctctgttgtacctctgatcacatatttacctcttatcacatatttacttttagagccatggcttattttaaaatattaaacacatttcccaatgtatttgcttattattgcttcttacatacaactcttccttctaaatgcagtttcctttttacaggaatgaataatttagcacagaagtctatgcatgggttcatgacagctttatttgtaacagccagaaaatggaaaccaccaaatgtttgcagcgaatggttaaacaaaatgtggcatgtccataccatggaatactctacacagcaataaaaacaaacaaacgattgatacatgcaacaaagtagatgaatctcaagggcattatgctgagtaaaagaagccagtttttaaaaggtcacatactaaatgagtctgtttatacaacattcctgaaacaacaaaattatagcaatggagaacagattagtggttgccagtggtcaggaatggttgggaggagggagatgggtaggactgcaaaggggttgcacacaggaaatctttgtggtgacaaaattgttttatcttgactgtggtagtggttactcgaatctacgcttgcaatgaaatggcagaactatatatacatattttaacaatgtcaaattcctggctttgacattataccataattctgtgagctgttaactattgggagaaactgggtgaagggtgcagaatctctctggtctttacacagcttttgatgtcttatggagacgtttccctcaaccccacccaagtcctgaatggrctttcaagagtcctagcagcttctctggactgttaggagaagtatttccagcaccttcccacaggtagggcggctctcccaggctctagtaaagactttaggcagggagctcagatttcgctctggcctagggctacatcttggattattaaatgaacattaaaactgcaggccccagtccacagggcccatattcataggcaccttcagcatcggcgtccactttstgttatcctttttggcaccaagaatttccttttctttccatctcagctatgcatcatatatttccttgtgacattttattcagtactcttcaagtttttagtctcgttgtggtgggggtggtggctaggggacagggaggctgtttttgtcaggtcttattgttaaccccatcacgctgtttataattgcctgtttgtggtcatgtactcctctcccacmagactgtaaggttttagaaggtgttagggaccagttcaaccttttttttttttttttttgagacggagtctcgctctgtcaccaggctggagtgcagtggcacagtcttggctcgctgcaacctctgactccctggttcaagcgattctcctgcctcagcctcccgagtagctgggattacaggcatgcaccaccacgcccagctaatttttgtattttcagtagagacggggtttcaccatgttggccaggatgatctcgatctcctgaccttgtgatcctagcctcctaaagtgctgggattacaggcgtgagccattgcgcccggcctggttcgagctttttcatccgagttcttacacatagaaagtgctaatacatatgcatatataatgaatgaataagtcaatctctatagtwccrtggaagagagcccaagtatgatagttttaaagtaatatagttttcaagaatacagtctatttttattcactttaaagatgtgtgtcattgtggtgctttttgtagcatagtttctttaaatacaagaactgcatgtggtctataggttgaatttaatagattttaaaaaaggaacagcatctccaaagaggaaaaaaaaaggcatttaagtgtgattcaagaagtatttcctctcctcaccttgtgctgtgccatcctttggggattttagaattggtgaaacaaacattgatcgttgaggagcttggcctctggtattggttctccagctatgtactgcagagcttagagttccayrggggacctctggggctgaagggggtttaagccagggagcaagtggttatgtctctcagctccttcccccatcccccatgtggcacagttgaagatgctctggctttgccctcagtcttcctggatttgatgatgatccccctccctaccctgacaagctgattgggcagctgccttcattctgcctcaggttcatcaatcataaaatgaagataataaaggtacctaccttatagactgttgacggttgagaagatctctgagcacaagcagagtcttttggactttgacaaaacctaggcaccttttccttccttttttttctttttcttttttttcctgcagatctcaccatataacaatacaaataatagcacaaattttgatatattatgaatttttcttcaacaaagtaatggattcatcacatatataagaattatgctgattacaatgtaattacatggttaaaaagtgatttygtactgcaatataggtagtrtgactgggtaattgagcaggggtttaaagttgcaggattgtgccatcttctttctttgtgactatattgataacttcatttagagattgcatcagaaatccaaatttgaggtcactgaggactagaagatccttgtagacattgagcatagtactttccagtcctgactatcccatataggatgaagaaaactccaaattttctctctcctcagtaagtcagccgagtccctagtgtggagaggccccctccttcaggaccccagatgtggggcaattgtgagcctagggctagagcatggctcaggttgactgacctccttgcactactggggaatgtagcctgcctgtccttttaagttacagcagactcttacttttccaaacaggcgcctttggttgaggtgatttacctggctatgggcktctccattgaggcactagggagaggaaagaaacagggctaaaagccttcaccaaacaacatctaaagtaacactgaaaaccaacagtctcaaagccatcagcatctttgactgttttcccgccaccctccaaatgatcacaagtggaggccttcttttaccataggaagaaagtgtgccccttctatgtgactgaccctggctgcttggaaattccttgagtgtctctcaaagctcggcctctgagaatacataccacatcttatggctatacacggcagaacatgcagctcagtgagaagtcagcatgtatttccttttgagccacctctaaagtctggctctatcttagaacttctgtgattttggcgaagccacttccctaccaggggcctcacttgcttcctctgaaaaatgaggagattgtatgacataatgttttaaacaattgtttaaaacattggggcattttccacagtacctgtaaacacaacaatatataaaatagataaaagtagagttgttccttttgaaggagggtctagagcctgtactcttgtcctctggaaccccaaatcctcttatgttcctctataaatagctccaaaaaatcccatggatccaaagaatataatttgataaatatgtcttgggccttgagggcccacccagttataacattctaggactcagtgagyggtcaagaaaggcagtggggtagccacttgcttctcttgcattcagcctttgcagctactgggctggccgctrgtcttrtgagtatgcgcatgcctgtgtaacctcacgcatcactgaatcggggatacaggatgtggcatggctgggagcttcttggaagggcctccacatcctgtgaatgttgggtctttacctgccaactgctgagatgaaccagtaatcctttcggagagcacaggcttttatcaatgaggaggattcaaggcttactttttccttccttccaaataacactcccactgttgaggcttaaataccaaaaccttatggtttgcagaatcagtgccaaaaagtcaatcctccgagaaactgcaaagataatagcccctattgatcaaatcgggaggagaatagcttttgaggtttgccctcctaaaagaggtcgagaaagataagggttggagttttctaaaacatgcttggtttgctcaaattggataaaaccatataaaaacacttatgttcttagagaactggtgaccaattcaggaaaacctcacaaaatgaaaagactggcttggattagtgaggcatgtgaaatgcagtgtctttctaagagcatggtaaatgtgttatttcaaatacagacagtgacttagtagctaaccaagtacatccatgcagaggatggccactgtctgccttactagacaaaggagaggtatgaaagcccttgagtctctatgctggacactgtacaggagtcttttggtccattagttaatcattayctcagtcctttgctgctcccattttatggatgagaaaatagaagttaaatgatgttcagtaactttctcatgatcacaaaattaataagtgtcagatagtagtgttaaaatctggtgtgtatttccattaaatagtctactgtcttctaaatggcacatacacatttgctattaccataatgcttttggtgaagagaggctgccaggctggtggtaaatatacctggaaatgtctcatgcttttgccagtggtgaggcgaataggaatccatcagtggagatcctacagggtcaaaacttgtggccgtgtctctctctgaagccactggtggccatggaattgatggagttcagctgagatgtgcttgatttttctcacttaaacttcagttttcctttcagtgaagaaaaaaagcttattwaacatcactttgtgaggggagattattaatattcaactttctacataaaataatcagcctttattttaaaaaaatatggccttggaagatattatttttcagggaagttattcatattttaaaatattttatctgtttttattatcattttatctgagaagctgaacacgtggttatctaaaggaatggatcttgaagttgagaacaaaaytccccagaatcagcacaatcacttaatgagcttgcgaattgaaattatctttgctacagcccaagaactgagtggtaattagtgtccagggacacgtggggaacaatttcagtgttagcagtgccaagaatctattcatttgtcattggtcccaaattatattcaatcagcaattcaactcagcttggaaaaaccaagtgacatatagctaactgtctataaaattaacactgtaaaatgaaactatatttctggctgtgagcagcagtaagatgaagctatgaaaatattgcatgtaaatgctgtcaaggttcattttaatcccaccactttccaacctatgcttccttccctgaaatgccgccttggctgccaaccttctattcccaagctccctgaagtctgggtgtcggggtgtttgatgagccttttcataggtgaaccgcagcagtccatactactgaaaacaagggctgtcattattgaaagagccaaagtgggtggcagcagcatggggctcagactggagttggggttggagtcatatgtggagggccctgaaatgtagacaattagctcttctggggaaagcacctgcacgaaatacccgttccccaaacaagrggttgataacagaagcactgctttccactgtggctttgtagtaagcatttctcctacttgggtaaaattttctttttgttttcatattttggaattaagatccctgccatactgcctatctgacatctggtccccttgaaagagtctatgctatttttggctcaggacgttggaggaaaccagggccactgtaggtggggaggktatgtgtggttcatctacttctttcccacctgcttctaggactaggaaagaggtaagccaaggaggtctgcacaaaccaaacaatccttttgtctctgctgtggcagggagataaactagaagtatgcctttgcaaggtctcagtgagtcaacatcctgttcttgttcaagcttagtcagtgacgatgacatgtggccatttggcagacagtcaccatcagtaaatatggaaatacraaaaatgtgcttatctctgtgaaaaggtgaggccagaggtaaggtgaaaaaaaaaagccaggttttacaggcttgagtactggtcagcatgggctgccagaaggtgtggagtgctagagtcaaagagacctgggtttgaattgcaattcttccacttaataaagttcatcctgcattctatctcagatcaatttttagtggctacctagagcactgtgcttaaaggactctacgacagatcccaggcttaacaggtaaacagagccataattgattaaagatgcctacactggattgaagtaggagggattgacaacttgtatgccttatagctaatgaccctgggtcctctaaggtcctgtccagccctaatattctctagtaatgttctgagtgtgtgtgtgtgtgtgtgtgtgtgtgtgtgtgtgtgtagacatagcctgaggggaggttagtataaccccattacaatatattagtagcgtggmttaaattttcaaaaaacaagaacaacaaccaagattatttgtatattacagtctattattaaagagttttaacagcccgtaagtacttctaacagtccataagtacttcatagtgtattatgtcctttagattattgattygtatgtttgctttgattcatgatggctttgaaaattatattttaagttatttaccacaaatgactctctatattcaaatacttagctttcatttgtcttgacctaaaattccaatgtagagaaacgaatttctctattcacagaaatggtaacaattccaaacacgaccagtgaaattagttacaggagcaatgttgttcttccttaggaaggctattaaatttattagtctaagactggtctttcaacaagaaaaggagtttatgtttgattatgtgtggtcatttctgcagatttgttttcttgttaatgtagtattttaggggcgaggtgtattttgcccttgttctttttttttttttgcaatttccatttttattttagattcagagggtacatgtacaggcttgttgtgagagtatattgcatgatcctgaggtttgggcttccattgatcccatcacccagatagtgaacatactacccaataggtagtttttcaacccttgccccactccctctatccttttgtaattccagtgtctattgctcctatccatggtacctatgattttactcccacttataagtgagaacacatgatatttggttttctgcttctctgttaattcacttaggctaatggcctccatctgcatccatgttgctacaaaggacatgatttcattatttttatggctacatagtattccatggtatatatgtaccacattctctttatccagtcctctgttgatgggcacctaggttgattccatgtcttcgctattatgaatagtgctgtgatgaacatatgatgcaggtgtctttttggtagaataatttattttctttggggtatataccttgtaatgtgattgctgggttgaatggtaggtctatttttagctctttgagaaatctcccaactgttttccacagtggyggaactaatttacattcccccaacagtgtattagcattccgttttctctgcatccttgccagcatctgttattttttgactttttttgttttttttgagatggagtctygctatgtcagccaggctggatttcagtggcaccatttcagctcactgcaacctccgcctcccaggttcaagcgattctcctgcctcagcctcctgagtagctgggattacaggtgcatgccaccaggcagggctaatttttgtatttttagtagagacgrggtttcatcatgttggtcaggctggtctcgaactcctgaccttgtgatccacctgcctcggcctcccaaagtgctggtattacaggtgtgagccactgtgcccagcgtgactttttaatgatagccattctgactagtatgagatggcatctcattgtggttttgatttgcatttctctggtggtaagtgatgttgagagggttaatgtaatattttacattttaattttcaagccagtgttttgaagtaaaaatcttcaaatctggccaatagattgttcatttggatggcatctaaaatgcaggygcctctactggcatctagagccaccattccagtctaataagctatgggattgccgtggtctctctccaaaggcaggccctttggaaatctcctctaatgcttctaacagcctataarttactatatttaatattgcccttgtctttctcccttcccttctttttcttttcagaaacagagctgtcagtcagtgctgaattagtgcctacctcatcatggaacatctcaagtgaactcaacaaaggtacacagtgkgggcacacaggggaggcgaggaaagaggtgtggaactgtttttaatcctggcatgaccttctttgaaatcaactgtttttcagatcactgcaaggaggtgggggccaaaataaatccccagcttactttgtgatcatttaacattgaattacttgggattctattatttctggagagtttctttccccmcctcgttcctttttcttcttcctctaaaatgttccacatggtaaaaatgcttcaagatgtgaaatagggtcatttctgacctttctgacactacatctagtggatcttatttaggggatttgattcagcccaagccaggattcatcagagctgtttgctcggtgacctttcacgatgagcatttgatgtgcttgcagggttcaggaccgagtatctggaatgtttgtaattgcctgtgcataaggatggcagcttcctttgtgcacgtggggaacaggtttctgctaggagattgttgtttagcattaattaagccccgccatatgttaagcattgggtattttataaagaccctatgtcctggagtggtacatcaggacacattcaaaacctctgcagtctggctcaatctacctttctagccttagttatctttattcccctttatgcatttccagccaaatttcgatttcttcttatacatcctgtgcttttctgcctctctgctctcaccttttcacctggattgccttctcttctttgccaatactcattctcccccttttgcaaggcaacaaattacttctccctcaagaccaagcataaaatttacattatccagtcttgtctaatccctccagctggaagtggcctttccctctttgaaactcccatagctctcttctctgttcttctcttcacattttctatatgatgttatggtgatttatatacttatctcacccttaagcttagaagttccttgtaggagggtttctatcttacttttttttttttttggtctccatcacaaaatctagcacaaactcttatttgtaggaaattctcaataaatgtgtgtggaatgatgagtcacatcttacctggtgagaagccatagccatacatatttgtgtgcaaatacattcagcaaacttactgagtttctactttagttcaggcatgattcaaggttctgagattacagtggtaaagggagctcaaaagtcattgtcataaatggtcttttatgattagctctctattgtctactgacatagtttggttgtgtccccacccaaatctcatcttgaattgtagttcccataatccctacgtgttgtgagagggaccaggtggagataattgaatcatgagggtggtttcccccatcctgttctcataataatgagttagttctcatgagatctgatggttttataaggggcttcctccttcgctgggcactcattctctcccctgccgccctgtgaagaggtgccttctgtcatgattgtaactttcctgagacctccccagccatgtagaactgtgagtcaattaaacctctttcctttataaattacccagtcttgggcagttctttatagcagcatgagaacaaactaatacatctactaatacattcactgtaagttgtatttcctctctgagaagagataagtttattttataaaacagcaatgggtgaagttattttgctggttatactttactaggcactttaggatggtggaatgaagtgagatgtcttttcaccttaaatcaaaggacatttagaatattttttctattgccaaatttgacctgacattatttttctattaaatattaaatcaggcactccatgttactcctctccacctccagcatcaaccacaatgcctagaaagcagattttcaacaaatatttatagaatatgtttaatggaaaagaagaaataaaagaccctgaacattaacttagtacctgctctgtgccaggcactgtgctgggtgcttttttgtgaacttattctgcaagttccttatggtgccaacagaaaaattatatcattgcacactgcatgttattgatcagattccagttatggcaatagaaaagcatcaatgtgtgctaagaaaggcagcagagccagcagtctagaacccagcctgccagacttggaatttctaccagaccagcactgtaattagtagtagttgcccattaagaaagtagtggtgtcaatagtatgaacctgctggctgaagggaaggataaaggcaggccccagactcctttatttgttcaacacagacttccagagagtatggatggctttctggaggtacgaggatgcttggcatcatctttctctagaaggtaattagtgtatattctttaatttccattttgaatgagagaggaagatcatttgttgatcaaaaccttatcrattcctactctggtctaggaactctatgaaaattaggatataaagataaaccaggcaaaggcccctgtcctccatgaactcagagactatttggaaagactgatagctaaatgcataatcaaagccttctggtcaatttggtagattgagctttcaagagacacttcttccaatcacagagagatactagtgaaatatacaatgaagaaaataatccattgccaagctggtacacaaagaggtgaaatccctaggttccagaaatgaagaacaagttcaatactagtacaatgatctttgaggaggaattaagcaaaagagtccatgataatttgaaaactatgggtactctctaaggcctagagttttggtatcccatggggataagagttggagccacaggaaacaaactccctgcgttaggatatgaatgaagaatgactggcctaagtatgaaataaggaaaattctgctgaggatgtgatacagaaatctatgaagcaccttgggccattgggatcacccaggagaaatcaaaacctcagcctgtactacatgtgggagtggggttgaggttcttctcaggtattgcacaagccacaaaccaagatggtaacataaaaacttggcctggaattgattaaactaggagacactgacagcagcaaacctaaaaccagctcttaaaaatgtctcaacatcctcatgcatgaaggttttccaccaaagacaaaattttaaaaatgaaaaccacaaaacaacaatggcaaactcctgctgatgttgagcttactttaaaaaattataatgcatacaagggaggggaagaaagccaccattagtaagggttagcagacaaaacacatggaaaagctcataccttagaaactaaacacagtggaccaatttgagagagtatatatgtttaaaacgtttcatggtgaaaaagtagaaaccatggggcaaatgcaagataatatgacaaaaaaggcatatttcaaaataactaaatcaaaattatataattgaagaatagagctatggaaattagaagtttatcaaatggtcttaaagtgatacactcaggtcaagaatagtagtgatctgggagacagatttgagataatacggtggtttagaaaatggacttgagccagggtgactgactaggtttgaatcttgactccactatgcgtttcctgtgtgacttttagcaagcctctcaacctatctgctttggtcttctcatttgtaagatgaggtaagaaaagcacctactgcatagggctgttgtgaaaattcacctggccagcaaatctgataaactcattggagagtaagaagtgatagctgttttgggttaatatggttattactttgggcttgatattaaaatatcatgcgtacttcaacagtctggtaaggcaggcatattttagggttggggtagacatcttagattctgataaatcatccctttctggccttccacactttagtgttcattcatacaagtgacatacttcttagcttggcaacacaagattctccatggtcttacccctactgactcttcttatcttacctcctgtccccatactcaatattcaatttatttcaataatctgcctccrattccctaaacataccattctctttccagcctctatacctttgttcatgcagcttcctctgactgggtttgttcttcacttggctaacccctcttttacttaagcacaccttgaacattccctccttccccatttccccgcagtgcccctaatggacatacttctgaataacacaggtggtattccttccttgttggaacctcctggaggaagagacagatgattaacaaatccttccatcaacccctttgaccatgacatcaacagtgctccaaattatggggtaccgtattagcctatgtctatcttgatcagaatccttacctcggtgtattgaaattatytatttcgtgcctgcctctttaaagtcagggtttgccttatctattgtctaacaccatgcagtaggtaacatgcagtaggaaacatggcattaaattatttgggttcaaatcccagttatggtgtgtaaatgcctaccaggcgtgaggcacctgctaagcaggttgcacgcatcatttgaattcacaccaccctttgcaatagaacagataggcaacagaggctcatttgggctaaaggatttgatggaggggaagtgccaggattcccaccaaggcctcagggccaggtccaaggaccatgtctgttgtgacaactgagtgcattcatatcccctcctcctgtggggcaagttccctcacgtggagaagcagtaaaatacaatccatctcttggtgggctttaatgccttcctcttcacccagctgctgtgttccacctgtcagtcccacagcagctccccagccacactcaggtcccagtgttctgttacatgagtccagtcactggcattaaccagttacctgtctatcctttccaacaggaaatgaaatttaaaagagacaaggccaccctggaagagccgctgaaagctactattgatgggtcaagggggtaatttctgaaacaactgcttcagaaccaaatactgcctaaaataaatggatctacaggggctcaacctcagcttccccataagagtgttggggtgggtgtgataagggcctatttccccttctaccatactcagtcacaagaggtttcagaggttctctatagaaagccaaatgtttcttttggagaaggggctggaaattgctcccataggcagcagaaatggagggaacctactacttaaaaaaaaaaaaatactgaggcctgtttccaactgcaaatagttctctgtgctgacagactatatatrtatatayatatatatatatatatatrtatrtatatacacacacattttgtcctggtttgccttttcaaatggctttctttaccaggttggagctttagcagggaagtgtgcagtgtgggtcttataaacatgggctctaaagttactatgactctgagcttccttttgctcacctgtggatggagatatatgtatctgttactgtattaatccattttcatgctacagataaagacatacccgagactgggaagaaaaagaggtttaatggacttacattcccacatggctgaggaggcctcacaatcataggagaaggcaaggaggaacaagtcaagtcctacatggatggtggcaggcaaagagagagcttgtgcagagaaactcctgtttttaaaaccatcagatctcatgaaactcattcactatcacgtgaacaacacaagaaagacctgcccccatagttcaatcagctcccaccaggttcctcccacgtcacataggaattgtgggagacacaattcaagatgagatttgggttaagacactcaaaccatatcaattacctaaggtggttttcctagccaactagcatgtctatgggattcatgcccatgttgtgataggatagctgcttgctcggtcacaacatacagatacatcttagactcagccccctggcctgcctcttccctcgaagcttcaccatcaaggcctatgaccaggttctctagctcaggagtggtttgctccctcttgtccccactctgttacttgatttgtccttggcacatggtctatttaaatggtattgactggcctatagcttagagcttgatgcttagctagtcagaatggggtgactgagtcrttttcttgtgctttaattgtatatatttggagctatgggttgaaggtggtattgtaaggatagactggatcttgccttggctcttggcacgtggcaagctgatgaacagtcttcctaggactggggtgtctgagagcttatccatccttgtgttccagcttcaaaactggtagctggttggggtcgtaagcaacatctttctaatattgatagcaccattttctttaaaggttgtcaccttgccattatcaactactaaaacacttagagcctctctaacctcatatggaaaatagaggagtgatatgtacttgaaagggctggtgtatgaattaaataaaatataaatctcatcacagtctctagcatatataggtgctcactactggtagttctcttgaccgccccctccccaccaactcccttctgtttcccaaggggagggcagcatgatttgaggaaacagcactttaacaaggaatctaggttctagttccagctcagctccatcaccaggtcaatgacctatttaagctctgggcctcagggttttcacctgttgaaagggaggcatcaatccttgttctggctgcattacccattttgagactccaatgctgcgtgaaccagtatagtagccactacccacctatgtctattgagaatgtgaaatgtggacagtccaaagtgaggggtagcatcagtgtaaaacacactggatctcaaggccttaatatagaaaagaaaatatcttactaataatttttacattgattacatgttgaaatgatattttcatatattgaattagtaaaatacattaaaattaatttatagtacctgatcccttttaatgtggctagcagacagtttaaaattacacttctcacttacatttgtggttcacagtttatttctattagataatgctgctctcaggaaacaattgctggaaccttaggtaaatgtaacctgtttcctccttgcagcaaaaggaaatgctctcatatccattccagctttaaaattctaggaactactttttataaaaagaaatgtttctaaacactgattttgtttgtgtgtgtgtatataatgctttatgtaccctagaacttaaaatataattatatatatatatawwtatatatatatatataaagattttatgtgtaagggattatcattactgattatagtctgatcattattataactagattacaaattgaccactaatatgattagaracaagcaatatctggagtaatttctcatctgtggagaaaaatattgtgggttaaaaggcgaaaaacacatagggattattattttttttttcttttgagacaagatcttattctgtcgcccaggctggagtccagtgatgtgatcatggctcgttgcagcctccatctctcagtctcaagcaatcctcccacttcagcctccaagtcgctgggaccacaggtgcaccatgtycagctaatttttgtatttagagacggggtctcaccatgtttcccaggcttgtcttgaacttttaggctcaagcaatctgccccctcggccccccaaagtgctgggattacaagcatgagccaccacactcagccaggaacaccttcctgataggagagcagggatttggatatatgcggggagcttcttgcctgctgtatatctcctgtatccctttgctggcaaccagctcttattccctttgcttacacccagtatagaagcatgcaacatgaaaatcagttccctttgaccaagcagctctctctctctaagaccggtattaatcctttttgacaagtctattcactttagggaaaggcattggcaagatgagggatatggaattctatccggaaatagagggaaaatgaccgtttatggtccatcttgattcttcaaaacctgctcaaaggggagagatttgccatcagcccccctgccatccagccatcaatggagcagaaagggtcttcctcaccatgtaggggtctttccagccggttattccagctcttggcacccaagccctcccatcattcctcatctccccatctgtgctgttaggggggcattcagcctagaggaacgaggccctgtgggtgctctgcagatggctgtgtgagcagcatagaaccccacctccatcctcccagcaaccgctgccccagcccaggcaggtgagcaaccgagcaagcttggaagtgtttgtgctcctgtttttaccatttagaatgaggagagagcttatctaccttatatcttgagtctcagattccttactcccttggtactattttcagtaattactggctaagacgaggcacatttctggactcataaataataaggcagtcacagagaaagagtgtctggctttttcccaggctgttttttccttgcctgtgtgtcttttagtttggatttaagcctatctcctcctgttgcacccacttcaaaaatggctttacagtttggcctcaaggtacttccagaaacctatggactagggtcctgctcacagggatcatggaagtctttcctagccctgggcccacagctttggttaaccttatctaaagacttgctgggactttcggacttaaaaggtctgcttggctaaagggaggggaaacggagattatacaaagtgctttaccatggggctcctccctcagtttcctgcttctccttctccacctttgcttgttgtgctctaaaacacaacatcctatttcaagcatctgtgcaaaccttactatttgctctgatgagaacaccctcccccaaccttttgtcattgttaaagacccagctcacacttcaccacttccaagaagacttccctgactccaccttctcccactgatgatcacaccttgttcctccccatgccaggtgatgcttgtttgcatgtatgttcttcctcttcttctccccattcttcttctttcctcatgcaagaaattttattgaagatcttcgtcatttcaagcaaggccctcatgtgtctcccattcaaagagaggttgaccaggaaaagcagtatggagagggctttgagagagaaaagaacagcgtgtcaagctgtgaacttcttgagatcagaagtcatgtcttctttatgcatccttatctctccaacatctagtgcagttgtttgaataaagagagaaatgaatgagtggtgaaaatcagaataygggagccgaaagttactttagagtagctgtcctcaagctttggtgggtgttagagtcacttggagagacccgggttcgttgaatcaggctagaccctattcccctccattgttaccatcttccaggtgactctgatgcccactaaagtttgaggaccagtgatagagcagtaattcttaacctcagctgtaattggtatcacctggggaattttaaaaattactaatgcctgggtctgttctcctcctcccctcattcttattttattggtctggtgtatagcctgtgatttgagaggtttaaaaggtctccaggtgattctagtgtgcaacaaagtttgagaatcactgctttagagttcttctaggctaacctgccttgtagtttgactcttcatgatattctaacaagtgattaatacaagtataggtgcttggcactttgtcaatttctgtcctcaattttctgaggtaatgtagacaagacctgggcttggagtgagaagtccttggtttatatttaagctctgtggctaactccagattcttgaatattaagatctggattttttcccccatctgtaaaatggggagaataccagccttcaagtgttgttgtaagtacagaatgtaatgacatatgtgagacggctaagcacaagccccagaactcataaaataaatacagaaaagggtagattgatagtgatattgatatatttttaaaatatctgaatgtgttggcataactccatcacttgttccttatggacatcgggagtaacacctccctttctcatgaaataataccaattattaatagctaccatctatcgagggcttatgatatgccaagaaccatgttaagtgatttacatggattgtcacatttaatcctcataaaaattctgagatactgtgacagatttacagatgaaaaactgagccttagggaaaagtcgtattttgaatagtgacatcctgcctgcaaaagatgtgtccatgtcctaaactctggaacctgtgaatttttctttatttggaaaaggggttttgcacatgtaattaaattaaggatcttgagatgagattatccgtcattatccccagaagcctaaatgcctacaagtgtccttataagacagagacagagggagtttttagatggacccacagaggaggaagcaatgtgaaaatgaaagcagagatcacgtgatgcagccacaagctcaagaatgccagggccctcagaaactaagagacaaggaatgaattccactccagggccaccagaaagagtgtggctctgctggattttgtacttctagcctccagaaatgtgaaagaataaattgctgatgctttaagccactaagtttgtgataatttgttaaagtaacatcaggaaactaagagagatttaagcaacttgccctacgtcacaaagcagtgaacccagaattcaaacccatgttcttaatcaatatattatgttgcctttaagctgaattgaactttgtaataaaatgtcttaggttcakttattcaacaaatgtttattcagtgcctaccatggacgaggcctgtactggctgaagatacaaaaatgaaaaaggcagaaacattcttccctttggatactctacaatttagtggaagagaaaaactttagacaaggtttttcacatacacasaaatactgaaaatcatttaattccagcartgataggtgctgcaaaggagatgaatgaaaaaataagacttatcctggaatataggatcagatccatcctaggtaggcccagctaatggctgaggtagaggtcagctcttcattccctctggcctgtttactgagggtttgagggcttacagctccactttagccctcctgagcttgcagaagttggtccacaaacagattatttggggataaagacccacaaaagaagaaaggcagtaaagaattcagcagacggcragctctgcaacccgttgcagacattattatgaggcagtggagtgtgtgaaaacttcttttagacaaacttcgaaaatgttgtgttcctgtaccaagcaagatttcctgtagggtcatgagaagctcactaatcatctctttagttccaagctatattacttcagggaagtttctgtcaaggcttcatgcttaagtatctctttgtctgggtttattctgtcaaatgcttatttgcttaaaaaaaaaaaatgccccaagccttagttgatctagcagcttaggaagttcaaatccccgcatacctcagaggcctcctagcctctgccctaattgctgcaaataactcatgatttcattatctgtgggcccaaagtcagaccagacgaactctggccgttggactatggttgtatagaattaaaactgacttacaagatttttctatccatggtctttacttgtcttctgaactcagagacctgaattcttcccaaagatccttcctaggactctaatttcaaccccaatgtcctcaatagttacattcacttatacattcaacaggtatttatggagtaccagtcatgtggcaggcactgtgctgatacagaggtgaaaatacaaaattcctgtctcatgaacctcactttctggtggagttagcaaatccctgtgtgggaagtactattatacctgacacttcctgagcaccatttaatgtgccataaaaactctgcaaggtaggtactattatgttcatttcacaggcaggaaaacaagttcaaggtaaagtgacgcagctagtaaatggcagagccagaattcaaatccaggctttcctggctaccaagtccatgttctcagtgactatttatttctaaaataataatctgtgtgtatagggaggaaagaaggaacaggcttagaaggctttttgctggtaggatatcctttctggaaggggatattcttgattacccttaggtggtttttcttatttgtcttttttctttgattttcatactttctttaataaatatcctatactcttatagtcagataaaaaataagtagaagacataaaaattgtaaaactcatatatacccccaaagaattgaaaacaggtattcaaacaaatgcaggtacgcacatattcatagctgtattactcacaatagccaaaagatggaagcagcctaaatgtccatcagtgggatgactggtaaacaaagagtggtacagacatacaatggaatattatttggccataaaaaggaatgaagttctgatacatgccataacatggataaatctcaaaaacactatgctgagtgaaagaagccagacctaaaaggtcacgtgtatgatttcattcatgtgaaatattcagaagaggtaaatgcatagaggcagaagttgaattggttgccaggggctggctagagtgggagaagggagcaattgctttataggtacacactttccttttgggctgccagatctgttttccaattagatagaaatggtggttgtacaacattgtcagtatattaaatgccactaaattgttcactttaaaacagttaattttgtgttaagtgacttttgccaaaataaaacaaaaataagaaaactctaaataaacaaaacagtcacaatgaagagctttggtcttgctattcttctgtactgccaggtctctgagggctacaaaaatgaatttaacattgcaacgctaactgtttttacttagtgctacagccccatttccccrtaagagccctggcatgtccactaataaggtaaccccaggccattcactaaacctctctggacttcttgtgtcctcagttgtcacacaagggtaaaaatgtctacacgaagtcattcccagatcctaatatgataatgttgtgcttygtaaaatgtaaattgacttgaatatatgtctctttatttttacatcaagaaacagtaggtgatctgaaattatctctgcttaccaagcatctgtgttaaaagaactgtgagcataaggggtgaaatcttggtaaagtgtctatttagaggccatgctttctgttgatgttgacattgctgttttttgtttgtgggggttttgtttttgtttttactttataataacatttmtttatrtaaaaaggaatgtttgggctggggctaggagaaatgttgaggtaatggaaaactctaataatgcgatcatctattgaagacacgagctcagggaaagcctttctactggtgacaggcatttttctgctaaggattcccaataggaatcaaatactgctgaagatagtagaatcagacttttgtgctggatcgcaggtaaaccctgggtagaccttgagatactgcccttgcartggtgctgagtaacagaaggatgctagcatcctgcatcgagtcagaggagctcactgtagcccatccctccagtccacccagactagctagacagtgccttcttagctctcagcagccctcatcctactgagagaggaatttggagaagacctggggaaaccttgaaagaccacctcagaatccagctaaacagcttgggtcctctttcccagggccagttgaggcaggagactaatagcaggaagagagatggctcccagctgttcagctcttttaaggtaaggtgggcctgatgtgtcacctgtactgtttattgcccttatccttaaataattttcttcctttaaaaacaaaacaaaacaaaamaaaaaactagctcttgcaatatctaaacatatttatttattgtagaaaatctagaaagtaaaatgaagccaaaattatgttactgctaacagatactgtttgtctttttaatgcatatatttttacagatatatttactgaaaaggaatcatattgagccattctcttttgtaaacaacatttgtcccttagaaacaaattcgcaagcatctttctgtgtcattaaatatttttaacatcatttttattggccatattaaatgttgatatggtttggctctgtgtccccacccaaatcttatcttgaattgtaatccaaattgtaatccccacgtgtcaagggagggacatggtaggaggtgattggatcatgggcgcggttttccccatgctgttcttgtgatagtgagtgagttctcatgagatgtgttggtttaaaagtgtgtggcagttcctctctctctttctctcctgtcaccttgtaaagaaagtgcttgcttctccttcaccttctgccatgattctaagtttcctgaggtttccccggccatgtggaaatgtgagtcaattaaatctcttttctttataaattatccagtctcaggtaattctttatagcagtgtgaaaatggactaatacaaatgggagctgggcgcagtggctcatgcctgtaatcccagcactttgagaggctgaggcaaatggatcacctaaggtcaggatttcgagaccaacctggccaacatggtgaaaccctgtctgtactaaaaatacaaaaattagtagggcatggtggcatgcacctgtaatcccagctacttgggaggctgaggcaggagaatcactggaacctgggagacggaggttgcagtgagccgagattgcaccactgcactccagcctgggagacagagtgagactccatctcaaaaacaaaaaacaaaaaacaaaaaaaacaaaaacaaatgtgttccattgtagaggtattcagtaatttactgaacctattatcacctattgttgaaaagttagaattattctagctttgtgttataaatagtagggtgatgataaatgccttaaagggcccaggacagtacctggcctcatggaggtacctactacacagtgttctcttaaatctctctgcatatttacatccctagcawcagtgcaggagaatgtcctattctactactacttaccttcactcaaactaagtattgtcattttcttggttgttgtcaattttaaaagcaaaaaaatggtatgtcattgttattttaaattccatttctttgataactaaggttgaattttttatgtttagtagccagtttatctctaacatattaatttttctcattctactattaagatactgatcttttgtttgaaatctgcattttttctagtttaacttttaattttgtttgcatgtatattttaacatggaaaaattttatttttatgaaattgaatctatcaatctttggtgtcatgcttagaaaagccttccattctccaagatgatcaaaacagtcacttatattttctttaaggtgttataagtaatcacttccttttcagtctgaatcaaattgagcaatatttccacccctaggaagggcagcagattagtctggtgccagagacaacttttctccayaacctagactcagggaatctccaagttgaatgacctctagaagtcgtataatgtgagctcctggctgataacgtgattcccgtcttccagaagcctgataagtggtggttcctcgcttctgtactactggtgggagtataaactagtacaaccactatggaaaaaacagcatggagattccttaaaaaactaaaaatagaactaccatttgatccagcaatcccattacccagaggaaaagaagtcattatacaaaaaggatacttacacacacatatttatagcagcacaatttgctrttgcaaaaaatgtggtatcagtccaaatgcccatcaatcaatgagtgtataaagaaattgtgagatatatatatatgtatatatacatacacatatacacacatatgtacatatatatatacacacatatacacatatatatatgatagaatacttctcagccataaaaaggaatgaattaatgacatttgaagcaacctggatggaaatggggactgttattcaaagtgaagtaacacaggaatggaaaactaaaccttgtatgttctcactcataagtgggagctaagctatgagratgcaaaggcataagaatgatacaatggactctggagacttgggggaaagggtgggaggtgggtgagggataaaagactactaattgggttcaatgtttactgcttaggtgatgggtgcaccaaaatatcycaaatcaccactaaagcacttactcatgtaaccaaataccacctgttcccccaaaaggtatggaaataattttttaagtggcgtttccttctagctcaacactttcttaagtgacattacacaagaataacctattcttctttttgagaaactctaaaattaggtaggcctttcttatgttgagccaacttgtcttcattctcactcttctgtgttttattccctcttctgctcagaaagtggctgggggctgttctctggactttgcagtaagattggcctgagtttctaatcttatactcagtagctgtatggctttgggtaaattacttgatcactttgagctatagttttatcatctatgaaatgggggttcaaaaattactattattacacattctaactttgagacagacaaagctaaatgctggagcaagtgggcatcaatgctattttatttagcagttatgtgtggtcattttagacttgattatgactcaagttttcctttagttctatgcttctaaactgtgtatgctgtattcaaagcagtatcttgtagtataatttatgcttaataaagaaagccaaaatatatctgtactagtccattttcacgctgctataaagaactgccctgggcttggtaatttataaagaaaggaggtttaattgactcacggttccacatggctgcggaggcctcagaaagtttacaatcatggctgaaggggaagcaggcatgtcttacatggcggcatgtgagagagagtgtgtgaacgggaaactgtcaaacacttataaaaccatcagatctcatgagaactccttcattatcagaagaacagcatggggaacctctcccatgatccaatcacctgccactgggtccctccctcaacacatggggattatggggattacaattccagatgacatttgggtggggaccccaaccatatcaatatctctagataaaattgtaaatactttgaaaagaagcaagaaggatcaaaatcagtgtcataatatattaataccaacaatctgttatgaaacttattgttacatagatgtgtcctcattagttccagtgttcctttgaactttggataaaatgacaaatagcctttcagaccttgtctgtttttaggtagaggacctggtatatggacacctaaacctcatgaggttgatttgagaattacaggagatcatgcagagctctgatagtgcattttcattatgatgttattgcccacagaatctcttctttctctgactaaagtttccattcatttcattatccccttcctagcttgttttccagatccttccctcataaaaggtgggctcctggagtgagcacagaatactttgtgctgccacttcattttgcactttttttctgctaattcattttatgcttttatttctcaacctaaattatctgctgctccataacatcaacttattaacttattgttgacttttaatcaatggcaattaactaaatctcctgtgagtttcttgcggtttttaccattcacttgcatctcccttttctcatactcattgtttaattctcatctctcattgtataatcggtgttttgtgtcccagcactcactagaagctattcctattatatttcaacatgttagatttgtcatattatttgatgctatcattttgcatgctcataacatcccaactttgtgtatgatattaatttcgttctttttctttttttttttttgaaagagtctcactctgttgccaggctggaatgcagtggcttggtctcagctcactgcaatctctgcctcccaggttcaagtgattctcctgcctcagcctcctgagtatctgggattacaggcacctgccaccacatccagctaatttttgtatttttagtagagatagggtttcaccatgttggccaggatagtcttgatctcctgacctcatgatcttcctgcctcggcctcccaaaatgctgggattacaggtgtgagccactgcgcctggccttaatttagttcctatctaagatgttgatatggctgttggcaggaaaacaatgtagacagagcctctatcatgattataccttgtcttgttgccagtgtggagaactgcctctcttctcttacaaatgcatgtagtttagattttttaaaaaaattcttttcactgatttcagcatcttcctgtttctctgaactttaaggtcagcattcccattttgtcacattaattcactcaacaagcatttgatgagctatgtgccagttactgtggtaggtgcataaataagtaatatgcatctgtcctcaagatgctcacagtctagtggaagaaacagatcaaatgaattgggcacataataggtttggggaagtttgggtaagactttgtggaggtgacatttgagttgggtattacaggatgcatgggcgtttgctaaataggaagcagatcaaggacacatctggccatgacccacatctcctctctttagcccacatgaatgccaatattgcatgcatattttctctcacagttgctgctgtttttctgaaagcagtgttttctcattcacaattagatttttgttcttggcattctagaagatgcaattgccatccagaaatgctaagaagaaaaaatatgcaccattctaagaggacttaaaaaaaattttttagatacatagtaggtgtatatatttatggagtttttgagatattttggtacaggtgtgcaatgcataataatcataccatggaaaattggttatctattcccttaagcatttatcctttgtgttacaaataatccagttatactcttttagttatttaaaatgtacagttaaattattattgcctataatacccctgttgtgctatcaatactaagtcttattcattgttttaaaaatatggaacacttcatgaatttgcctgtcatctttgcccaggggccatgctaatcttctctttattgttctgattttagtatatgtgctgccaaaacaagccccagaggaatttttaaggtgtattcagatcattgaacatcctatatcactcttatgtcttgtttcagtactagttttatgatcattaattatcgtatatttatattaataaaaataatatttgttaacatttatagagtaccttccacatgctgggtggaaggtacttaacctaccatccttctgtgaatagtacctgtgaatcatacctgtgaatggtaccttgcatatattatctccttctaccattaacaaagaagaaatctgagctcagagaggttgagtaacctcaggtcatgtaactaatcaagcagcaaaacagatttgaacattggtttctctgtctcctaagcctgaccatttacattttcttattctaccccattggtcaatataccctctgactctcttccttggtctttacccattgattctcctcgtaattgcccttcgtattagtctgctagggctgccataacaaagtaccacatgctgtgtgacttaaacaacagaaatgtattgtattacagttctggaggctggaaagtccaagatcaaggtccagcaggaatcagtttctggtaagggctctctttctgccttacagatggccactggcgtcttgctctgcccttacatggcagagagagacagactgacagagagagaggtccttatatttttatgaggccaccaatcttatcagattaagaccccaccctgattacctcattaaatgtcatctcctaaaaaccctgtctccaaatacagtcacatcggggttagggcttcaaccctaactccaatataaattttggaggaacacagttcagtccattgtacctttcttaaaacatcacatgtattttcatttctccatggttttgcttatgctgttttcccagcataagctttctgtcttttaaaatctttccaattattcattacccaactcaaatgtcatttcccatgaagccttctctggttttccagtcaaatttagttgccctttcacctactcaataatgatttttttgactgtattttgattgagcccctattttacccaaactacattatatacttaagctccttgaagttagggactctgccttaatatgctcccagtttgctcccaattttattggtactccataacatttatgacttgagtttttcattagctctaaagaatgatggaggcaattgggtgggtgtaggctagataagagaaatgcttgtgcccatctccaagtgttggaagtgatgccttacagaagacagaaaaaatgttgcttgaggggtttagactgagaccaccaggtaaaagttacaaagaagcacacttctgcccagtttatggaagaactttttaataaataacaaaaaggtgaaggaaactaacactcattgataatcagttgctaaactgctgctttacaatttccacttccacatggtcctataaaatagttcccatcttttatagatgagaaaaccacatttccaaaaagtgtaaagatctgatataagatcatgtagcctacctccgtcactcattccttcatggagaagtaatctccctttctctagaggaattgaagccatctgcatgaccagttttcaggaatgctatatcgagaatgctctgggggtgttggtataactaatattttagttttctttcatctctaaagtcttctgactcaggaattctctatccctgacatagacttaatggaaatagacctataaaacctaacttctcccatccctttgtgggtaatatatattagaaaacttatatttagattattacaaattatctttacattgtttcatgtatgttggtccagtgaattaggggtgtgtgtgtgtatgtatgtgtgtgtacatatgtatgtgtgttttgagacaggatctcactcttcgcccagacatgatcacagctcactgcagcctcaatttcctggcctcaatcgatcttcccacttcagcctcctgagtagctgggattccaggcacacaccaccatgcctgcctaatttttgtagagacagagttttgccatgtttcccaggctggtcctgaactcttggacttgagcaacccgcccgcctctgcctcccaaaatgctgggattataggcatgagccaccacgcccagcttctgtcagttagtatttatgaagctgtttggaggacacagcttggaaatatccatactaacaaaattgacttggttctgaccagtagaggctgtatttttcaaccaaaggctacactgtctggggaagaaaatggtaatatgcatgagttgtccacgactgtagaagtcagatggatgaggtacttagccttgctatcctgagtacattccatgctgaaggtgggtcccagcagcctgagccccccagggtcagcttctggggcaggcagccaatgttctgatgtagctgccatttttcttggatgattcatgtgtgaaaawgtctcccccaaaagaatttgggtcatcttgttctttttcccaaagccaggctcttatcagaccagaagagtctcttcatacaaatggatcccagttggsaagtttatgaatgttaaggatagttgctcattccaaaatacataaccctttttgtctgtggcatcttatatttgactatattgctttttctactcaacagaattggatcttagaatcctggagctggtgtatgtgtgacttcagagataacttaaaaatgatcacgtatttctgtcttctaaattcagatggtttaactcattatttcttttttcttgtgaaggcatagccttgaatttgaacacagcttttgcttttgtgtgtgtgtgtttgtgtgtgcgtgtgcatgcactataacattttggcttgtgctatgaaactctttttttttttctggtcagaagaaagatgacaacactgaatcaactgccagtaacatccaaaaccagttcaatattaccccctggtttcttttcctaggaaaaatatcacaggtatcttcctcctcttccattttcattatacaaaatatggccgggcgcggtggctcatgcctgtaatcccagcactttgggaggctgaggcgggcggatcatgaggtcaggagatcgagaccatcctggctaccacagtgaaaccccgtctctactaaacataaaaaaattagccgggcatggtggtgggtgcctgtagtcccagctactcaggaggctgaggcaggagaatggtgtgaacccgggaggaggagcttgcagtgagccgagattgtgccactgcagtccagcccagttggcaaagtgagactccgtctcaaaaaaaaaaaaaaaaaaaaaatgcaaaaagcaaaatatgttgttcctgcatggagattgggggaggaagagaattatattttgcagtgtcttgcaaggaataaataccatcaaaacacttgaatatgaagttgacactactttggaataatgtagcccattgtgcctgaagcttaacagacatgacccaaagaaaagaatggttcacacaatatcaagagtactttgtggcagaggtgggaccagactccatcccctggtcctcactgcacagccttataacrtcatagcttctcaaaagtatcctaagattgcaatggagaccagaccaagcagtcagccccatcagagcttggaggatgctatcagggaagtgtatgtttgtttcttcttaatcacagtcctattgtaagcctcaaggatttaggacccacaaaaggaaattctcaatttccactgctttttgtactcaacttttaaagtcaaagatggaaaaggtaagaaaataaacaagagactttttttaaaaaacaatattctgtatgacaccacttatatgaggtacctagagtagtgaaattgatagacagaaagtaagatggtggttgccagggattgggaggaaaggagaatggggagttagtctttagtgggcacgaggtttcagtttgagaagatgaaaaaagttttgggatggatggtggtgatggttgcataacaatatgattgtacttaatgccactgagctaaacacttaaaaataattaaaattgtacgttttgtcacgtatattttaccacagttttcagaaagtgcaacgtccttggtataatctggaatctccatacccctatgcacatgcatccccagaaacaggatatcgtattctaaagaatgataataacaaatttatgctatttttaattcaccttaattttgttgttttcaaaataattgcatatacgtggttgcatctgacagtcaccaaaactgggagaaaagcataactgatcttttatttcacagatgagtaaactgaggctcagagttacactgctgacaagtaacagagtggtactagaacccaggacttctgacatgtattcctggagccatgcatgatcctgtgtaaaagttctaagttgatacttaacatattttacttactaatcttagaaaagagactaacacattttaaaaggattttcaaaaacttgaagtggtttagaggttttaagcatgaaaataagttaacttagttacctcattgtctagacatcctgattaatggaggttttactatatagtaataataatgacaaacccttatatagaacttcactgtgcaccaggtactgttctaagtaccttaagaacactaactcatttatcaaaatgtactatttgtatttaaaatgtataatgaaatttattgagacttgcatgtgccaaacactttcctaagtgctttatacactttatctcatttaatccgtgtaacagtctgaagcaacaggtaatactagagcttggagatgtgaaataatttgctcaaggatacatgagaacaagtgacacagccaggactcaaacccaggtccacccatctctttactgtgattcagatggtgtcgtgtgtgtctttctattcactgttatctctaaatgttagttacgtcattcaggcagctggagcagtgtccaagtagggatgctggttggctcatagtttacttcttgaagacttctaattttaccctgaaattctggctggaaatttgattccattgctgaaaatggaagaaatacagctttcatgttcatgcacaatttgctttttcatttttttttttttttattatcctgagacttactgtaaatcacactttcccatcagtcctgggggttctgattatgttcatggggtctagctaagagcaagggcagtaaattactgccactttgtttgaaaatttttttagccacagtacattagctgcttttgtttgcttttccactggtggtgtgcccatttttatttcagaatttttgtttcttgaatgtctcatttgtgaataatgtagcttccaaaatggaatgattggagaaaaaatatgaacgagggtgtcttgtttggcacctgtaagttttttaagcatttatagcaaaaatgaattattgagtcccccctctttctctctcatactctctctcactcactcatctgcattctctttccttcctattctctccattctactccatttcccaaaaaacaattgctagataatgaccattatggtggctaatatcaggtaactaccaagaagtgccttcttccaggcttctstaagtattcttgtttatttgaaagattgatagatcagagggtcaggggatgtgttttattgtaagtttctgttccaaatttcctgacattttccattaaaatatataaataaataagccttttaaaaggaagaaatggaactaataagaaccagaccctaaagtgatggtcaaaatgtcaaaaataactgcttttcctttattcagtatcattaatctcgaggtagatacctacctttccatagactctccctaatagcttgacctgattctcttgctggrctattcacaaatagagtgacttctaaagtgacaccaaaatcctcagtagctcttcaggaattggtgtgggagttcagtggcaatattttcatatgtttttcaaatcacatcttttggtaaagtgatgagaaaggaggctgtggcacacactagcagtccagagcacaaggccccctcatgagtctccatcatcataatgtttgtgagatcatcctaaaggtgctagaaaatagtgatgcttgtgtgcaacctagatgaatttgaaaattaactgattttcctcaagtttgtcagagtttctaaagtggctttggaaagggttccaktgcacacgaagaggaagcttaagttagacaatgtttgtccttatcaataatccatacaaaaattgtttatttcattttcttggactttatatgcgatacytttcagggaggctgcctacctcataatagccctctgttgtctgatagctgctttcacgacccatcatgaggggccttcagcagccatgtttgaatttataaccctgtccttctggtgagagttgattggaccagggagaggacacctggcccaggttacgccagatctctttcccaggaatttgcaattggaactcagaggtagcctgttagtgtttgtcagttgctgttagtgccaagagatcaatctgggggccrtagagtgttgatcttctactgtgtgcatagaaaagccaagaaagctggttttcaaagagagatttaagcagattcataaagagaattagagtctgggggtggagggagattcctgatctggttcccggcagctttccagttcttggttctcgttcctcccgaaacctggccagacatcttgccagagtttcacaagaaacccttgcatcctgtgttaaattccccatccacctcgtctgcttttcctcaccctcttacactggcttgagttagttcctgttgcatgtaatcaaagagtcttaacaaagacagattgatacctctctggtgtgtatttgattatagagatggccaagtaaacacatagatggatgttcatacttgccctttggtaccctagaaggtttgagttgggaacaaacctcagagatctcctagccttatcctcacattagacagatatggaaactgaagactatagacaggtaaaataagtgatttacccagggtcacacagctaggactcgatccctagccttctggtcctcaggccagccaatgttctttctaggctggctccctagtgccatccatccatccatccacccatccatccagtaaatataaactgagcaagattctgctacatgacaggtactggggtacatgttttttgtcctcaacaaactcacagtgtggaaggaccaaagttctttawgtttatttttacttcattccctggggtttcccatctggagggcactttrctaactttgctagcccacgatcacagcgagttcatccaggagtctcccagaatatactcccatcatgtattctctgtgcctcttgggtctattctttcctaatatttgtgataatccatgttcatattgaatctcccctgggagatccttgaaaccagggactgtgtgtaagtcattgcttttacttcctagcacggaatcyrtcacaagrtacttctccaataaatgtctgcttttctagagaatttacttcactccttagaatctcaagtgagagctgtgtatcagttagctcctgctaggtaacaaaccacaacaaacatagtagcttccagcaacaatcatgtattattattctctctcctggttctgagagttgactgggatcagctagatgattcttgtgcagagtctctcatgtggttgcagtcagatggtggctgggtctagggtcatcttaaagactttgtcattcacatgtctggtgtctcgactgagargacaaaaacagctggagtctggaacagctggggctgtttcacacacaagtgttgtttgcacaagagatgtccaagagcttctctttattctctccaagcactctccatgtggtggcctcagggtaactggtgactgaaggctcccagagggattgcctcaagtttttttaaacctgactctgaagtctctcacacagtgtcacttctgcaacattctgttctcagaggtcctgccacatgcaagaaagacacgatcacagaggtcctgccaggtgcaaggaaagggcacacagactccaccttctcatagaaggagcatcaaacaatttgcagatagktttctacatctctgcttgatatgtcttcctgcatgagaaatatgaaaaaatgaacacttttcagggagctttcatttcagctggaagccatgattttcagacaactgatagtttctggcttcactgacagctacatccattgcaactagtttgctagcccgagctgcagttactcacagaatttgctaactatggactttagtggcctaggagttagcatgggcaggcaaggtggatcagggccttgttttatcatgcaattcttgtgtgctgggaactggctaggctctatggttaataagaccgtgatgaaaagatgccttggggttcctcaatgtagtcatatatgagtggttctgtttttagttgtcaccatgatgagggtgtgcagttgacatttattgaataggggtttaggatgttaaacacgctaccatgtgctagcaatcctgctggagraggaactttcctaccaaaaatgctaataatttctgacctaatgtcagaaacacagtgaagtggggaagctgtgagaagtgcactgtggagtcctcagcagataygcatggtacatgtcaccaagggtggcatctggtttgwgtgccacactctccccaaaacaactgcacagcttctgcccttcctctcccctctgcagccttgctctccatcaaggcccaatgcaagcaccccctactctctcacaccttccctgatttctagagctggacaggttcaccccctcctgagcataaaacagccctttccttacctctttccttgttctgattattttcatatgtttcttttgtatcactgttttgcgaggccarggagagatgggacaggtcccccctccatgtccgcacaagtrtttaataagtatttgcttatttatcttctgtttcccctctcctgtctactcctcgcctcccctaaatgcctgcacattccagcaagaggacaggaagtctggggtttctccgcctctccactccacactgggtcttgcccactctgcctgataaaagtcagggaaccatctggcctctctgccaccacctcagtaaccttggccagcctgttttgatctcagcctccctttctccaccctatcttgtgaatgccttcaacactcagcatcttgaccacacacttggcttttgctctcactctgacttgtacttccaaattagatccctagaatagctctgctttccttccagatcttaaggggctcctgaaggacagaggccgcatcacctctttttaaaaaaattccaccgattgcaaggtgttacctcctttggaaacccttctctgacacctctggcctggaaaatgggttaagtttcccctttctagggttctttaccaccctgaacatacccagatcacactttatcatgattatctctttacctgcatgactgtgtagccaggatgagtgatctttgagtgcaggctcttaggtttttgtttatctatttataatagatagcaaaataaaaatagatccgttcatctcttcatctagcattttacacgtctatctttagcaagcctgtgatcagtttaaggagccacagcaaatgaaaaaggcatggtcccatcctcaaagttcacggccttgtgtgttgaattgatttttgtctcttgctacaaagaaaatagtagctccttcagtcttcatctccagatttctcagtgcttttctgttttcttgaaaagcagtagagcagataatttctaattgttgaggaatctggttcaaaatttcaaggcaaaaccgccccattcatgagagagaacattcaagtgacagggccttcaccattgcactgccctgctaacaggagaccttgagttgtggtcaagtcagcagattcttttaaattttgaaatacagatcttgcataatgaatggagaaagggagaaagaatggcttgtgtgcccttttgtgctccttgaagtttacattctgggaaaacatgaaactggagtgtcagccttggtggaactgagttggaatgctgactggcacacaaagggattctggtcctgtttaaccaagatgtgactttagaatactgagattgtatgactttatggatccccagaggaatagaaattcatgggccagaatgacaaacttttattttgaaagccacctaggctccacttagagccatcaaatgcttgagaatttattatgactgggcaagccactgcctaagagtcaggccagggtagtgaaaatacacacggactttgtctttgaatgacctgaatgtggcctagttcttcctagcacagggctctctaccagagctgaaagcacaactgttgcatttgcatgacatagaagcagccaaaagcttccacagtgaggatcatgtgtcgtgttgatgctgaggcatctcctgtgcatggtactgaaatcacagagatgacttatgatgtgttctgtttgtgttggcccaaagcccaaaccagaaatgtatttcaggcttggctttctagattctatctccagtcatgtaaaagttcattacgtggacccactcatcctgtcctgctatagttaaggtctgtcagcatttttcaaaggtttataattcaaccacaaaggagaatgcagtctttaggctgcaatgtgacctataaagcttaagccccggggtcagaaactttgcttttttgttgttgtttttaagttaggcccttactaagttatagtgaagcaaagtaatagctgntggttttgttattattatttggtttggttttacagggatgggaaaagcttcaagtgacttcttggaatgtagatgtaccctaaacctaaagagttgttaggactatagatttacttatcatcctagcattcagctaaagatgggggtttagtttttaaaaatttagcattttaaaattgggatggatgaggctgagaaagttagaaacaagattgggaatatttcaccaaaactcaaggaccaattctcaagccagaaactttgtattcaaaattctagttaaaagactttggtcatattatataaaaatcaagtcatttccctgatggttaagtttgtttctgctcataaattctaagtattcccacttagaaatttaagtgaaaagtgcacatatgataaatataaagtaacaaaatgataccttctcataataaaaacacttgaaaatttgaggtaaaatagatacaaaaatacactttctatgtctgttcagctgctataataaactaccatagactgggtggcttataaaacaacagaaacttatttcttacagttctggaggctggaagttcaagatcaggacaccagcatggtcaggttctccctgttgagggctcatttcctggttcacagacagctgtcttctcattgtgtcctcacatggtaggagaggcaggggatgtccctggggtctattttataaggggactaatcccattcgtgaaggtaccatcctcatgacctaatcacttcccaaggccccacctcttcaccctgagcattcaacatatacattttagggggccacaaacattcagaccatatatccacaaaagcttataatcagcaaaaggtctcttagagtaacctaatttgtggttactaaggatcccattaaataacctgctcctggggtaaaaataaagactggtaaaaatcatagcacctttggtgtgggaaggaggttttatctggatggtctcaagtcaattaatagtgggaaaagttcttaatgacagtatgttataaaatgcagattggcagtagggacaggagaagagtgtcaatggaactgagttccagtccaacctgtgtacagtctagctatgctaagacctctataaaccttggtatcttccttaaaatggggctggaaaatcctatgtatatatacagggttctggtgatgacaaaatgcaataatacatgtaaaatgcctgatagaatcagtgcctaatatatgtttttcccttcttctcccacctttattaattatacctgagacataaaacaatctaaatgctggagaccagccactctaatttggtagagatcttttcttaaaaggaaaaagtagtttccctgagcttttaagagtgcatttacatacaatttgtctatttgtaaaaaagacctattcattaaaataagcctctaagtagcaaagtgcaagttttcttaaactcctttgagtggcaccacatgctaactgggcttcctaaggaaagaactataaaggtggctgtctttccccattaaccctgatttatagggggttttgctctaagtgcatatttgcagaaccattcttaatgtgtgtgtgttctctccccaaaaaggaggcacattattggccatttgttgtctttggtccagtggatactctttaaacccactcttactactctgtagtcaatagcccaagctcagcttgatgcattagtccttgtgttttcaagaaaatgtgttcggccagcacccagcccagcacagcacttcttttcttttcacttttaaccatcatatcccctggtttccagcaggttcattcacccagaaaatgtttatcttcattgtgccacctcggtacttaacctggggcagaggtttggatactggggagtgcaagaggaagggttgggttggaggtgcggtttcactctttatcagttatgtgaccttaggcaacacacttaatgtctcagcattggtttcttcttgtaaacaagggattgtagtggagaatactcctgaggatttttgaggaataagttaattacagggtttaacaggaagccaggcaagaatcaggggtcaggaaatggtagtgatagttactgtagccaggtgttctcttattcactacacaggagaatcatttggagaagggcttttaaaaatgctcatgtctggattccatcctcgaacaattaaattagaatctctaagggtgggacccaggtatcagtatttttttctggaatacttttgatattccagagatggattaaatcctttaacccccacaacatccctaatgggtaggtatcattattagcccatttcacatttgaggaaactgaggcttagagaggttaaatcacagcaagtaaaaggtgatgctcagatatgaagccaagcagtctrgctccagagcccatgctcttggttggtgtgacgcagtctattattataagcagtgcctccagtgagatgtccggtgagaactaagatccagcaggtggggtcatccgatggtttcggtcccttcataccttcaggttacccacctcctgcttttaccttcagctctgtgtgttcaggacttcccagcagccctgtatcagataatgaactgtggttattcagaagtcccccgctattttcggctgattttattaaactcagcttgtggcttgaactcaagaatgtgcaagctgatttagattatgctttgcattgagtttattaagataaaaaatatttcccgagatagtgagtcagaagtatttatggtgaagtgtgctgaaagtgaatgcaggttgatagcgtgaacagaatgttctctccaagtcaaatgcgatgacctaactgtgtttggcagccttcctttatgtttagctaagcatttcatttcatgttgggaacctcctccctcttctgaaaagcatcagtcatgtgggaggctaggattttggcatgtgcctcttttgataccaagacccaggccctaaacctaattgtgactggctcctyggctgactggctgggttgccatggcaatggactgctcaactctttatatctcagtttctctcacctgtcaaaatgggaatataacacttggccccaccttcctccctgaggagagatgggggcactttgaaaattaagtaataaatgttgggaaggatttgtggatttgtggatgtgacatcttgtcaagtgggtaaataataaatggggtgtctccaaagctaatttgcctaaaattcacttgagccttccatttacttcatcaaccagcgtttattaaatgcctatgaagttcacaataacacatgaagtgctgaggggaatacaaaaaatgtaaaaaggaggaaatagagtctcaattcccagagaggtcataaamtaacttttttcttgcagtttgctttttctggttcattaagcctcagtacagaccatgcctgcactgtatttaaaaagctcattctcaatgatgacttccagttacgtcataagcaactagtggtgatttagttgttttcagtaccagtgggtattgtcacatgcttgatggactcataaaaaggcaagaatattttttagttcaggttatgagtggtgcaaaggacaatgaaagactacaggttggattgattgggaatctgattgcatcagaacataatatggtctctgctgttcaaaggcgtgggtttgggtcctggctctgccgctttctggctgtgtgactttgggaaattccttaacttctctgtgtctcagtttccttatctctaaaatgtggtcagttttagagtctacctcataggattgttgtcaagtttaaattaaagtgtgtaagatgctcagaatagtgcctggcattttgtaaatgctcagaaaaatgttagctatgatcatcactttccattgttaatgggagaagatggtggcactaaaaggatactggcatttcattttcctacattgtaaaggtaacaaatcctttttaattcagagtcctaaacttttgcccagatctgacacaatcgcttgggattgccccaaagccccaaactgcttgttcggaaatagaaaacatgccatccaagccactctgctctctgactcataccgttcagggcctgagctaacccattttgttctgaaagccttacaccagtctaggaccctgagggctgggaaagggcagctatggagtgtgatggaaacagcgctgggcttggtgtccaaatcctggctttgccttttattagctgtgaactctgggataggctgttaagtcctctgaactgcggtttacccatcctaattgtgcaaaagcaatggtgggtgaaactgctcaaacaaattcagacaatggcaccaacggtaccaaactagtgstcactgtacattccactgccatatacttgtagttgaaaagaaaaaaaaagccaattgcacttaagaatatcttccatggagcagtaaaaattattaattgtattaaatcttgacccttgaatacatagatttttaatatttcatatggcagatgggcagtatacgtaaagtactcctgccaagtactatgactgtctcaaagaaaagcatttgagttctgagctgaactagccacttttactttaaagaatgaccgacagaaaaattatggttagttattcttgaatattctttaaaatgaggaaaatgaacctgccgcttgaaggaaacagtagtattaattgccaataataaaatttgaactttccagaaaaagttagaattttgcgaaacttttagccaccatcacgagcttgacaacttcttcccaatcataactgatggcactggtggtgatattaatgcatttgaattttctatattagataagtaagggtgtccacattttgaaaacgaacgtaactcagtaaaccagtgttctctaaacaggcaatgcatgatgttacaaaatcgtatgtaggtagaataaccattcaaagtacaagataaatcaatccattataatttaatagattatgaaaagtttattgatatgatttcagatttcacattgcaaccaacgtttaagaaactaccacctatcgaattttggtgtagtatcaaagaagaatatcctaaattatctgaaagactattaaaaacccttcccttttccaactgtgcgaagccagattttcttcaactaaaacaacatacctcaacagattgaatgctgaaacaggaggcttcagctgtctggttttaagacaataatagatattcaataataaaaaaaaatgccacttttctcactatttttggtataygcgtgtggaaaatattattttactaaatattttattaaaatatttatgttaagcaatgggattgtttttatttttaaataggttaataaacaaatattttaaaactttctcccctcagtggcatcaatattttaaggattatctaggagtcctgagaccaaagaatttgagaacttctatcctacagcatggactctggagccaaaataatttgtttaaaatctcacttctacttactgtctgtgtgatcttggacaactttcttaccctctctgtgccttaccctctctgttttccatgtgtaaaatgttcataacaataactgtcatgatgataaataccatttaggtgttaggtattaccaccatcattatgaaatcattattgttgtcagtgtcatcatcatcattattactagtattagcactggaaggcatcatttgttcagggacacagagctagaggtggattcagtgggactggaacttttcccttaagccagactataccctacctcccacttaccatctgccatcttgacatttgcagtctagggaagaagggaaaaaaagatgagaaatcttccatagctcaagcacatatcatcagagctactgaatcaaaccattgaaaaaggtacaaacagccaggtttacacataaaagccagattgctttgtctggcattcaagctcactggacacctgctgcctgtcatccagttgttctgcagctgcccatatagaaacacaaactgtctcagaagaagcagacccaaccccaaaggcccagattatgaatccaaagcccrgggaggtgaagtgatggtctgacacacatcgctagagagtggcagaactgctacttgagtctagtgtgaattccctctggactggacacctttgctgggatgcccaggtgttctcgttctgcttactaagtaagcagctacagatggccaacaaatttgaaacttcttcttcgtcagtgaaaagktaaaaccaaattccctgtttgtggcaaggctcctttgttcagtaaacacaaagatctatttacatttcttttgttctctctggaaacacactgcttgggtcatctactacactgatttcaaggtgccctgcaaccctcatgttgtttttagatagatattttatagagcagatcaggtgaggtgcctggcctctggagggaaaccagaaagaacatcagccagcacccatggctaaagcttaggcccattaaccagacagtcttggctgaagttaggggaagagcacaaccctgtgggtatatgtgtgtccacggcccaccttggtttagggagatattccaactctccatgggtctcatggtaccaaatctcagccctcaatgggtctcatggtaccaaagcagactggtggagtgaaaagatttgggcttggcagccagagagatgtaaattggacctcagttctgccacaaggcctccggcaagtcactaaaccactctgatcctaggtttcctcattgtaaaacagtgataatgacttctcccttgcaaagttagcatacaggtgaatactaaagtaaagccctagcatatagtaggatttcaaaatagtccattattggtccagaactggccagctgcctcaaatggactttctttaggtgcttggctgagcctgaggattaaaggccattagtgatggaagctttgggcagtttcctgagtaaccatggggcaagtctgctaatctctgagacatgacttcctcatctgcactggaaatcatagtaattaatgtgcctttcttacttctctagattgttagaggataacaggagacagaggctgtgaaaacattttgtcatgtgaaaagtggtatacagaagttattgttataaaaacaatagtaacaacattaattaacatttttgagtgcttactttttgccaaacactggttgaagtgcttcccagatgtcactcactttcattttaatcctcttctaacagttccctcagatggagccctgtttattattttggtttttccgttggttaaactgaggtacaaagaggttaagtaacttgcccaaagtcacacagataggcaaggggctgacctgaattcaaacccagccaatcaaattccagaacctgtccaatgcagtattaatcactatgcttatagtggcattgttatgtgattgctatctctaagtttctctccacaaagggtacatagttatctattctcaatgaatgatatggggctataaaggcatgataatggctccatagagccatctgctaattagtctccctcctttctgggcatacctcaaacatcttaggaacatatgtgcttatatccatgagcaaacacattcgtggattgagtatagatgtatatagattggagaaacatgcccaaagatagagatcaaaatataaatgttaggaagcaaagcattagcaagatcatttatgggctcatgaatctgttgtgaaggataattattcattggcttaagtgagatggaaagtgtcattatggtaatgcagtagtcatgcttaatctgtttcctactgcacatgtgataaatgccattcatatgtgagacacactcctgtgaggctgcccagacattaacaatgttccttctgaatttggggggacggaaattaaagcaaataatgaatcaattatttttagcatttatgaactcattttacagacatttgggcaattaaattacccggttaaatagctcagaaaaatgttacttttcaataaacttccattaaattcaacaaatttgtggcgttctacctgtgctgtccagtacagtagccactagccacatgtggctatttaaatttaaaaattcagttttcagttgctccagccatgtttcatgcattcagtaagccctgtgtgactagtggctatcaatcagacagtgcagattatagaacatttccatcatygcagaaagttctggtggataacactgctagacagtagtatacactgaggatgcagtgatgaccagaacattcccatccctgcccttatggggctgatagctctgctgaacaagttaccccagacttggacctacggaaggacataggacaatgagaaagtatggcaggggatctatccaagaaggggtgcttaggaaaaatgaaaccaaagaaagctccctacccatgaataacagagcacgtttttaaaagaaatcaaacttaattaaaaataaataaataattttatctgcaattggattctacaactaatattaatattgatgtttaaatacttgattgaagaataagcttaaataaaacttattttgttattaaaattcatagtgcaataaatcttaagaggagccaaagcaaaatatacatgcagcatgattccatttatatgaagttctgaaacaggcaaaattaacctatggtaatagaaattagaaccttagttgcttcaargtggggtgggagggagtggttgggagcagggaccaactacaaaagattgtgggggtactttctgggttgttgatgttctatcaagatagggacatttgttacatgagtatatgcatttgcctgtactcatagaactgtataactaagatctgtatattgcacagtattgtatatgaattaatctatatatatgtgatcaaaataattacatattgtaacatgttatggttgatatcagtaatattatggaaatgtccattgctttattactctgtctgcctctgacctggccttcataaccttatattgtcagtaacatgaaagtttcaggcatcctttctgatcttgtgccatgtggatatgaatgtgttgctcctacttttccaatttttgatgctttctttcttatcaaaagtgagcaaactggaaggatgtttgccaggatgttaaaaatggtgttatttttgggtggggagatttgaggtgaactttattttctctcttttgctatgctggaatttggaacaaggagtgtatatgattttttgatctgaagcacaaaagcttatccatgtagtcttttggagactttgggttctatactctgattagtgacaaattttcttccaagcagcaggctctatgggtggttatttagcagtcctctggtcttaatcaatgtgattgtttctttccttgtctgtctcacctgcctctcctgctcagcctctctgtgatcccaagggtacactggaggggatttggctgcttggaagccctctcaagctgtctgcccctctcacctgcctcctctctgtgctcacagattcttacctgaccctygatgaaccaatgaataacatcaccacgtctctgggccagacagcagaactgcactgcaaagtctctgggaatccacctcccaccatccgctggttcaaaaatgatgctcctgtggtccaggagccccggaggctctcctttcggtccaccatctatggctctcggctgcggattagaaacctcgacaccacagacacaggctacttccagtgcgtggcaacaaacggcaaggaggtggtttcttccactggagtcttgtttgtcaagtttggtaagcagacccctactggggatggactttggccctcagcccaatgtggtaggatggctagagtccacagggacaggaaggaaggaatgcacacttagtgagaatgtactctgtgcccacaaccctaaacctggtatggttgtacccattttacaaataagtaaactaaggcccagcagttagttaccatgttacccagctagtaaacagcagagcaggaatgaggtccggatctttctgacctcagagcccctaattgaaaccatcgtgccgttgagctcttttcaacaaggatgcttcttgtccaagaagttggaaatgttcgcagcgtgcatggcccttttcctgccatcaaggactagaaggaagccccactcactgttgcaatcaacaccttcatgcaaccactcagcccattggaaactccctgcatagtttgaagatgcttactcgattaactctttttttagcacttgtcttagcattttcaggccctgaattgtgagacatagacacgttctcactggtattttttttttttttcatagagatggttgggggaatagagcaaaacaataaattccagaaaaataaatactacctctgggtggttgagaactttaatttgtaatgatttgactgtatccatactcaccctccaataacctagactgactgtttcttttgtttttctttcatttcttcaggcccccctcccactgcaagtccaggatactcgtaagtacttttatctcctttcttgtcatttctaagtgtttctccgtggttttctagggcaaaagcaatgttgtcctcttcttaagccaaaatactggcttccagatgtcattccattttgccctgccctcattccattttgcttgttctctgctctaaagattcacaggagaccaccattggcagaattctcaagtgtagtaatgttgattctgaatgatcaaagcaaaaatcttccatttactgttttagaaggaatctaacatttagtggcaacaatggattgatttggtaaaatcaaacaaaaaatgatatagtgctggcataggaacctttactctcagggtctatgtttctgcaagcatttttgatgaattcattattgatcagggcaacaattaggtaatcactttattttttattccctttaaagaactcaaaagcagaagttctggctgggcgcggtggctcatgcctgtaatcccagcactttgggaggccgaggtgggtggatcacgaggtcaggagattgagaccatcctggctaacatggtgaaacccgtctctactaaaaatacaaaaaattagccgtgcgtcgtggtgggcgcctgtagtcccagctactcgggaggctgaggcaggagaatggcgtgaacccgggaggcggagcttgcagtgagcccagatggcgccactgcactccagcctgggcagcagagtgagactccgtctcaaaaataaaaaaaaaaaawaaaataaaataaaataaaataaaataaaaaagctgaagttctaacttacactgggaaagaaagtcccaagcttggactgagagttgcatggaagtttgattcattttgagtccctcgttaatggagtctaaaggtccaatttctttcactaatgctattgttgatgcgtttgtcatttgttctggctaaaggattctcatctttcactttaagagtatctacttggggcatttttctttatctatatttttattttgggggaaggacccacttattaaaactcttactctacaaaaaaaaatcctcaatactctgtagacttttgaaataaaatttttgtggctctgccacaagagcatcaaaatgtttgatctagactacacctatggcaaatataacagccacttaatttgctccaatcccctctgtgccacttaattacagtgtggggtattttaatacatttgtgtgtgcctggaggcccagtggcccacaatcccattaatgaaataggtaatgggtaaaaataaacattggccttcagccacacagttctgctatttcatcagccagttaaaggcaactgtaaaagagtctttaaaatcactcaagtgctaattgcattctacttgcccaggtagaaaatgctgattgatcttaaaacaggtcagaaatttggtcactctgccttgcatttcttgatgctaatctgctttttttttttttttttcaatggtctcaccattggttatatgtggaatccttttgaagtcttagttaaacaaagatgaaaacttttgttacttgtaaaaatgtctcccaccctggtaccttatttgttcctgttaatctgtgtttcaaatgtggctgataatctatatcccaggctgattaatgtggttcactaatctgcctttactattaagtactgtgttgttgactttcagcctgttgtatttgcattagagttctttttattatcaaaattatgattatatccttctatgttcttcttgaagttttcattcttcactgctgtccttctgatgaacccagtctaggtctctcgtggtttttaatwttatacaaagattttatacccctgttgtgaaccgatatctatggagagggtattgaagttccttaaagatgctcaaccacagctaaaaagtatcctttgatatcacgcatctctgttttatattagctgtcagattatctattacattagtcggtaatagcatgaaatgtatagttaccatgtttgcttgcagggagttacaataaaatacaattcaaattggaaatcccatggggccttttgcagttacatctccattctgtttttggcattcctagttggcattttggtaccttttttttttctttcccagtgatgcatcctgctctttatctcttctcttaattgccaccacttcccctgtctctaggagttcttcacttcctgagactaactcccagaaagaatgctggttcccatgcctagcttcggagtagccctcaataggcagccaaccttctctccaaggggacaggcagaagataacaaaatgatagccatggggaatatcataacattgaggtccctctaaaggttgtttgtcaaattgtacactactatttccaaaagaggaatgaaatacagttataaattgctctgtttatttgaaagtggcacagagttactgcaaaagaaataaaaggagcatctatgacccaactctaacattcagaacgtaaggactgtgaaatacattagacatatgaaacctggtgagagctgaggtccactgaggyaacagggctacacaactcctgcctgggaagggcttgtagggacccttgggactatggcccagaaaggcacttgtcacttcctctgagggactgcatcaggtttccacatgaagctttcagaatgatattttagtttacagtaggaacaagcttgatattttcgtttggtttccgttcatagatttaggcttcatttcttctgtcattgctgggtcctggctacccctaacacttataggacctggggcatgagtacaagcrgaggttcacataccatatgtctaaatatttaaaagttataaatcaagctagcaacattgttgaataaaatatgttctatcttcccacagtgtcaaatatacctttttaacgttaaaattttaaaatacatagaaagttgtggtgtgttttaaatgattaagagccaggaactatgaaaaatggctattttaatcattgttatgcatgtctggatgttttgttcatgggccaaagatatcatatataattcatagattgttatatattagttccataaaaatttgtttgccttcctttcaggaaaatgactacctaagttgttttatgcaagatttttacagtgtatattctattgayaacatcgctaaattagacaaatttgtttttctttttgttttattttattttattttattttgaaacaaggtctggctctatcacccaggctggagtgcagtggtgtatgatcttgggtcactgcaacctctgcctactgggctcaagccatcctctcacctcagccttctgagtacctgggaccacaggcacgcactaccgtgcctggcaaatttttgtatgttttacagagatggggtttctccatgttggccgggctggtctcgaactcctggcctcaagcaacccacctaccttggcctcccaaagtgctgggattgcaggcttgaagtactgcacctggcctgaacaaatttcttaagtccttgtcattcttgcttttttttttggacaggttctggctctgtcatccaggctggagttcagtggcatgaccttggctcactgcaacccctgcctctgcattcaagcaatcctcccacctcagcctcccgagtagctgggactacaggtgccagccaacatgcctggttgtaattcttacactgtaaaactaattttaatttggagaaacttcactccctggagccagtggcagctatagttatcaataaaattcctaaagtgatacttaaatttggaaatgaactaagaattatacatgccatgttcaaacacagaaatggaatcatatatgacaaataatcattattgtagaatatattacaaaatattacaatttaatcatataaatcagtatcatacttcatacattatcctaggtttgtacaaatttaagaataatatgacttgtttaatgtgttaattttcttgggctgctggaaagtatcacaaactgcatggcaaaaacaatagaaatttagtatctcatagttctggaggctagaagtatgagatcaatgtnttcatggggttggttctttcttatggctatgaggaaagatttctcctttccagaagtgtgtcagaatttttccgtattcattggcttatagatgcatctccccaacctctgccttggtgttcacatgatagtcttcctatatgtgtagcccttaatttccccttttcataaggacaccagtcatactgtattgggatccaccgtgacgacctcattttaacttgattacctctgtaaagacctatttccaaataagatcacattccaaggtacctggaaattaggacttcaagatacatatttgggaggacatggttcaacccataacacttgatattgcaaagtttttctcagccatgcaaaactcttgcaaatgttattctaatgtgtgagagctttcagaagcgctggttggaatataatgaaaatagatgtttggtaatattgggaatgatagtttgttgtgcaagaatattttgcattcaaactgagagaagaatttgacacattggttaatttatcttttctcctgctgaagtggctctgccastgtagtttctcctaggctctaagaagagtccatctcctccactggcagtgtcacaatacacaaaactttgacagtatgcagttgtggtcaccttctattccaaggacagagggcaagacatgtagagaaatgttccctgggccagaacagtgctggtcacaaaaatagatgtctaaggttttgattacattgtgcgagcactcattgccagatcccaagaggcaaagggttccatgcgtactctttactctcattacatatattccctgtgtattttttgtatgtaggcccagggccaggacctttctctctttttttaataacagttttattaagatacagttaaccataaaattcactgttttaaagtgtgcgactcagtctttttactatattcacaaaattttgcaactctcactactatcttattttagaacattttcatcatctcaaaaagaaacttctcccagctatagtagcttctaatttacttcctatccctatgaatttgcctattctagacatttcatataagtagaatccgacaatatttgtccttttgtgtttgccttctttcacttagcataaggatgttgaggttcatataaattatagcatgcatcggtgcttcatcctttttatggctgaataacagtccatgcatggctataccacatttcgtttatccatttttctgttgatggacatttgggttgcttctactttttgcttattctgaataatgctgccatgaccattcatgtgcattgtggggtatgtgttttcaattctcttgggtatatacctagaaatagaattcctgggttatatggtaattctatgtttaactttttgaggaactgcaaaactgttttccaaagaggctgcagcattttgtatttgcagaaggatagtatatgggttccaatttctccacatgctctccaacacttattttccttatttaaaaattatttatttatttatttatttatttaaaatttattatagccagccgggcgcagtggttcatgcctgtaattgcagcactttgggaggccaaggcgggtggatcacctgagatctggagtttgagaccagcctggccaacatggtgaaaccccgtatctactaaaaatacaaaaaattagccaggtgtggtggcgagcatctgtaatcccagctactcgagaggctgaggcaggagaatcacttgaacccaggaggcagaggttgcaatgagctgagatcatgccattgcagtccagcctggccaacagagcaagactctatctccaaaaaaaaaaaaaacaaacaytattatagccatcctcgtgagtgtgaaatggtatctcattgtggttttgatttgcattttcctaatgactcatgatgttgagcatcttttcatgtgcatattggccatttatgttttctttggggaaatgtttgttcaaactttttacccattttttaaattgaattaattgtctttttattcttgaggtgtaagagttacttattttgggtatatacccttattagatatatgatttgcaaatattttcattctatggattgtcttttcattttcttgatagtgttctttgaaacacaaaagtttttcattttgatgacattcaatttattacccattctttggttggttgtgattttgaaaaccatcgcctgatgcaagcgtacaaagatttactcctctgtttttttcctaaaagtttttatttacagttttagctcttacatttaggtttttggtccatcttgaattaatttttgtatacagtgtgtgaggtgggagtccaggttcattcttttgcatgtggatatcctgttgttccaatatcatttgatgaaaagaccattctttacccattgaattgtcttggcactctgttaaaccaattaaacatgtgtctatgtgtctatccctattcagttctacatagtcttgattactataggtttgtagtaagttttgaaatcaggaaatatgagtactctgtattagtattccactggagaaacaaaaccagtaaaattgtgtrtgtatacatatataaagagatatattacaaagaatttgctaaaatccttagggcagggagccaggaggcacaggctgggaacttttgggcagttgctcatgccatagtccacaggtagaatttcttcttcctcagagatacctcttaaggcctttcatctgattggatcaggcccacccaaactattgaggatgacctcctacaaccagtcagttgattgtagatgttaataaaatttataaagtactttcacagcaacacctagactagtgtttgaataactcaggactgtaccttgccagttgatatgtaaaactagtcatcacctctttctatattgttctttttcaagacttttgttgttgttgttattctgagtgctttgcatttccatatgaattttagggtcagcttattaatttatgccaccaaaaagtcagctggaatattgataaggatggcattaaatctgtagattaatttggggagtactgctgtctcaacagtattaagtcatctaatccatgaacatgggatgtctttccatttatttaacttctctaaatgatgttttgtagattttggtgtgcaagtcttgctctcttttcttaagtttattcttaagtatttgattatctttcatgctattggaaatggaattttttcttaatatcatctcagtttattcattgctactacatagagatacaattaatttttgtatattgatcttatatcctatacccttgctaacttgcttcttagctctagcagtttttttgtgaattctttaggattttctatctacaagcttgtgtcatctgcaaaaagagattgttttacttttttcttttcaatttgggtgccatttacttatttttcttgctttattgccctggctagaaccctcagtacaatgttgaatagaagtggtgagagtggacatcctgttttttttttaccttatctttagtgaaaagatttcagtctttcaccattgaatatgatgttagctgcgtttttccatagatgccacttattagattgagaaaattccctattattcctattttcttctatgttttttactatgaaaagctattggattttctcaagtgctctttgtgtgtccatttagatgatcgtggtgggtttttttttttgtcctttattatattaatgtgatatatcacattaattgatttttgcatgttaaaccaagcttgtattagaataattcctacttggccatggtatataatttcttcttatcttttgctggattcagcttgctggtattttgttgaggatttttgagtccatgtttataaaatatattggtctgtgctttgcatttcttgtgatagctttgtctagttctgatataagggtaatattggcctcagaatatattgggaagtattcctttttcttccattttttaagaagagtttgtaaaggatttttatttaaatgtttggtataatcaccagaaaagtaatctgggcctgaattttcatcatgggaagttttaaaattactaattcaactttcttacttgttataggtctatttaaattttctgtttcttcttgagtcagttttggtagtttatgtctttctagaaatttttccatttcattgagattatctaagttattttattcctttatcattcttttaatttctgtaacatcattaatgatagtcccttttttattcctaattttaataatttgtgtctttttttttcctttgtcagactagctagtctaactaaagatttgccaattttgttggcaaagaactaactttcgttgaaaactggatattgaaatagagtattgtgacaactgtggaaatcagattgcctctcctctgatgttgctgtgtgttgtttttgccgtttgtttggtgaatttcctgaattaattctgtatagtctgtattttctgtcatgtactccctttaaagagagaagtctcagccaggtgcggtggctcatgcctataatcccagcactttgggaagccagggcagctggatcatgaagtcaggagttcgaggccagcctgaccaacatggtgaaaccctgtctctactaaaaatacaaaaattagccaggcatggtggcatgcgcctgtaatcccagctactcaggaggctgaggcaggagaatatcttgaacctgggagccagaggttgcagtgaaccgagatcattccactacattccagcctgggtgacacagcgagactccatcttaaaaaaaaaaaaaaaaaaagagatgtctctactcagttagcctagtaactagttaatgattggacagaaatttccttaaaccagtaagtctcctaccctttgccaagaggtttaaggaaacctctgtccagtcattaactgatcactaggttaactgaggaggtccaaattcatcctgcctcctctagtgactgctggggtgctagttttcacggttaccacagaacttgagagaggaaaatgagaacggcaaattaaaatgccataaaattccattcttaacaagcgttagtttttttttcctatatatccactccctcacctatcttatgacatatgagaaatcctaacatgggacttggtgtataattagcattgaatgaatttaagttttctttctttctttcttttcttttatcttctgtggtctcctgcagaatcagtctataaaaagggcatggtaaaaaaaaatctatctcatagcattgttgaaaagattaaatgacataataagatgatgcatatatagtagctagcactgtacctgatgcatattaggagcttgataatattactaacantatcatcatcaatgctatctgagcaaagaggctgttccttctttccagccagagttcttctgttggataatatttccagctgtgaaccccaaccagagaccttgaagcctttatttccttttctctcattggcctttggctgaagtctcctttctgcagagaacaaagtgaccagcttttgatgaactattttcctcttttatccatttccaagtgttagccatagtgaagaagtgtagctgggtgctagcccaactcaagaagtgataatgtaatatccaacccaagataaactcaaggataactttcaacacggctactcaagcagttcaggggggaggcatcttgtagagaggagaccaggaagtcacttggcagctgggccagcacacagagggccattgctccagtaaagcagctaacctccatctcttcatcaaaccatcctagactcagcactctgcagagaaggagcagatggagggaatgtgtggagagattagataagaaggatttctaatctagtgggggagcgagtaaaatgtacagaagtttgagaagccaagctcttatgtaccaatccacccccatcactcaacaatccccactgtatgaataaagcctggaaagtttccaattaaaacagtgcttgtgaatattggcaaggggtatctttgtgtgcagggtacatttaaagggagaagggtgaagatacacccttgccttctaggagtacactttctgagagcttgttcaccaggctgtgagtttctcagtctatctgtttctcagtctgttagtaatgaatgtatctcccacttagcacagcagctagcacatagtagatgcctaacaaatgtgtgttaaattgaatgttggaagtctgtgtcctgaaagcttttcttcacatattacaaggctttttatttgttcaacacatttttaccaagtttttttctgtgttccaggtcttttgattagctgtttttaagtcacagaaatgggtgtcgggaacaaaaccagtcaaaagtcctcattctacatcatttacactttcccttcctatatttataagttttaatatcagcttctacaataggttccagaacaagtggtgctcaaggaatggagaaaatgactattccaaccctagctgtaggtgaaccaaaaaccccagagaaatcaaagtgtagtttaaagcagtgcttctcaagttgtaatgtgcatatagatcacctggggttgttattaaaatgcaaattctaaaagagcaggtctgggagtgggcctgggactgcatttcttacactttcccagggggtgctggtgctgctggttcacacacttagagaagcaggggtttagagaagaggtgcctggccagatgctagttctttctgtgtaatttgctagttcactagccagtgaccctgggcaaattgcttactttctctgggtcccaagtttctttatttgcaaagtgaagcacttgggcttaatgtcttttatgattttttttctatctacatttgatgactaactgaaactcaacatttcctctgttatagtaagatcttttcattgctgtgaatttcatgcaacttgctcctagattctctttctgtaccctgaggtgttaatcaccctcttttatctgtcaggcgcttctatcctgtgcattctaaacaagatcttatctagttactttcaaacagtgtgaaagatttttacagggaactctcacctggaaactctccctcaaattctgaagtggctgtgatattgtgcgctcctgggtgcagaggaagttactgctccttttgctggtcagtagcagactctacttgcctcctgttgaatagaacagaattttcttgccatatttcttcactaggctcctgctmtgttgggtgactgcctgtgttttgaattgaatgaaaggattgtagcaggaggcagtgcagtggtggattcagcctcttaatgtcttcatgtgggtgttttttgttgtttttgttgttattgttgttgttgttgttttagatggagtcttgctctgttgcccaggctgtagtgcagtggcacaatcttggctcactgcaagctccacctcccgggttcatgccattctcctgcctcagcctcccgggtagctgggactacaggcgcccgccaccatgcctggctaattttttgtatttttagtagagatggggtttcaccgtgttagccaggatggtctcgaactcctgacctcgtaatctgcccacctcgacctcccaaagtgctgggattacaggcatgagccactgtgcccggcccatgtgggtgtttttaaagcactgacctttttgcctgactggtaggcccagaaggctgataagaaaaacaagatttctggctttgcatgtgtgacttgtgaatgcaggtccattattgattcatcacgtcttgtacactcatagagctttttgagggaaacaactgaacctcacaacaaacatagctaatgaaatgttatgaataatcttgatgatgttaaagggtggctaagcataatgatcagttcttcacataaatattgtatgtaattagccttcgactttgtagggtaggaaagacactcccctaccctcttaggttctgtggctggagcctatgaaatgaattttgaaaagacagattaacaaaagaaaaaacatacacattttatttgatgttaatatttttacatgacacagggggtttcttagaaagaagtgaaaccccaaagatatggttagacccaggggctcatataccattgtaaccaagaatgataaattgtggagacatgatcaggcaaaggaaaaagaggtttgggatagggtggtaaattgtgggaaagtgactagaaaatgcatggaggaaactaatggaaaaaaagtgttatgttagcaaggtttgtttgtacagattcctctcatcgtcaactcattatcttctgtggtatgaatgttttcttcttcgtggtttagggaggagatctttctcacaggaaatgtatgccctgacttttgatagaaaggaggaagacagcccttcctaaatcttttgtttctcagttgccttcagcccaaaatagtgaatatgccagtgaatcataatgtgggatggcatatcctaatcccctccaacttcttcagtggaatgtgcaggtttcttccttctttgttaagcctctggcttttttcagtgtcagtgttgacaattttatctaattgctctcctcttttttaaaaaattatttttaaaaattaaagatcatctgttgctgtcctctctatgtctctttctctgtctctctctctctctcccatacacacacaaacacactcattcacacagtcacacatgctccagaagcaacaacagctgggttctcattatctagggcagtgcttctcaactccatctccaccttagactcacccagggagctttataaattacctgtacctgggctacaccctagataagttaaatcagaatctctcagagtggtacccagtcatgatattttatcaaatcaccccaagtgatgtcatgtccatgcaaccagataggaccctctcccatcccccttctcacctgaaaggaacttgcattagcccagctctacctttctctctctctctctgccccagcaccatattgtagacaccaaaggagttgcagcmgcagawactgtgcctggatggcaacatgcctacagcatcatcaggatccaatcaggaaagcagaacaaattctggactatttaacacagagaatttaacatagggaattggttacacaggtgatgaagtttgccaaaaaagcaaacaagaaattgtgatgcagcatcagcaacagacagaagccccagctacacttaggttggagggaaaaatagaaggggtaatattaccagagcctaggtttggggtcatctttggaggctggaatggtggcatgtctgttctgtgggcactggagtcatgagaagatgcttccactgctggggttatcacccaaagcaaaaagaaatgggagaaacaacttggctgctgtcttccttcacactttcaaatgccagccagtttctcccattaggggaatgctgcaagaaactatatgacacagggagcctgagaatcacagcctgcagaggtcatctgccttgcagatgctgacccaagcaggaaacgggcaaggaacggatctgaagacaaataggtgcagcaacagcactcataccccagattgatttccatgccactagaaagccgagcctgcagacagccttgaagaaacaggctggggagaagacaaagcattcaaagctgcaattcctgcccaaccttcaggtagaacattcagtggacagtttggattgtggaactgaggccyggagcaaaggtcaaggctgagggggcagacatggtggtacatttggctaagttggtggacaaactttgaagggagtaaaactccccaagagaaactaaaaaggaacaagaataagcagacctcttttatttatagtactgtctgtaattttcagaatattttttcttttctcctttgatcttagagccatctaatagctttgactagataccctggtatttttgttttctatctagaaaaataaaaaattgataaatcatcatacccttgccctttatcataacaagcactttttaattgtgtagaggggtgctctgatctagacctcaatatttatgaacttttgaaggctgaaaatggagacagtaaacttctagatatttgcttcctgggcctccaaagacagaatttgctaactgtggcaaacacttactaagtgctactctgtgccaggcctttttataaaactttgcacaaaaactaatagactattacttccccatttactcacacaaggagactcagcaaaggatgaagctttgatttgagcccatgyaggtggactccagagctcagactttggccagtctgctataccagctgtccttattgtggggagatgatcagttgatgaactcttacctgaattacaaatttagtcaccttaagtgtttgattgctgaaaggactcacaacactcaaatggtttatcctcatggggtagttttattacagacaagggaaacagtacagcaacagcagaagacagataggtaatgcaggggtcccagagatatcagatacaggcttctttatcctcctaaaactgggttgcacagggcactctatctccaggtcttgaaggtttactggcatacatgtgcagaacctcagttccaagaagtccagtagtggaggtcacttatagtgagctgatcacatgggcacattccagctgtgtgacatacacttcagtgattgaagccccaggactccactgaaaccaggtgcaaatcataccatccagttattattactaaataatgctaactgactcatacatcctaccccaaacaacttgaagactcatagtttcagagcatcatttatctttagtaaatacatttmatagtgattgccgatagttagtggttctgaagattagtctgggrtcaattcaggccagctgggatcaccctgtgcctttcaacccgcttggccttgcttagtatgtaagtcaggaacccactcctagaacttgaacaatggtaaagtcatccaggtataaatacttgccactgggatgggacgtgttccatagataacagaaaagttatcatggttcagtcattacaaatgtctattacttcagtggatggcctggtatttttgtggccagcttctgatgtccttgtcttctactcattattctaagactgctgggtagctgtcctatgtgcttacatgaaaccccaactttctctcaaggccgttaaaatataacatgatgagtgctgtgatacttatctgtgtctctagagcagcaatgctgtccactagaaacatcatacagggcacatatgtaattttaaactcactttttttttttttttttgatatggaatctccctctgtcgccctggctggagtgcagtggcgccatcttggctcactgcaagctccacctcccaagttcacgccattctcctgcctcagcctcccaagtagctgggactacaggcgcccaccaccatgcctgactaattttttgtatttttagtagagacggggtttcaccgtgttagccgggatggtctcgatctgacctcgtgatccacctacctcggcctcccaaagtgctgggattacaggcgagagccaccacgcccagcctaaactcacttttaagccacattttttaaaggctagtcaaatgaagcagtgagagtggagaaggaacaaagaaatttgcaattgcttgtgatcaatcagttgtaaacacgatggcacttggactagccttaagatacattttaaaaagttaaaagaaacataaaattaattttaatatatattttatttaacccaacatatccaaaatattatttcaacatgaaatcaatataaaattattacccgctttattcagatataattgacaagtaacaattatatataattcaggtatacaatgtagtattttgatatacatgtacattgtataataattattataatggaatatctcatatttttttttctaagtcttcaaactccagtgtgtacctgtagtttatatttacaggacatcttaattcagatgctaaattttcatggaaatacttgaggccaggcgcagtggctcacgcctgttatcccagcactttgggagactgaggtgggtggatcacttgagcccaggagttggagaccagcctgggcaatgtggcgaaacctagtctctaataaaaatacaaaaattagcctggcatggtggcacatgcccgtagtcccagctatttgggaggctgatgtgggaggatcatgagcccaggaggcagaggttcagtgagccaaaattgcactactgtactccagcctgggcaacagagggagaccctgtctcacaaaaaaataaaataaaataaaaaggaggcctgtcgcggtggctcacacctgtaatcccagcactccagcctgggcgacagagcgagcctccgtctcaaaaaaaaaaaaaaaaaaaaaaaagccatacttgatctgtacttatattttataaaatgaataattaaaaacataggttcacattcccaagttatttcaaatatactcaattttctagtaactgaatcaaataccaaaacattatttttctttcatttttgcatccacattgacaaaattggttcatcatttttagaataattgaattgactttgaaccacaatgtatcatttttcaaactatttctatccaagttaaataaattcttttttttttttttttttttgagacggagtctcgctctgtcaccgaggctagagtgcagtggtgtgacctcggctcactgcaagctccgcctcccgggttcaaaccattctcctgcctcagcctcctgagtagctgggactacaggcgcctgccaccgcgcccgggtaattttttgtatttttagtagagacggggtttcactgtgttagccaggatggtctcgatctcctgacctcgtgacctgcccaccttggcctcccaaagtgattcactatatcttgtatcaactcagtattatttatatcaaattcaaagggatattgcataaattgaaaagcaacactgaatttatcaatgtcaacaaaacatttaaatttttcttgcagtttatgcaggcaatttacaaaatgctgtcaattacaattaaaatcttcagcatattgatccgtgttaaatgtctaaaaacgtcatgattgtttatttgtattgtgaaaagcctcagttccaacatacattcttatatctgtctagctaggttacaataagcttttccttttcctggagctgcatattaagtttgttcatatgcaacatagtatcagtgcaaaaatgtaaatcatattgccatttttttttactttgattattatttggcaaccatccttccatttcaagaaagtcttgaggtggagttagcagtgcagtaaatctttgtaaaactattctacagtcaatcagcaagcactggcaaagaatataagatcattaaatccattgcctttgatttttttcaacatctctgcaaactgtcaatgattctatttgcacatatatatgaaatgattttaacgactgtatccatgataccttaatttataaagtctgtctcagaaaactgagcacatatattttcagtttgtgtcacaaagtacaacaaagcaataagggaaccatcagtattgttttacaattccactaagtctagttttttgacctaatggctagagtaccatccattgtgatagaaatttttttttcatacctaactgaaattctttgacagatgtaggagattataaagtactccacaagttccgttttacaggctgcaaattgacatttctttgtgaatttggaagtcctttaaagtaaacatacccaaaatatatcttttcaagtttctcttgtatgtcatgcctcatcaaaaactgaagaaaagtttctgcaatttttcaaaattttaatcaattgattttatttttatattctataagctaaataatagctaaaataattatttcttttaccatctctgtatctgaaagtggttttatagctgtacaaagttgcaagcacagattctgttaaaattgtgtagacttttttttgtaggacatttatttaattctaatttyaggtgaccaatttcatcaattttttttaactggtggcggggggaactttaaaaaaaaaatcaaaatcactgtgtatttgctgaaaagggtctctttattattgtccactttattatctttaaarttctttttgcacaacaaacttttttgtgatgatccattatgaaatttgtggcatatcttcttcccgtctcttttttccattacttttttgtttcggagagactttccttgcctcaaacactacagaactcgtaacttctccacaatagtacatgtttgaatcaattttctgtttagggctaaaaatagaaattcagaaaacaggagcagcagtctgataggatttcaaagcagcattcagcagactacatttcctcttgggttaaatgtgtgtgtgtgtgtgtgtgtgtacacgtgttcatgtgtgtgattgggtgatcatcgtgattaaagagaaagggtaaattgcaaaaagaaacaccacgaagttgcaaagtaaaatgttattcttttagattagggttaattttgaaacagcccaccactctagcaggcagatccctgcagaggttcatgacaatgggagaaggcagccagcgctgcagaggagccagggaggccacaactcctggcccagtctccaagtaggtgtgggtacctggctttcctgggaaatctccctttatttttattattattattgtggtaaactatacatgacataaaatatacaattttagccgttttaaagtgcacagttcagtggcacttagtacattcacagtgtggtatgatccttaccactgtctagttgtagaacatttttattactccaaaaattcctcctgtacccattaagtggtcactccccatcttttcccactcccagcccctagcaaccactaatctactttctgtctctacggttttgtctactctggacatttcatataggcaaatgatcctgcctatgtccaggatccaaatgacaattcatataaatggaatcatacacagtatgtggccttttgtgtttggcttctttcacttagcataatgtgttcaaggttcatccatgttgtgacctgtgtcttccttgtgttttgatgaccttgagagacttcctggcatagcaatgaggcctggcattgaagccatgcatacctggatttgaatcttgtcccacctttaagcttcagttttttgttttgttttttgagagagggtctcattctgtcacctaggctggagtgcagtggtgcaatcatggcttactgcagcctgaccctcctgggctcaagtaattgtcccaagtagctaggtctacaggcgtgcaccaccacacccagttaaaatttttttttattttttatagagatgggatcccaccatattgcccaggctggtctcgaattccttgcctcaaaccatcctcgcacctcagcctcccaaagtgctgggattataggtgtgagccaccacacctggcctatgctttagttttttcatctgcaaaatggaaatgatattcatctcaggaatccttgtgggggttcatttgctcattcaaaaaatagtgatggagcagccactgtgtgccaggccaaggcttcacggatatagtggtgaacaataccaggcaaactctttgtgctcatagaacttggttctatcaggagaaatggacgataaacatggagaccaataaataagataggaagaagaaagtctaatgtgtcagagagtaatgtctgggggtaggaaatgggcaactttaacagcttggtgagtaaaggttttctgccaaggggctgacatttgagctgacctctgaggaacagagtgagccaggcttgcagagagcaagggaaagaaagattattctaggcaaaataacagcaagaacaaagaccatgacatggaaaatggttttgtcacgatcatggaacagaaagaaggccagcgtggccaaattggatgagcgagttgtgggaagtatgacttcaggttagaaaggcgagcaggagctacgcgttacttagctgtgcaagccagtgtttgggcttcattccaagagccatggaagccatgggagggtttcagctaaagaggtgatgtgtcctcatttacaatgggaagagcactctggcatctgtgcggagggtggacgagagtatgagcaggagctggaagagcaataaggaagtttttgcactagtctagatgtgaaaataggtggtttgatgacttggaccaggtcggggtaggtgagttgtaaagaagtaagaggatttgagatggcttgaagaggaggcaggtgtgaaggtttaaattatataaataaacaggataaatggaatctgcatccaaaatgcctaactgcttagaacagaggcggtgatcaactcatgtcccgttctggtccactcccccccgccccaccacccacacagacacacacacacacacagacacacacacacacacaaaccttggtggcttttgaagaagtatttatgggtttcatcctcatctggattttcccatcatcaggaatgagtggcaactgcggggagaaggatgtggatgtgtctctgattttcacagcatgaagacagaataagtctaccattttctattcctctataatcttggtctcttagaatagctatagccttcagcaatgatggagaagcagggttctgtgggatgaagcaattagccatgttctaggagagagggaagagccaataaggagggtgttctctcctctctctcagttgccagagctcagcctgaaagggattcccttcctctgctctcccgccaccgtggtgcttccctatgttacactatgttgtggtccatggtttagttctccaaacaggagaactacccctggcacaaagagggccttgattaatatctaaacactgaatgagcaacggaaaacaccagtgcttcttgtcttagagccgagaaacttctgaggttgcagaataacctgtgaagttttttcttttataaagataggaataacaatagcatctatgcaaagaattgcaaggatcatgagagataatttgtgtcattcactttgcatgatgcctggcatatgacaagtccttgatagaagtttgctattactaagggcctgcttcctatggcttctttaagagctgctgtgtgtaaatggccctcagagcctctttgagggctctggactaagaggaaagaagaactctggtgcagggacccaaataagctctatcagttctcactgcagtaggggcttgacggtggaattaacaaagtgccttaggtttactgccagttccctgacagcctgatttcccatgtattgtgtaccagatgagacataagggattgtgaaggcaaatgaaaagcaggatattgtttactggggccaatataaatatgtttgtggggagaggagaacaaagacctcaaagcctgttgttgacagaaaccacgctagtgtttaatacatgacgtcatcctagtaaaaataatagttcccacaggtctgccagggaatgggagagccggggttatctgtacccacacatgccaggaacctcaggggtgctggcaactggtatatgatcctgacccagcttccaactagctccatggcatgtctgagggaggggcttcgtggatagtatcctactctgagttccaaacacacagatcccaacgtctggattccacctctgctagacaccagcttgtagcagagaccttagctgggagcctggtttttcccaaatgtaaattcagataagaattcaacccctactagagtagttgtgatgaaaaaacaagataaataaaataaacaagatttaaaggaaatgctaactgcaagagagcctttggtattcatggtagcctcacccacttctgtgtgctcctctctcacctatgcagaagcattgaaattccaggcttcatctccagtctcaccaccctgaacccctactttgcttagcttccctcctctatgtaaatttgttttatttatttaggccttttgtaaggtgtgtgaaggtatctgggctaagagagtggaaggtcagtgaacccctgagaaaatactagccacttgggggtcctcattcttgcccaatcagtcmgaagatccaactactcctctgtgtgccccttcctgctccatgtgctcctttattttacccatttttctccatggtaaatgcaagtgtaaggctttgaaggcacaggggagcctctacaagccctgagtggaaattcgcagccagtatgtgaaagcatgacttcaattttwtgaagactgggccctaagaactggacatgatgaagcttaccagtttgccaatcttcaccttctgttttcttcccctgagagtttccactagaaattccccagctttggtttgagtgcttggctctgtaatcttggagacactctgcatacaccccacaattaagacatcgcaactccatgcaatgtttcttcagagaaagttagatgcaattagatcatttgaagatggattagcctgccatctgcacaatattaagaaaaatcatgttggcaaatgatggggcctctttgaagagctctgaaggaaagccactaatgggctctacactgggtttcccccctgttcccgaagggttaacacaatgtgtgggaaaggaaaaaaaaatcccctgtggcattaaaatgctgtgtcagagatttgtaagctcccctttgtagctctgccctggggcctggctcacttcagtggagatgaggttaataagacctctgttgctgcttggcagttcttaacggggttacagtctggtgcctgaccagtgaaggacagttattattaaagtgctgaggaatttaattcaataaggtcagggacatctgctgtgcttgcttgcccaatgtccatttmttcttctttttacaagaastgcttgcttttcctttgcggaaaaccacctcatgcccattctgtctaggtggagctgacccttacctaaatcagggtggccacatgaccaagccagccyagttagtgtatttgggtatccaaccgtgccccaaagtcactggacttgtcagttacataagcctataaacacctttacccctcaaccctcatttttctttttcagcttctgcaaggtggagtagctacattaactatttaagggattaaatggcatgaagtataattagatagaaactaaactctgtgggaagtcaagagagggagaggttgatgtgggtgggtgggcttcctggcagaggctgaacttgaactgrtcttaaaggatggagaggattaggtgagaccaagagaatgcagaactctgtgcaaggcacagagggagggagaactcagttaaaatgaagatctgtggacaagaaatgaaaagtgggttttgacaaatagaggcagggaaaatgccagaggacttggaatcccaggatgagaagtttgaacttacctggatagttccccagtgtggacttatgtatgggtggggaaaatccacaccagattgtgctaccagtttgggcaagtatatgactctatgccttacctgtgttagagactggcacaggtgcaggcagggcactaaccttggctccgccacttaataacygagcaacaatgggggagttacttaacctccaaatctcaatttttttccatctgcacaatgaagataaataataacctgacattcagtgtttgtgaggataaaatgagataacctacgtgggagcccttaggatagtacctggcacatgataataatagtagataatatctgttgagtgcttattagtgttcccgaggcactgtgctaagctcctgacataccttatctcatttaatcctcccaatagccagtgctttaaaaatgttggctgaatccgatttggggtaaccttgtcattcctgtgcttgatcaaacaataagcttatcagacatttactgtccaatgagagctgaatacataatctgaatattcaagttctaatttcttaatacacaccctaaaatgttttaaatttaataaaattacacttcagaacatctagagaatagagtaaaaaaaatgtacatataacttcactaaccacaacagaaccatgtttttctaatatagagggggttaagattatctgcttttaggcccaccagatcaccacagtgtgatctggggcaagttactttatcttctctcagccttagtttcctcatctgtccttatacgatgtttctagaagcttcttcataggggttttttgttttgtttttggcaaggtttaagagtgataattcatgctgtatggagcatctgacacataatacaccatcaatgttagctcctatgaatgcctccagtcactgtcctatacattttccctgtgattgcaataaccgtgtatatgcagttgcatccttattttttcacttaacactgtatctcaggcatctttataagtaacaagatctccctgtccctcattcctaatgtatatgttctcctaaartcactttaagtgtatcaacttgcycttgcttcatcttttaaaaacatgtataagtaatgctrcactccacacctttacgcttaatggctctaagagttcacgtttcagtgcaccatctctttgagttcaaattatggttctgcccacaccttttcagaatgtggtgagaatgaatgacacccaagtcaggaaaggcctttgacaaattgcagattatgctggcttgataagtgaccacaggaaagtatgattgtcacttttccagcagtgggtttcctccagtgtgatattctgtgcctcacctatcaagaggtgttactgtgggtcttcctgtcagctcagttctcctacccttcttgctgacagaggaagaagaatcccactaccttttagctggaggttattctcctgatctcactgaatcttatttcttggagtagcaaggaatctgcaaaacaatttgaggctgtctttctgttgcaaatcaaagccccaacctcttatttgggtcttagagcaagagttccccaagtactttgaaattggacccttctgtacacacctggagtcaccagtaagccttgcccatagattccctggtggatggacacacaaagctaagggcaaaggtgaccttttcatttcttcttcaggtcctacaatgcctttgaaatctttatgatctgcaccttcagggattatacaaacagcttgaggaaatcctaaaattgtgttttctccagataagcatccaggtcaaaggaaagacctctgcatgccttcctgatagaaagaaacttgcctcaatttagagaatgccaccaagaacaaaattggcatgcagccatttgtgcagtgcattaaaaaccagtttacaaatagtggtacaattctggaagtgtcagacctcatagtgtggtgtagtggaagtccacagactatttaccatatttcaaatgtcttactgtttttaaacagcagcacaggataaccagagtaacacatttctttgtttctgtctcgaataacatcaattaagtaaaaataaaatttattatcatgcaagttataagctttccttggcaattatattttgatatatttatatgctaattttaacaaattttggttaacatatcttacagcagtattttttatattaataayggtaagaggaacagttacttttttacttagctattrgttaattgagattattttaaaagctgtgtgacsttggaaaactgattaactaatacaggtatttataagatgtttggtctaaaataaggtatttaaactacctgagcctcagtttcctcatatagaaaaaatataccctcctcatatggctgttataggggaaaaagacacaatatgcaaagcacatagtacggaggcaaagtatctggcacatagtatgkttcaatagataaataattttcccatagaaactgcaaatttatatatgagacaaaaaacatttcaagtatatgttcttgagggcagggagatgtaaggtttttaaaggttctttgataaaaaggttggagcatggctctttggctctgatcactccattggatacttaaaacaatgwtcaactctgtcatcagaatgaaatgtccactgattcatctccatttcttaactaccaagcaacgttcttttgagggctttcacaccctcacgtatcctttccacctgaacctcagtggctgactttaccccaggccctgaaggcagaggtggagctgagctctgtgtctgggaagagagaagcaggcacgtcctctgatccttgcccaagggcctgctttgtgagtggggcatcaatgcygcttttgttccacctttagcgtctggcccacagctgaactcaaagaggctggctgctcggggcaaccctggcccacaaaggacagacagcaccaagcccagccaagggttcactcaagaccccaagatccagcacggtggttctccccactggggaggcagcctcagggaacattctgtctgcctttggcattctaaaccatttckaatttcatgaagataagtcagaggttttaaatgtgatatcactgctgaaaaggccagagccatcagcgtagaaccagcatgtccttgctaattacaatacacaatcattgccttrtgttgatgcagtcatttgctcattcatcagctattaattgagttcctactatgtgctcaatgtgatgctcaatgtgagggacatggaggtgaaaagatgatgtccctgcccttaactctctggtgtactggcaaataaactgtcacctgctaagacaaatagaacataatatctggacactataacaaaaacctggagaagcagaaacagtctacataaggggccaataataaccattgctacagttgatcaagcatttgctgtgtgccactcactgtgctaagcacttagtgtgtattatctcatttaattcttaaaacacagctataatagtagtttgattctcttcctatctctctgggaaaggccatgcaaagaaaatggcatgtgagggtcttggaaaaagaataggagtttgccaactagacaagcaggggagatcattgcgggcacaggaaacaaaaatgatctgtttggagaactgcagatctttggtatgtgtggagcaaagggaatatgcagggcctcgtgtgagaatagtgattgcagtgaagtgagaactaagtgggatgaagcttcaaatgtggaagactgtaagcagagctaagaygtsgaggaaggagactcggtaggatagtgcttcagttagaaggagggatggccacgtttgttggttcacttttgagatgcagagcctattcctagggtaggctatgagaagggaacaatgagagggagaaactaaaaatgccggacagagagtgactagtggagacaggacctcaccctcctctgattggaagaaagataagaagagaaccaaagacatagacacattctaagaataggtgttgggaggcagaacacaggtaagagggggcagaaggaaaagatacgatcttaagagttgtacctgcatgacgcctgatgtctctgaggttaaaggcaagtccaacaaggagagtgagaggtgacagagtattatagaggcsttggtgaaaggagtnaaagtttggagtcattgttgagtacgatgatgaggtgctgataacacaaactcttgatttcgaggaaggagtgttcaaaggaggaggaggaaaatgactgctagagagaaaggtgatggatgkcatgtgaaaatagttgagtgtgctgagaatcgttgattagagtggcgaaaggtaatgaagggaagacttaataggtgatttcaggttcagacatctgaatgagggcatggacctattccatgcagcttcaggagayagaacraggtccaacaagtggtcattcctaggagacagattctctacccccaaacattaaacattaaaacatgtaagtaagtgtacattaaaaacattaaaatgtgtaagtaagtagcactatccagcaatggaataatctgcctcttgaaggatttcaatcatctgccaaggatgttgtgctggaaatttggtatgcttaattagatggcttcttctatcttttttaatactaacatatcatagatacttaatatatggagcattgaaatagatagcagccaattttggcattcttgcaggttgtcccactgtctgagcmagagaatcttgattgggatttttttttttttcttttttggagacagagtctcgctytgttgccaggctggagtacagtggcgcagtctcggctcactgcaacctccacctcccaggttcaagcaattctcccacctcagccttccaagtagctgggattagctgggattacaggcacctgcaaccacgcccagctagtttttatatttttagtagaaacggggtttcaccatgttggccaggctggtcttgaactcctgacctcaagtgatctgccctcctcggcctcccaaagtgctgggattataagcatgagccaccgtatctggccttgattggaattttcagtaagatttatgcagtttaagaactgtggaaacaatcttgattttttttttttattccaggaggatttttgttaagattagcagaagccatgctctagtwtgagaaaaatacacatggtattattgagttaacaggcatgatgtgtatataatacttactayggagagggcttctttctataattaaggcagaatgcccatcccttctcattgtggatctggagaggacccttagctgggatgactaaaggaggagcctctgttcttacctkatttggagtcctcttctcatcatgaaagatgtttgcgcatctttcatgccctgtacctttcttttcatttgccccctgcatttgggattggttgctttcttttttggaacctatgagactatttcagtggttctcaactgagggtgattttgaccctcagagggcatttgacaatatctagagatatttttgattgtcatgactggagagggatgctgctggcatctggtgggtagaaggcagggatgctgctcaaagccctacagcgcacaggacagccgctctcaacaaagaatcagccagcccaaaatgacaatagtgctgaggttaagagaccatggtctgtttttaagtcttccttctaaatcagctgccaccaatacactctgtaaaaccccagatgcctacttttattttctaatttaagaactgttgtgtggttgaatactctgtctctgtgaactctacccccacccatcccgttcttcatgctgtagcaataagaaggacattttaaactccctttgaccagaaaagtcacttttggttagggtccaaacaagaaacacatccctccctggataaaggcagagatgccacagcttgcagagaaaaaacatcagacatttcccaatggcagcaactctgggccaagagtacggatggaggacaagctayagatacagccacatggtgcccttcatttgcttttgagtaggagctcacactgtctttaaaagattggacagtagagctcagccatgaagggcccctgtagcctttccaagccaggataagaccaagacggtggtatgaaagcaactgtgactttggcacaaatacagactgagaaaatggtacctgactaggttactcttatgaccctctgagaatccccacacagcacatgctaacatgtacctacacctctgtgtcccaaattaggctgaagttttcagttagccagatcataaattaggcctttgtagctctaagatcccctacccctgaagaatcctaggaaagcctcccttactacacttcatgactcagcattgatagcctgctccaacagaaatagcccaaggctgagatttcccttctcatcccttatgtttttcaggctgagcagtcatagggaaatcattcaaactcttagaacctaggttttcttatctctgaaatgaagacatcgaccttccaatttctgggaacctgtattgaaaaagtactctcaaatacggacataattttatgtacaaagttacttattgcttcattatttaatgttagacatattgtgaaatagattaaatatgacacatttatagaatggaacattatgtacccatgaaaaaataatatacatgaagagtttcattggctgtgaaaaatgcttgtgctctaatgtcaagaataagaagcaggccgggcttggtggctcacacctataatcccagcactttaggaggctgaggtgggaggattgcttgggctcaggagttcgagaccagcctgagcaacatagggagactctacaaaaaataaaaaaattagccaggtttggtggcccatgcctgtggtgccagctactcagcaggttgagatggggggattgcttgagcctgggagatcgaggctgcagtgagccatgattgcaccgttgcactccagcctaggtgacagcgygagacactgtcaaaaaaaaaaaaaaaaaaaaaaaagcggcaaaatataacaccccccacacacatacacaaacacacatttatatgcttatagtatgatctcaattctataaaatatgtatagaaaaaagtctggagggaaaccaaactattaccaagagtttatactttgttttatgttagtatgtttataacgtttttaataaaaataaagctgaggtatacaataattcttttccctttaaaagcagagcatataactctcaagattgagaaacactgatttacagctgtagacagaactggggccagagataaaattttggagtcatagatgttttagtagagattgattactggataagatcacctaggatgagcctgtagagtgagaagagatgagagccaaggcttgaaccctgggaaatactgacatttagggaatggatgaggaagacaagccagagaagggaataagytcgtggcagtaatccatatgagataataacctatatggattaccatggtggcgttgggacatgcaagggaatgataaagctgataggcattttaaaataaattaagggttgtaaattacatgtacaagatgagggtaatggaaaagccaaatattacttaaacctctctagtttggaatatggaagaatgctgatatcaaggaaagcaatgggatagttgaaagagatgcatatatggtaggagtggggaagaggttaggcttagtcttgtatgagttgggtttgagatctctcttcaagaaaataactgctctaagaagtgcagttatctgaaagtccccagctgcagccccttggggatcggccataccatgcaagctgaggtcaccctctgcccaggcagctctcagccatgactaagcttagaagcagcattagagctgatcctctctgcccatgcgagcctcctctagtaagtaggcagtccttgcacgtgggctccccactaggctgacccagattctgagggctgaccttggtttaagctcttcccattcaatctcccttcttcccactcttctttctcagatatcaagtctgtatcatggtctgaatgctctccctgcctgctcttctctctctccctctttctcttccacaaacactgcccccagtaaatctcttgcactttgaattccatcttggtatctgctttccagaggaccagaaccaacacaagtgatggttacatatccaaaagaaattattgtggaaggaaaatagtacagttcttgaaagcaatcaggattgagggataactgaatctcaagagtctccctaatagcataattagagggaggagtggaggacarggtttgaatcttatgttacagtcataattgggaaagagtacagttagtcttgtaattgggaagagaattcaggatggtggggggaagttattgaaaaagtagaaggaaactctgggaagtgtaggatcatagaacatgaaatagagagagagckttttaggaacaggtgataatcagcgcagatgtcatcaaagaaaatctgagtagggactgaggtcttgtatttagagactgacagtgtggctggctggccatcaagtgattatttcagggaaagaatgagaataggtgccaagtttacaggaatgaaraagaaacatagtgggaaatagctrgaggtaatgacagtagacctcacattgaaaatgtttgtccatgaatgagaggagggaaattgagctaattagagtaataatttccaagattgagtgtgtgtgttttaggaacacctaaccatttccagaagagggctttaaaggtgctagagagagagagaraaaaaaaaaaaaacaaccattgtagaattaaaatgctgaaagcagtgggaagagaaaagctactgaggccagagggaggggttagattttaaacrgaagagagaaacctcttttctggaacgtggcaacaagaagatggcagaaatgacagagatataaggggtgagagtgaagaacctcacgcttagaatgtgttcctggtacaaaagtaacaagaccaacctctaagaataagagaatgagatggggaaaatgtgtaaagagagtggagatgatcaggaatggctggtgagcatactgttattccttaagaaatgtgatggggcaaaggaaaatcttgccttaaatgcatgaagttggatctctgtcaagtactggtccaaaggactgtgactctaattggtaagaaagaactaataaggtcctggcatttctcttacatcttgaattttcctagttcaactataactcaagtgttcagagaaacaaactggctttacgcagtccacttttgtaattatcaacaatcatagaaaaggaactagtatatagctacttatttgctttgtttgaatggcactgtactttatcataacaatgggtgataaagatgataaaaatatccaagaaccacaatgctctatgtcagaactaggttgactggagaagaaatgctctctgaagcaaacgttctggatactcaaagactggatttgtacagtggtctttaggcgttataactctgtccaggtctctcaacacttacagctatcarggaaactttattattgatattctacagaaaaaatcacrattactgcaagtctgtaagctcttaagtatttttcccattgaaattattgtttcattaatataatatattcaaccttgtgctatcttgggtatgcaactctacagttagagcagatcaaagggcagtagcctgaaaggagctgaatgacaaaatccatggcatttctcattagtcttagccagaagtggctctttatggagaggactcatcctggtcttgtgaagagaaatgcactgaaactggaaaggaatgagctggccacatcagtttcttcaaagctgccagttgatatgtctatgtctgcaagtatgacttatgcctgttaattaccccccaaactccttcaacagacaaagctctttattctgctgactttgaagtataatttggggatgccttgagaaggtcaacgcgacaggcyagcttttgccctgcagtgggctgtgcaggtgtgtgctagctgttggcttccaggcctgttttattccagccctggcagagtttgcaggaatgtcatgagaagagatttataatactttctgattccatccagtttcaaataattttatgaataatctttctcatagcatactagtaattctacaagcagtcttggccaaaatcaacggagtgagcatgcttaaggaaataattttctttttcctttttaagaaatcattttgctgaagttttacaaacctcataaaaattaagggttggtttgaatttgggagaaagactcactttatctgaactcatttgccaaaaatatttaaatgagcacatgctggatgtaaaagtgccaaagcaatagcatcaattatgcattctcaaccttccagactttccagagtcattaaaaggcagcgttttcctacaggtgttaatgggatcctgcaaagaggaaggtggttttaggtaggattgtgacagagtggctcgtgcgttgggtgctatggaacccactgaggggcttctgaccacagtcccatgcagagccaacaatggcattcgttgttataagcaagtgtcagtcacaagagagctgccattacagagtgttgcccagctttccatattcccaacatggccagaggtttcattctttgagaatgtgtttattcagcctagtaaaaacattaaaaaggggaataaatctctgccgaccccaaaatgcttttcaccacagctgtaaaccataaaacatttagaaaggtaagcaggactaaagataatatagtttccccaagcagcawggagggcagacctggaggtggcccttgcaaagacagctgcagtgcacagagcttccctgcaaaatcattaagamagggacaggttctataaggtgctaaattattattagtttttttttaagttgrgggagggcaataataaaaamcatgtgctcagcagcctgcttggccatataaaacagaaaggcctgtgactttaagtgttgtaaaaggggttaattgtcgatttctgaatgtggcaagtttactgatcttgttaacagcaacggggcatgtgccgttggttatcatggcgggaaagaaaaacagccatccatcccttattccctggatgccgttattagtcttggaacccaagttaasggacatatgggtgaatgcagtcttaaaattgctcctttccacctgtccaaatttctacccattctaaagcttccagttccacctaacaactgcatttttactgccatttttcaaatgcctgctgtggatcagttcctttcacacaaaatgtgttgtctatttgtatgacaacctaatggagtgggcaaggatgatacaaccattttacagacaaagcaactgaggttcagagaagttaagaaagttatctatggcgacagagctatgaagcagaggttcaaacccgtctttatattccaagtccaggtcttttcaactagttattcaaataattcatttgttcatccatttactcaatagatagttattggccatgcactaagagccrggtgctggtctagttgttgaggatagagccctggacacaactgacaatgttcctgccatcacaaggcctatagtttaggaagcactagtctaacttccaataaccatcctctcttctaacctactttcacatgcacagtcagcatctgtaatttgatattttattttgctgttgagtattgcacattacctttgagtatggtgtgttacctttggctcccccagctagatgatgagcctggtgaaggcagggctgttgtctaatatttctctttttcacagtctacccagcacaacccattaaatragtgctttttttctcctgtagaacatctttattactgtgatcttaagatcatttggggttttatttagagcttagctattgcagcttctgttattgagctttgtcaaatgttatgtttatattgtctcattagtgctgacaccacccaactataagacccattttacagttkaggaaattgtggcttatgagggctgagaaacttgcccgagttcttagagtcagtaagaagaaaagctaggattctgccagtggctgaattcaaaagcccaatttctgtataccatgtacttgagcctgagcagtgagggaatctttgcccacctgaaacatatagagaatatcaaaagaccctatgatatgatatacatgatacataaggtgaatttaataccagccattgattcatccagtcactccaatcactcagaccttcatagtaaaattcatgtggcatcttggctcctgccccaccctctattttgtggtcttcttaaaatgctatcttttttcaatagaataattttcaaaggaatccctgtgttcctagaaaggtgacaaatcagagattgactagcatgaggagggtagtggaaggttcacacctgtttgtaataactggcttatacaaaacrtaagtacgaacacaatggatggcgattgtgttctgccaatgcggttggcattcattctgagaaaagatggcagaccaaggccagagcatggcccagttgctgaaaatcagaaccacactggagccaccagggaccctggtaactaggtggagctgaaccatttatttctgttttgatggcatagtttccactttaagtaatgtgggcttaatcttcatttacattcttcaatctacacagaagtgtatttattattgtcttgtgataagcagtagtgttaatataaagcagtgctccctgaaactgcagacagtttccaaggtctgggcaaaaagaaacaaaaatgtagggaggggagccctgcagcatgacaagagtttttgaaaatgaaaaccaaaaaaattttaaagaaaatgaatcctaatccttttggaactttcatcagtcagtctgtcgacaaggaactgataatttctgaatgtgaagatttggataacaaatgagttacatgtataactaggcttttgctgggtttctctatgtagataatgactcaactggtgagtaccatcagagaaaggccagtacactgggtggcctgtggatgcttgtgtttatttgatgcaaggctcctgctttcgttggggattgctggaagagtgacacacaccaagctacatttctgccagttgtggttttgagataacaaggcttaaaatttgtatgccaaagttaaaattcatgatctttttcctgtgggcacattttagttcagtctctttgctcaaaagaatttgacaccaattattgcttttcagtactattgagcatgagacaatctatagaataatccaaaaaggaagatctataattatacaccttctcataaagggatcatggatattattgctatgtatgtccagaatagctcttcttacttttgaggagtaactattagagtcttaccaggtrycaaccacagtgcttcacattcttgccacagagactggtccaaggataggcagatgacaaaaccaggcaaattctaattcttccacaaatgttttctaatatagagctgccaaaattgctctcctgcattttttaggtgtgcaattgcaatataaatctgaaaatgcccatggccatgaaagatctggaaatgaaaaatagcattatctgattctttggatctagtcttccctgagccagctccacttttcccatgcatggggcgggggggtcggggctagcgagctaataaatatccttttattgcttaaactagctccagttctgatcccaccatttgtaaccaagtgtcctgagtgacataaataattaaatcaggcccagagaaatatgacccttagtatctgacaattaggagaagcatacaaaccataaattaaatgacataaaaataattcttatgcaaaagacagtatacctcaagacatgaagggttgttttgaaatccttggaaagcaatacagactgcagaatataattcttgtgggagaatcagtctccacagtgttttctgcagaactgagaaagtatcacctacctgccagagcagggctttaaaatgacaaatctggtttgttctggacacagtgatttttttaagaattttttttactatactttaaataataaaaatatattttcattgttattaaatattattataatacttttattggtattttaggagcattactccaaagatggtgagaaattattatatacaaaattgtaatgtgtttcaccttcagaatgctattttattttctcagctaatgattattattttagcaagatttgacaataatagtaaaataatcgaaccagtattttttttttgagacatggtctcactctgtgtctcaggctggagtgtagtggcataatcatggctcactgcagactcaacttcccaggctcagatgatcctcccacctcagcctccccagtagctgggactacaggcacatgccacaatgcccagctaatttttcgtatttttggtagagtcagggatttgccatgttgcccaagctggccttgaactcctgggctcaagtgatacacccacctcagcctcccaaattgctggctttataagggtgagccaccgcgccaggcctcaaagcagtacattaagaactgttcgtgtaaataagctctgttgagggacattaactggggaataaagtggctggaaaggacacattgaactcctttttcatcttctctgaaaatgttaataataactgagacacatctctgtgtctatatctatacttttcataagtgaggaaagaatatgtgaaaatttggccaaaacttaaagtttttgaatgcaggaaaaggtttgttattcacagtggaacaggggaaatgtaagaagatgatacggtttggttgtttccctacccaaatctcatcctgaattgtagctcccrtaattctcacgtgttgtggcagagacctggtgggagataattgaatcgtcggggcagtttcccccatactgttctcgtcataatgaataagtctcatgaaatctgrtggttttatgaggttctcattcccttttgcctgccaccatgtaagacacttggttctcattccctcttgcctgcctccatgtaagatgtgcctttcatcttccaccatgattatgagacctccctagccacttggaactgtgagtccattaaacctctttttctttataaattacccagtcttgggtgtgtctttattagcagcatgagaacagattaatacagaagtcttctgcatattgaagagaaaaagcctattgtcttctcaatgtccagatcaattgcatttattccaagtctggggtgtctcatggttcattcaaggaacactgacagtgagtcatgtgacaggccttgggaaaaaaacataattgtgttcataaatattattaagaaaagcagaggatctcaaaagtcagatttggatgaacattagttgatgcattgaarcatggattakgtcaaatatcccatggattctaagctgccttaattgtaaaaaaactctttgatgctctgcttagtacgtaagcaccttcaattgctgtcaagtgtacatacagcaacaattaaagataaacaaataaacatattgggatatgctgtcatcagagtacagggaaatgacccaaaagctcaatgtttccaagaggaaattagttccgaccccacgtggccattgttacagactagaatctggattttgtttgctcttgattacacagaggaagaaacaaaaaataagttgtcctggtgataagcaaatggctgggatggttttcctcagtgaaaatcaatgtgatgtcttattcccaggcctagagataggtgggagatggggagggaagctatttagtttaccagcattactaaagttgcccttttttccctggtggatttccttttcctgatttcagagcttagagaactcagttctgtctagaggccctaacattccacttcccacactcarcatgggcctattgtcatcatggacattttttaatgtataattcaagtaatcctcaaagcagccctaatagtttggtatctttattgtwatcagcctctcttgagaatcagaaaagttaaatacttttttaaagatcctgtagatggttagaggcagctaggattcaaatacccatctgtctggatctgaagcctatctcttaatccccaaacccactgcaacatgcagtccattctcacatgtgcaagtgcatctaacccacaaatgctttttttaaaaaaaatattaaggatgagctggtggtgtttcctccatacsccggccagtcacagtttagcatcatgggataagtgtgggaaaggtctgactagagtagaaatacagattgtgcccagccttaaaacaawaacatgtttctttcacatttcacattaacaaatctaaacagctgatgaaatactgtaatcctaggattatataccatgaggagcctaagaacccctttttaatttatcaaagattcagtatatttgtaatcacatgtaataagtgaggttgctgatgtagaggaaaaagaaatgacaatctttgatcccattgtaccctgggatcccgaaaatcatccttagcctgctggtagccagtctggtctttggtgttcctgggcatgtgtcccattctgagccatgggaatacttcttctcatgtcctaccctctcacacataatgcccacctggtattcttccttctcactccacaccacactccccaactaaccacagccaccattatattctcttcttccctcttctccccttccctgcccttgcttcctttcttctccatgtgtctcttctcctactctgttcccaacataagatttagcatgaagccatgccttttctcctcaaaactgagtttctcaaagatcattcacctccatatccctgcaggaagcgatgggtatgagcagtgtctactagttggatggacagatcaagggatggatggggcttttgaccatgtgtttctttcaagacttgttgaagtcattttattcagtgaacaaatagccattttgatatcatttcttctcccctttcaaattacttattacaattttgggtgtgggtttatggtgggtggcggtagttgcccatgcttttggagctgagatgtaattcttccctccctccctccctccctccctcccttcctccctgcatgcctccctacctcccttcctcccttcttccattccttccttccttccagaaattctttagacaagcaaagaaagaaacttcacagagactttaagcagtttatatccaactatgtgactcctaagaggtgaccgcaggtggtttcaaaaatcttctgggaatgatcccatgttatataataatgagaacactgagctygacatcaggaggcctggctttagctttggtctcccttttcagtatgcctggaattctgggcagatcacttggcctctctgtgcttagttttgtcatctgtaaatagggaaggtaggactaatgagtgatttttaaactgttcctgggagccctcaaagattcatggaggtgtcttgagagtctgtcctacaagggatgttatggtagagaaggaggtggttgcatagatcaggcagggctgagtccctcattcctacttcaacctgaattaatgttctggtgaaactttttgaatgtatcccatttttaagctttctgctagaaaacctactccaaaaaagtttgaaaactaccagactggattatctttaaggtgccttccagcatamctgacttcaatatataaattatctgtgtgtgatcttcctttacagaaataatggagcctttcttttcctcgtgtggttgttgctctaagaatgcatttcttatcaagagaataatctgcttttcattctgcttcctacctagctcaacagagcacaaaatgcccaagctagatcccttattcccctgtgaatatcttctgtttagactcatccatcatcggtggggcttatgacagacatagatgttttcacagttaccacacagggccaactgttttagtaagggtgaccacttaggacagctttgggctcttgagctgtcctctgttgaagccgggaaaccctaagctgtcatcttagcaacaccgggttgttcatccactttgaaagagacaactttatggtcctgatgacatttcctatattatattaaggatgcatcttgagaggatgtgttgggtttgttttctggacaagctggatgagtctctctctctttctgttttagccactgccctttgtagggtttgtttttcctgctgtcccagaatagatgacttaatgggttgctgaaaatgtccaggctgcctctggctctgggggtagctcggccttaacaatggaaggcatttagcagagcctcatgttttagagcaagaaagacttgagagagcatctcatctggtatttttcaagatgctttttaattttttaaacagcaaaccttttctttccccaatacaaatctgacacaaaacctcaatttataaaacagatttttaaaagaggggtgggaggtaggagaaattctaccaaatggtactttccttgctatttatcctccccccatactacctcctaccacacacacacacactcagcaatacctaagcacttctagggaacccttggcctcccaaaagcaatagaaacccccagtcctgaacctctttttttttgtttgtcaggaaactgaaaaacagtgagatacggtaacttgcctaagaccccacagctagagatctcagtgccagactgcaacacttctaaatctggtttaatcttcctctccacccctctctaatttattatgccacttcacctttgaaccctggaaaagggcaggaagaaaaaattatgtaccagtgtgctcaattcttgtacatctgtctttaattctcaaagcaactttacaaggtgggcattattattatgcccattttacagaaaggttaaatcacttatccagtgaaactcagccagaagtggcagaacttacattgaaagctaggcctatcaaatttcaaagctgttctttctactataccacaggattaaacaatgccaactattgcttgtcataaatgaaaccctctcttaacataagtttgactcaaaaagtctgactcataattcatgaaatactaagtaactcttcttaaataactaccatagactgtccctctccaaagttttctatgtctattgcaagcatgttttgcctttaacaaacaacacccctttctctgggaatcattctctgtcattcctctaccctatctcatccagaaactggggctctagaaaccatgattttgatgtttaattcaagtctggtcttgagtgggccaagctaggaatgaggagcaggagagagttaagacgtaaaattttactcactgtayggattgagcagtggaaagagaaccaagaagagagatcttgtgacaacttacatctccggtttacttttgcatttcagttcaatgaaacagcctacttaccatataatttagtctgccttttttttcctgaagctttggtgtttgtgtgtgtgtgttttgttgtttttgttttgttttgttttgttttgtttgagacagagtcttgctctgtcacccaggctggagtatagtggcacaatcttggctcactgcaacctccacctcttgggttcaagcgattcttatgcctcagcctcctgagtagatgggattataagcatgtgccaccatgcccagctgatttttgtatttttagtagagacggcgtttcaccatattggccaggctggtctagaactgctggcctcaaatgatccactcgccttggcctcccaaagtgctgggattacaggcatgagccgctgtgcccagtctccttcctgaagctttgaatttatgttactagcaaaccaaacaatcctactgactatatcatcaaatcggatggcctgaggattcttcaggtagattcaggctgccttcttgttgcagtcagtcatgcttattttacattcatatcatacagtgctgccatgattggagtcctcagcaatcagttattccagtcctctttgtttatactgaaacaagtcactataaaatctcctgttcacatggataaggtacastatccagagaaagccaatctkctctagccttattgattttgtctcttagacttctccctgctggacagaaaatgtaaaataggaacgttcaaaataaataagccagggatactaagttcaattaaatagaacaaaatgctttatattttacaaacattaacttgagaagagaaatctaagttattatggtctccaaatggtaatagcccaaatttctactagcaataagatagataattatggtactatgtattcatacagcaaaataatatacagcaacaaaaagtaatgaattatagttacaggcagcaacatgggtgaatgccatgttaattcccatttgtgatagaaatcaaaataatagttacctcttgaagggaatgaccaggaaagtcataggggaggttcctgggtgccataacatttgatatctttatttaggtggtagtwacagagctgtgttcactttgcaaaaattaattgaattctrtagttatcatttgtgcagaattatgtatgtatattatacttcaattgtaaaagcttaccccaaaaatatctgaattattagaaattagacataaaacttacttcctctaggtcatggtctcccattatataaaacaagaaattaaactcaacattcttaaaactggaagtgatctaaggaagagtatctagttcaaacatgaaatgttttacagaaagagagaccgtggccaaagaagtaaagtgataggctataaattatgaagtttataattggtagagccaagattagtccttagatcttttagctatgttaacaaagatattctaaataaacctcttaatactattctaaaataatttgctctgaagtatacttttgtactaggaacaaagggtttgtaaaataaataaataatgtgaacaataccatcagtgtttgcatagaaacaatatgatatcattcttaaagataaaatccctttgtcactcactccatgagataccatctgatttggtttctgaaaattttggcaaaattatacattgcttgaaatctcattcccaggmtgtatttgaaataaagtcttttttttttaattttttactttaaatttcaggggtacttgtgcaggatgtgcagggtttttacataggtaaatgtgtgtcatggggtttgttgtacagattatttcrtcagccagatattaagcctagtatacattagttatttttcctgatcctctccctcctcccactctccaccctccaataggccccactgtgtgttgttcycctccatgtgtccatgtgttctcatcatttagctcctacttacaagtgagaacatgtggtatctgcttttctgttcctgcattggtttgctaaggataatggcctccagctccgtccatggccctgcaaagaatatgatctcattcttttttatggctgcattgtattccatggagtatattatacatgccacattttctttgtccagtctatcattgatgggtatttgggttgattccatgactttgctattgtgaatagtgctgyaatgaacatactcatgcacatgtctttataatagaatgatttatattcctttgggtatatacctagtaatggaattgctgagtctaatggtatttctgtctttaggtctttgaggaatcaccatactgtcttccacagtggttgaactaatttacactcccaccaacagtgtatacgcattcctttttttctccacaacctcaccagcatctgtttttttttttttaayaatagccatgaaataaagtcttgatgatgataatgatgatgatgtcaaggattctgacaatgtaaacaatgatgacaatggtacagtcttatgggtggtatgttagtttcctcatttgctaaattaattttttaatggctactctaaaaaagtagcacaaacttgttgactgtcttacagttttgaaagtcagaagtccaaaatgggcctcactggcctaaaattaaggttccttttggaggctcaaggggagaatccattttttttttgtcatttccaggctttagaggtgacttgcatttcttggctagcagccctcttccaaattcagtcagcaacagacagtggaatccttctgaacactgcatcattgtaacattctgactttctgcctctttcctccatatttaaaggatgtttatattccactggacccacccaaaaaattcaggagaatctccttattttgaggtcagctgattactgatcttaatgccatctgcagccttaattcccacttgccatgtaacatattcaaatgctctggggattaggacattcacatttttaggggcctttattctgtttatcacagacaagattgtatttatgcatttttgaaatacatacatatatacatatttcatatagtatatatatatatatataaggccttgagacaatgctttctttacctagaacaaagttattttgtyctaggtataattatttccattttaccaagggaaaaaaaaagaataaggtgaagcaaattgcctacatttctggagctggttatggcagagccaggactggaagccagatttccaaacccagtgttctcattcagtgaaaagtggttttcctaaacccagctgtcatgttcctcaagctccagaacctctggagggtgagctgtggtggacaatttgagaatttaggtgggttttgtttcagagattgaaggatttgagagatgaaggattggcagttgctgaatagtaagtgctagtccatggacaaatttatgcaaaaggctgcgttctccgtcaatttacacacaattgctactcatctgtaagacttagcatctgcctcacactcycctatatttaaccctcagcctggatcatgtgcttgtcacaaatcaatatttctsccactcgacaggaacttcagccctttcaaattygttccaggtaatttgaggagactccagggcagtgatgaaataaagtgaaagcccstgatttactggatctggaggcttgtgctgtgagtgagaagtgagggtgaaagacccttatcacaagtatttgtgcttttagatgcactgagtccccacccagaggtaggctccctgccaactcagtcccaaaccccctctgaaatggggaagaaggggcccgggctgtgcagttcaggtaccacaaggtcttcatttgtgcttgcagcaaatagaaaagcatgtttctgacttggcccctagtgtgaggtctggtcttggaggttccgcggtctctcttaagactctcactggctcacctctgctgcccctccacatgccagaattctcaggcaaactaagcttaagcacmaactagggctccagtgcagcccagaacttaaagcactttgctaggtgcagacctggctttggtatgagtctgtgtaatttgtcccatgttgtcacagttgtcagtcacacctccctgtttatagtggttccagggctttgggattcttcaggatcagtcctgcatagtccagccagaggggattactgttccccaaggtactacaggcctcttctttcatcccagctgactgtggggcagaatcagctctgtgatattgataaagaactgaaatagatccttttagacttcaggacttcatcagcctgaaataattttctcagtactaaataaatagttrccccaacaatgatgaaaaataaatatcggggctatgggtgaaataagttgctgaaggaaatttaatgttatcaataatataatggaattttgccctgttttacagttcataaagcactttcacacatgttattcatgtcatcaggaaatgtttactggcgggccccagtgctggagatacaccaggaagtgaagcagagattgtgttctcgcaggccttcttctgggattataaagtggggctgctgaggagtgaacctgtaatcttacacattagcgtatactcccaccatggagccatatcctgctcacagtgcatgtcatcacaaacaactccccgaggcaggcaagactgttaatactacctccacatcagggatcaggcaattgagcctcagagtggtgaagaatcttgccaaagccccacagattgatatgttaaatctgtgttcagttctggcgatccttccaatatgctggtttgttgcaaagcacagtgcctggtccataggaagccctcagtaaatatgaatagctgctaagtgctcagtcaatgccacctgctattatacttgtcacggtggtgtgagaaggataacaaaagtcatcggagcatctgaactcatcagaggccgccagaggaacattctgctccagagcatttgtgttccaaatggaaactataaaagcaaaaataaaatgtttatattttctagttggctgtaaataaagaaataatgataaaaataaattagttgcctgacctaatgctttaaagtttgcagattgagtaatgtctttttccgacagtaaatttagttaacagttatttgtaaaataattaaaatttcaagtaacacatgctcattttgcttaactaagtttgtgggtttattgttgaaaataaagatcaaataggccgggtgcagtggctcacgcctgtaatcccagcactttgggaggccgaggcaggtggatcacaaggtcaagagtccaagaccagctggccaatatggtgaaaacccatctctactaaaaaatacaaaaattagctggacgtggtggcgcrtgcctrtagtcccagctactcaggaggctgaggcaggagaattgcttaaacccaggaggtggaggttgcagtgagccaagatcacaccactgcagtccagcctgggcaacagagtgagactctgtctcaaaaagttgagtttatttttcagctaactggctattttaaaattttggaaaaatttaaaaatattacaaatcatacacaatagatgttgagttaaattcaattcagttgactttwttgatttggtatttttttwaaaaaaaagttgaccatgtgtggtggctcgtgtctgtaatcccagcactttggaaagctgagytggaaggatagcttgagaccaggagtttgagaccagcctgggcaacatggcaagacctcatctctactaaaaataaaaaataaaaaataagctaggcatagcagtgtgttcatatagtcccagctactcaggaggcacaggtgggaggatcgcttgaacccaggaggttgaggctgcagtgagctgtgatcacaccactgcactccagcctaggtgacagagaaagaccttgtctcaagaaataagcaaacaaaataagcctatcagtaatatccccaaatgttaataattgataccttgatttaaagatagtgatatctatttactttatatcagcatcacttaattttgataaatactccaagccttcattttgtttttaagtaaaagatgtaaaactcatctgggaatatatcaaacccctactagtgcctgccctcaaatgatcaagcctacacatarctgagtcgtaacaaatgtgttttaagggaatatcaagcattagcaatctacccaccacaggaaaacatctaattctataggagtcaagagttagtcctcattctaaatgcagatactctggggtgtgtaattcaacccatgtaagtgccccctctgtgcctggaccatggaatagatcgttcataagattgctgcatctcaggagacgggtcttttcaggagcactggatgattaggccaagttacttgggaaagccagtcactgtatttatttttacaagccagatgctggcrcgtagtgcattcttttacaaaaataaaagggatttggagaaaaagaaaggttcagggtcacagatgaaatcatgagggtattttacatggttttatgggtagaaatttttacttttaccttctacaatggttctaaaaaagccgttgagctgctctgtgcagaaagtamacagggaagagttttatgcccacagtagagtaaaaaccttaaactgggacatcaagggactccatgcctgaggccgtggagaggctaatagtgccacggggtagggaacaggggagtctctgttcaccatggtcctgtctcattcctaaggagtctttgggagcccatagttaagctgttttgataaacastaagtaataaccagatatggacatgtggaattgattaagagaggagggattaactaatgcactaaataacccatcatgcgtggtgggttggggaggaggtagagacataatggtacaagctcctgacgaagaagggccctgagattttccttcagcccacagatatttactgagcacctactgtgagccagctcctgttctaagaacgaaggatatgacagtgaaacaggcacaaattctgctctattgcttgtggagcttacattcttgagggggaacccaaggatgcttaagaagagacagaaatcatcacaatgagwagaaagagagtgatgtggtagaggttgctactttacatgggttgattagaggaggcctctccgataaggtgrcatttgggcaaaggcttgaatgaagtgagagagtgagccatacgtttatctgagagagaggcagataattccaggcaaacgggacagctaacctaaaagctttgtgacagaatcatgtttggcagaatyaaggaataaaaaggcatcttagaaattgcttgggtaatgctttaagatcaattgtcatctcctttcaacttgttacagactcctgcttttaggtgtatgctatatagttattggtcaaacattaagagctggtccccattaataactataacacttcctgtattcaggtgatgagaaaaagaaggtcctgctctcaagaggtgcaaatagkgctggggagaggtctggagagaatgagagacagaggcaccaatagctaagtagactagaagtaggtagcagaaccctgacctccacatttctcctgtttgttttaacagctccgcttagcagcaccacaagaaggagcgtggaaagtatggaatcagatctgtttgtgcggtttttacatttcaggcgattaagtgaaatggtaaatgaaaccaaatctattgcctctatccctgtcagtgtgaggcaaagagggaaaataaacttcaactcctggtgtagacagtggaagggtgagacaagcaaacccagctccttcacacccacttcctttcttctcacaaagagaagtccctctcagtccctcagagcttacattgatgtgtccagagagggaggttaaggaaccctggagattcattgttgggcctcatagctgtgcttttattcacctgtcttttataaatgtccactgtatgccagcattgtgctggtgatacaagtgctgtgatgggaatatgcacaaaggtgggcttagaaaaatcttcctgaagaatgcaacaggtatctatctcaaagccagacaagtagggtttgatcgccttcgcttttttaaaacagttccttcattgttaatctgctcaattcatctccgagccatggtctagggcaggatttttttaaccttgacacttgaacctggataataattccttgttgtaggggctgccctgtgtattacaggctgcttagcagcatccctggcctccacgcactggatgccagcaacccctttctccccaatttcgacaaccaaaagtgtctccagacagcgccagctgtcccctgggatgacaatcacccccctgttgagaatcattggtccagatgaggaagtcccaggccaggcctggtgttacttacaaactccaggtacacaagaatgaggctcttcttatgaacatctggtctcattttccactgaagtttgaacaataggaaacaggctaaaaaagcagcaggaagatgttaggttcgctatggaaaagaatttcctgcttaagaagttagtaaggactgacttggcgatgtgggctcttttttggttccatatgaactttaaagtagtattttccaattctgtgaagaaagtcattggtagcttgatggggatggcacgttgtgcacatgtaccctaaaacttaaagtataataataataaaatttaaaaaaaagttcaaatgcaaaaaaaaaaaagtaaggaactagaaaatctcaatgcaacatttataaaatatcctctagatatgtgagtgaaacaaaacttcattaagctgcttatttaaagggaaagttaatctgcagtagaggacaaagtcagaaatagttgctttgtttcttaaaaaatatataattgccatttcaatatatttaactgcaattatcaattaaaatttgcctgaaatggttggtgatttaaaggtgttttctgaggctttgagaacttagtatattaactgaatgtgaatgactttcaaatgagtccttataagtagtatgttttcataagtgaatacacagtgttctctaaataactgtggacactgttaatttttctgtattactgaaaatatagatttcagttctcccattatctgaattaacatgactccaagttagttgtgtctcacttcaccttaaaaaaaaaaggtttctatctaaaaggagggaaagaattaacattcattgaccacccatttgtgccaggctttgggcaaggtcagcagttctctagtgagggggattttgccttccagggaacactttgcaatgtctacaaacatttttggttatcacaactggaaaggtattatatgagcatctagtaggttaaggccagagatgctgctaaatatcgtacagtgcacaggccagctcgctccaacaaacaactctccagccccaaacgtcaatagcgctgagattgagaaactctgcactaggctatatatctatgttatcttatattacccttaggacatttcttaaaacatctttactattattatcccctattatagatgaagaaactcaggcttagaggggtgaagcaacttgttcaagatcctaaaactagtacatagaagagtcagggttcttatccacaccctaggtgctgtgggcagctgtctctaccacactcagctgtcctcttgtaggtggtttttaatttattatcattattatttttacttaaagccatgtgtgacaggactttgcaaggaggatgctgatgagtccaaaggaaaatcacaagtgtgcccagtcctctactaatcaatatagcatgaagtcatatacatcctgtcccctcatgggtaataaattcttttttttttttattttactttaagttccgggatacatgtatagaacacgcagatttgttacacaggcatacatgtgccatggtggtttgctgcacctattgacccgtcctctaagttccctcccctcacccccacccttcaataggccctggtgtgtgctgttcccctccctgtgtccatgtgttatcatggttcagctgccacttatgagtgagaacatgtggtgtttggttttctgttcttgtgatagtttgctgagaatgatggcttccagcttcatccatgaccctgcaaagggcatgatctcattcctttttatggctgcatagtrttccatggtgtatatgtaccacattttctttatccagtctatcattgatgggcatttgggttagttccatgtctttgctattgtaaatagtgctgcaataaacatatgtgtgcatgtgtctttatagtagaatattttatattcctttgggcatatacccagtaatggggctgctgggtcaaatgttatttctggttctaggtccttgaggaattgctgtactgtcttccacaatggttgaactaatttacgttcccattaacagtataaaagtgttcctatttctccacaacctcactagcatctattgtttcttgactttttaataatcgccattctgactggtgtgagatggtatctcattgtgattttgatttgcatttctctaatgatcagtgatattgagcttttttcatgtttcttggccatgtaaatgtcttcttttgagaagtgtctgttcatatttttcacccactttttgatggggttatttttttcttgtcaatttgtttaagttccttatagatgctggatattagacctttgttggatggatagatcgcaaaatttttctcccattctgtaggttgcctgttcactctgatgatagcttcttttgctgtgcagaagctctttagtttaattacatcccatttgtcaattatggcttttgctgcaattgcttttggcgttttcattatgaagtctttgcccatgcctatgtcctgaatggtattgcctaggttttcttctaggktttttatggtttggggctttacatttaagtctttaatccatcctaagttaatttttgtataaggtataaggaagggtgatccagtttcagttttctgcacgtggctagacagttttcccagaaacatttaatgaataggagatcatttcccgatcgcttgtttttgtcaggtttgtcaaagatcagatggttttagatgtgtggtgttatttctgaggtctctgttctgttccattggtctatatgtttgttttggtaccagtaccatgctgttttggttactgtagcctgtagtatagtttgaagtcaggtagcttgatgcctccagctttgttctttttgcttaggcttgtcttagctatacagggtcttctttgattccatatgaaatttaaagtagtttttttttctaattctgtgaagaacgtcaatggtagcttgatgaggatagcattgaatctataaattacgttggacagtatggccattttcatgatattgattcttcctatccatgaggatggaatgtttttccatttgtttgtgtcctctcttatttccttgagcagtagtttgtagttctccttgaaaaggtccttcacatcccttgttagctgtattcctaggtattttattctctttgtagcaattgtgaatgggacttcattcatgatttggctccctgcttgtctattgttggtgtaaaggaatgcttgtgattttagcacattgattttgtatcctgagactttgctgaagttgctcaccagcttaaggagtttttggggtgagacgatggggttttctaaatatacaatcatgttgtctgcaaatagagacaatttgactctctctcttcctattagaatatgctttttgtctttctcttgcccgattgccctggccaaaacttcaatactatgttgaatagagtggtgagaagagggcatccttaccttgtactagtattcaaagggaatgcttccagcttttgcccattcaatatgatattggctgtgggtttgtcataaacagctcttttattttgagatatgttccatcaatatctagtttattgagtttttaacatgaagggatgttgaattttatcaaaggccttttctgcatctactgagataaccatgtggtttttgtctttggttctgtttatgtgacggattatgtttattgatttgcatatgctgagccagctttgcatcccagggatgaagccagcttgatcgtgatggataagttttttgatgtgcgggtaataaattcttagcacacgggtacagtcttttgtttcactttgttttcctcgttattctgtaaacctgccagtttatgcacgtcaaaggtctagaagaccttgccagttcctctgtccagagtccccaccctgccactgaggagtagcatgcagtttcacaagtcgtgttaccccaagagcttcggtttcctcatctgtaaaacaaggatgataacactttcctcacatgattgttgaaatgatcatagagtaataataatagtcagaggtacaatttattatgtgtgttatgtactgggcgttatattaagtgctctacacgtattatctcatttaatttttagaataaccttttcagtagttgttgcccccattttgcagacgacaaaagtgaggcactgagaggttgtgtaatttacttgagtgcaggtggtcagtaagtagcagagccagcatttgaacttagaatgtctggctctaagcctcagactctcttaaccacaaagctctctgtcaagtgctatacaaatgtgagaattattatgagcaatgatagctagtttaggtgattaaaaagctttatgtgcttcagagagttttcacagggtaatcatcataaattcctttttcatcgtctttgctgttccatccttgtgatcattatgcagtacctattatgtttcacctttgtgtttttttctttcttttcacaagtttaaataagggaactaggggtcttttttttaagtcaagctttgttaatagattttcagaatgcacattaaagtgccagaaattgagtgcttttctgattagtaaagattgtattggttttttttttaacaattcactttttagatttctattttaagcccacttagagctgattacaataacccctatttataaatagaattttactgggcctcacctctgacgtattttcaaattcagtctcactcactctaagtaaaataatcattcatcaagtgaaggtagggtagaataagagcatatttctgcagctacctctgtgttctgagggagccagccataaatattcagcatcggtggtcagagtttggctctgcattaaatcataatcattttactggtgaataaatgacatgtttaattattttatatggatgtataaattttggtcttgatctgggcagcatatttttaacatctggatttttttgttttcttgttgtgtgtgtgtgtgtgtgtgtgtgtgtgtgtgtgtgtttaaatcactgtttaggctgggcatggtggctcatgcctgtaatctcagcactttgggagaccaaggtgggtggatggcctgaggtcaggagttcaagaccagcctagccaacatggtgaaaccccatctctactaaaaatacaaaaattagccaggcatggtggtacatgcctgtaatcccagctactagggaggctaagccaggataatcacttgaacctgggaggcagaggttgcagtgagccgagatcacaccactttactccagcatgggcgacagagtgagactccatctaaaaaaaaaaaaaaaaaaaaaaaaaaaaaaaaaaaaaatcactgtttagctttaagtgctaggacacaaaatgtgaagtcactgtggtctttaaaaatctcaattaaccagaacattcaaattgctgggtgtattcaacactccacttctgggataaagagttaagtgacaagggcagagctggccgtgggaatcactatggggctcccagtgcctaggcaagtcaggttgagtgagcctccactccacccatcacataacacacacacacaccaatacaacattctacaacaaaaagttagcaaaagagtgttcagcaatgacagtctaaaatggaaaagtcagagagatgaagtctcaaagggacattctgtattctggagattatgtgtagagagatacagaagaaagtcatttggcaacaagtttcaacaagcttctgttatatgggtcacccttacagggtcgtaagcatcccttgggggattgttaaaaataatgtttaggaccctgtcctagtcctactaaatccaaatctccagaaaacccagggaaaatgatttatttaaagggccacaggtatcttggacacaccccagagctactgaatcacagtctctagagcttgggccaggaatcggaatgcaaaagaagctccacaggtacttctgatacaaacccccggcttagatctctgggggtggttcctggcaatctgcatctttagtccatcctctaggtgtgtcttacagacaccccagtttgagagacatggcatcaactattgttctgagttttatcagagcagaggtagccaaatcttctagaccttatagatcagctccgatgcacaagattggcatgaaaacagcttacattaaagtttacttaaaaattacacatttcctattaattttaatcttcacagtcttatgaggctgctgtagctggaattataagtgaagaaaatgaggttcagaaaggataagtaacttctccagggtattttctgagcactctgagcaggtggcagagtttgggctcaaatcacatctttttgactcaagccctgagctccattcctgcacttatgatgtggtgcacagtgcctagatagcactttcacacatagaatcttccttgtgctatagaagagccctgtaggcaaagttacttatcctttctgaaaaatcacaatctcggctcactgcgacctcaacctcccaggttcaaccaatcctcgtgcatcagcctcccaagtagcttggactacagacacacaccagcatgcccagctaatttttgtatttttttgtagagaacasgrtctcactttgttgcctagactggtctcaaactcgtgggctcaagcartcctccgctctgccttccaaagtgctgggattataggtgtgagttacctcattcaggccctcctgccttccttttattatatggtagggtgggatgggcaggaatttgttgtcttttgggggcttctgatgtccraatgtcttattaattagccctaccaacagacacaactcagaccagagctaaccctgtcaatttagacatcacttcctctaggaagcctttgctatatccctccagtaaaggtcacatgacctcctctgcacactcagtctccctgtctttgtccatatcacatagcactatctgttccatgaggccaggtattgtccatatgtacaataggaacataactcttaatcaaatattcgtggagttgatgaacaagtgcagttagaatcagtggataaatccttctaatattcaaagcaatgaaggcagctcacttttctcctatgcctattctaaaatcaaattattcttttattcatattgtctgttttaactagattttatgtgcataagtgtattgtaaagtgggaaggaagaccactagaggcaagtacttccttctccatttgatgatgaggaatctgaaggtaagaggcagcaagtaacttttctaaggtcacacagcctatcagrtatagagctgggttttgcattcaggtcarttgaacattgaaccctgaggacaggcagctggtaagtatcacagctgagattaaaacgcaagccatctaattcccatcctcatctttcttctgcttgcttcctgcctaaaaaacaggataacaaaggagggttgtttctgtttgtaatttcaaagttagtactcaatatatcacaagggtctcttaaatcatacagtgttcattacctgcatattccttgtgagagttaagctttggtcttcctcattttaccagatgggaaaccaaggccaggaagtttcagcattctcaccagctcttcagaaagctcatgtatcttggaagcagaatgcaggatggtgctggaggggctgagagtaggtaggaaattaagggactctgttaggagcagtggagtaaagacctttaacttgaaaccatttaaaaaatactttcataccatatatttgtgagcccaggtaatttctgaatttctgatccaaatcttttcctccaaaatgcctgctaagaaactctagaggtcgggggtgaagcggggagggagaaggaagaaaaaaaaaaagaaagtacaatgattccattcagaaacttggtccaaatccttgtctctttcttctatcagaaatcctctgttgtcagtccctggcatcacctagagatttccttaccagcagcattcttatgtttttactaaaacttctcctagaagagcatgttttgcttttaggagccagacttaagaaagtgcatcagcttaaaaatacatttgcttgtaatttttgtccatgctgccatctgacaggatttgaggatgcttccatttctgccaggataatagctttgttatctgctgagatctgcaatagctcgacagcacaggaaatctgtgtctcagccccctgctccaagtttagctcatccattacctaaaattgggtttacacaaggaaaattactttagtgctaatccagttgacttgtaaagtaaatttagcttcctcgggttcctagtcccataatctaaactgatttcaacaacagctttaggagtcctcccacacttcttaagaaccctcaggagcatgggtccccagcaagctgaccacagctactagtcatcttcaagccagtgatgtttgctgccttggtacattgtccgtggctccacaattacacactgsagggtagggctgggagtagtgggagaagatagccttgggctattcatttcacatttctgtgtctccgtctgtaaaatcctggtaacaaatgaggtgccacatagagggaaaaagtggaattaaatgttttgaacccaactcacagaaaatctgtggagtaaaaagctgattacargtaacaaaatcttcctttttttctcccttgttcctaagtgttagacctgggttcacttgccacaacttataaaccaatcaaatgtgatgatgtttaagacttgcttacagtggtttccccaaagctaatcaatgaaaagtccttacattccacaaactagtcagctttgcagcaacagcctcaccttcttggggaggcacatgatgtgagtcacacaattttcatgccagcccagagcgttgggtgccattacaaagccatgggtgtcttacatgaatgggagcctcrcggggggttgaagaggctgatctgatctgtggttcctcaattcagaggacatgagcttttgaaaataggcctttctaggtgrattggcctgcatgtcatagtttacacatactgagagctgatcatatatcaataattgttctaagttccattgtgggtgagtgctattgtgatgtgctattgtgtgtgtactattgggtaagtgctattgtgatgtttatcagatcctcatcataaccacatgaagcagtaaaggtattatctccaactggggcacagaaaaaaaaagttaacttgtccaagtcacatagctagtaagtggcaggcctagaattccaacccaggcattctatcatgattactagtggccacgaatcagatgattgtagtaacttgtcctggacttgggagatctgtatgctgactcatagagccctaacagtktcttaattgatacgcccagtggtttcttctcagtcaccagtgaactttgtagaataggatgcagctggttaccctttcatagcatctttcacccttttttcccacctctttgagactctttttagtgtgctttgttgacttctcttcctctttcaacctcatatttgtggattcccccacaagtttctgtccctgcccttcctccttccctcaccatctaatctcacctgcatacccagtgtgctcatcaattcttataggttcaactgkcagttctataaggatgactgaaatttatcagccaamcctgactcttttcccgaatgcaagacctgcatttccagcctcccattggacatttccctatggacagcctgccagcattccctatttcacctctccacattgccgcactaatttgcacagtagccagtacataataagcatgtgataaattggtaatagatgaaagaatgcataatttaatgaaacagttgccaccttccatagatttaatcttccagactgctcttacctaagctactttcttccgtttttctgaatcccctcacttaaccctgctctcaggtgcccctcaacctgcatcttttgtttctctttgttctggtgcctgttttcttctcttctacactcttttatagttatttctgtaaatgtcttttctattcaagaatrtgcatacattaagggaagagattgtattttcttcattggttttcactaaatagcctaacaccgtgcatttcacaaagaggcacaccatatctatggaaagagtgaatcagtgaaagtagacatagcactctgcagtttacaaagggcttcacaggtaccatccctatattctgcagtaggccgaagagatagccgttgagtcattagccccattgtacagatgaggaagctgcaagttagtgtggtygttaatggtccagaatctcactgctcttaagtttccaagccattcttatgattttaaactggaaggcagatcatcccctcatcatgactttctcccccatgtactcgggaaaaatgagggagagagacaagagaactttggggtgaaaactcacattgggaacaattacaagtgtgtctgatttggtagcttggatgttacaaccactcatcaattttcatgtggcttcaaagaccctcatttgaagctcctaagagcagctcacttcagaagagacccaggtaccaatttattctggagagttccagtgtttcgtcctaaaaaaaaaaaaaagaaagaaagaaaaaagaaagcataaagtttaaacagatccaaggatttttcttttggaatctgacagatctgggttggaggcccaactttaacatttaacaatcgcctccctgcccccatttataaaatgaagataaaaacactcttactcgtggtgatatatgtggattaaaaggataaattttaaagtgcttggcatgactcctggcatgggaactcagtccattttctccctctgcccctgaattgtgcctctgcctttaactccttctatatgtgggaccatgaccggtgaacttggggccaagatgagcctcacctaccaggggtagagagtagaaagcccaagctgatgactgaagctggaagtgtcagcttcttgcacaattgctgccctcttagagctgcttgaggccatctcaacgtgcaacatgactgacatgcagttaggtcattgaaatcacaccatcggaattcttcagcttaatatgtcgcttcttagaaagttaatgcccttttgatactatcagtatgaaatgttgagaagcaaaagctcaaaggcttaattttagaagagagagagcagtttctaaaggagtgactgatgggagagagactcagtagttgactatgcaaaggtgcccagggcaggtgtgaacaacaaagctggcttcctgatacaggtagtactgaaagaaccccggctccacagccctgcagcacctttaaagaaagggtgagggagacatgcttaagcatttttttttctgctccacaacagggcccagggtattgacagtgctgacagarcaactgagaagttgtttaggttggcattaacaaacccggcacattgccttttctgattgacacaattcaaacgggtatcaactgcctttcagtaccactgagaagtggtgaacgatgagggaatcatagggccatccaagtgcattcctagcagggaccatgaatcagccttatcttgtcccacctcctctttacacagggaggtaagccaaggctcaggacatcatcagatatgtgataaatcctccattaactggaatagtcagttaacaagacttgtttgccttttatattgttatagtccaattttggttaagtagaggtaaaataggtaaaaataagatggttgtttgtttgcttgtttttgagacgaggtctcactctgtcaccaggctggattgcagtggtgcgatcatggctcactgcagcgtctacctcttggactcaagcaatccccctacctcagcctcccgagtagctgggactacaggcacgtgcccagttaggttgggattttttcaytgaagtgattttaagtaatatgtacagtttcacatctggtaccttgctccaccatttactaactaggtgaccctggacacatttctttatttttatttttataacttgctctgttgcccaggatggagtgcagtggtgcaatcatagctcactgcagccttgaactcctgagctcaagggatcctcttgcctcagcctcccgaagagctggggctacaggcacatgccaccatgcctggctaatttttaatttttatttatttatttatttwttttgtagagacaggtcttgtcttattgcccaggctggtcttgaactgctggctttaagcaattctcccaccctagcctcccaaagtgcatttcttaaattcttatatatgcctcagtttactcrtctgtataagagggtaaatagaacttacctcttatggttgtaacgataaatraataagataaagtatatatatgtgtatatatatatatcacttaaaaagaataagcactcaatatatatttattttattaatactgctattatcatctgcttttgctctatctctattcctgcctgatgcacctgaaggttgagcggcattgtaaacagagggtggcagcatgagcttaggcattgtgtggaactggatgtgaacttggggaaattgcttcattctctaaacctcagtttcctcatctattaaatgggaggagtaatacctgcctctrcatgattcttgtatggaacaaataagatcatatttataaagtgcttaatacacacctgccaataaatggtcaacatgattatggttagaataaggattctaaaagcattataaagtgccggatcatgaaagatcgtagctcttcattgattcagtatttatctcttgagtacttgctttatgccagatacagagtttggcactggggacccagatttacaatgtgttgaaacaaatggaagtttctcgtgaactcttggtcactaatgagatgagaccatcccgttccaccgcactttcaagttaatccatgctcttctatagaatccttacattccagctgtgggatggctgtgtctcatatctcctcagatcaaaaagcatttctgcgaacagtgatattgaacattaaactggctgcatcaaacttgaaaggatggggcggtgattttgtgtcacaatatttttaacattatgcctggcgaatgtgcacatgttagatataaaggaggtttccaaaggggaagctttactacttggacttttaaattgccaggctgcattcttgggaaagccacataaaagaatacccctttttaaatgagtattacctcaaaaagtatagctcttttacgaaaggaatatgttgttctgaagccttgtccttgatgattttactgatattgtgatggttatttcaactaacataagaaggaatctattagataacaaacattcacagattgcctctgcttgctgggaattacatccagcagcttgaagagctgggtatattgaaaggaaaagggcgttttaaatgtataatctactcttccctttggcaccaatccgtgtagtgagacaacacttggctgggactcgggatctggccctggcttccattctgccatgactttgagaggaaactcaagttccgccttctccaggaagttatccctgaccaccccagcctacggtggattttcctgcactgaatgtgttacacttagattccatggtatatgatttaacacatggcctctcatatgaaataacatatgaaatgttatttcaacattttatatcttgtctctccagaaacgttacatgctccttgagggaagaaatcaagtctaacctgccttttgaaccctctatgtagtgctataaaataaatatgtcctcaaccaagtcctgattgactaagaaaaccagtgattggtcaatgatgttactttgtctyctgctaaacatttttggggcaggggatagaggggtgtgggagaatgggagttcaactcagaggaaacttagtaaagaggaaaagacataacagacctggtattgagtccccatctggccaattaatcaccaagttatcaaataaagcctatttgatctcttcgacctcattttcctcatctttgaaatatctkcctcttagcatgattttgaggatcaaatagagataatatatggaaaattctttgtatgcaggagcccactttgtaatgttattcattgcttcaattttcaatttggcttgggttaagaaaaaaagtatttttttttctctcaaaccagtgagcrggggaagaatgataaaaatcacattttctgaaattactctagcttatgtaagaagtttgatctgccagtatttgcctttttctcacatcacctgctgcatgccacacacctgatttgtctgttgtgttcatgtaggattttgtagctcacaaaagcattttcacatgcattatcatacaaaaaccctgtgatacaggcactgtggaagtaagtattcccatttcattgatgagtaaactgagactcacagaggctttaaaaatgccccaacatcaccctatcaggctgacagtgcctgccttcctccagccttgtcctctttccacaacaccacactggttctcctgtacaaatattaggcagctcccacaagacattctcagtcacaaacatgatcaccatctacttcctagtcaaggagatcagttcacgcattttgtcttcatacaaataattaaaacagggactgggtaccttggcccatgcctgtaatcccaacactttgggagttcaaggcggggagatcacttgagcccagggatttgagaccagcctgggcaacatggtgaaaccttttctctacagaaaaaacacacaaaaattgctgggtttagtggtggcacttatggtcccagctacccgggaggctaaggtgggaggatcacccaagcccagtaggtcaaggttgcagtgagctgtgattgtgccacagcactcctgcctgggtgacagcatgagaccctgtctcaaaataataataataattaaaacattcaagcaagatcccattcagtttataagtcattaataattcataataaatgtaaacattgtaagcctggcctttctgtatttagcagtatagcaaaatggttaagaattagatggacctggccgggtgctgtggctcacgcctgtaatcccagcactttgggaggccgaggcaggcagatcatgaggtcaggagttcaagaccagcctggccaacacggtgaaaccccatctctactaaaaatacaaaaattagctgggcatggtggtgcatgcctgtaatcccagctactccggaggctgagtcaggagaattgcttgaacygggactcgggaggcagaggtagcagtgagccaagattgcgccactgcactccagcctgagctacagagcgagactccatctcaaaaaaaaaaaaaaaaaaaaaaaaaaaaagaattagatggacctgatcytaatgctcgttctgatgctcagatcaaggggaaaatgaggaggctttttaggcctcggtaaatcagagttaacaacacccagttaacaagcccagtgtcacagtgagagtgaaatgagataatgcatatatagcactttctcctccatgtgactcatagataaaagctgttgatatttcaactgttctgggctatgkaaattttaaaagatttcatgtctaggtgacacgtgaaagtccagcacgtggaccataaatgttgtcatggtttgacagtattaatgaaacacttcatcgtgtgtcagccagcctcaccttgacaggtcatctctggctggcrtaacccaagggccaatgtgaaaaggacatttcactgaggacatgatggggttgccttgtttttcttgcttcttaaagagccatttcaattaatttttttcacacatawtcctgaccccttggcctcccagtagaatgctatacgtgcacaacaggaattttggcgtttattgtttatcctctgggggaatgtggtcccccttttactgcctttttcagcccactccccccagttgaatttttctgagaggcagtggaagggaaagtatatacccccatagttgtatttttttatccttattcacgattctcaacagctttttaaaagtgatggctggcagccaggtacagtggctcatgcctgtaatcccagcactttgggaggctgaggcagaaagatcatgaggtcagcagttccagactggcctggccaacatggtgaaacctcgtctctactaaaaatacgaaaattagccaggcgtggtggcaggcgcctgtaatcccagttacttgggaggctgaggcaggagaatcacttgaacccaggaggtggaggttgcagtgagcccagactgcgccattgcactccagcctgggtgacagagcgaggctccgtctcaaaaaaaaaaaaaaaaaaaaaaagtgatggctgggggcctatagtctataatctgagctgacctatatccatggcacatgtgttaaaggtggaaccatagtaggtcaggacagccatgtaaggtgtaggtgataatatcctgactttggaaatgaagaaatggatgcttaaatggctaagtaattatttaaggccacatgggtaagaaagggcagagctaggatttgaactctggtttatttgattccaaagcccttgctcttggatgctgtgacttagagwttttcaaatgccactttcttaaaaaggggtcttctagaaataaaaacttttaagaaaaggygaactttcaatggtggaaatgtgtgtattgtggcagtccagtcaggaaatggtgtgttatttttgagaagcaaaaccttttggtggttctcgactgttctccaaagacgcaatgtgcactgggcctccacgtagggarctccctttgctgagtctttaaaggaacctactggctgatgatgattattattaataaagtctaatatccagagagcaggattctttcccatgaacaggaccatggaaagcctggagttgggggaggcctagggagtcaacaatacaaaggaggcagtaggttcatggagagygctgtgtgggggcacagtgaggaattgctacggggagcctaaagcagcattgtccagtggaaccacatacgtcatcttcagtttttaagagctacattttaaaaagtaaaaatgaatgaaagtaattttaataagctatttttaacccaaagatccaaaatattttcattttaatgtgtaataaatataaaaatatgaatgagatattttactcttttttttttctttggtactaagtctttgaaatccagagtgtattttacacttaccacacatctcagtttgagcccaccacattcaaatgctcaaaagcaggcacgtgtggctagttgctaccatactggaccaygtaggtctaatggtaacaatggcactgcagcctccttgacccagcaacactcactctcctccaccccacttcattttcctgcatacacttaacacctgccagactatatatttcctttatttgtttatagtctacctcccagtattatttagggttcagtctaagttggtgtaataaatggatggatgggtggatggatggatggagaatggcttaatcaaggtagaaatggatttccctccagtctagaggaggctctccatagctggaagggtatctctgttcccagtgttcacattaacatccagcctcagtctatcttatccctctgccagcctcaacctgtagtgtttaccttgttctggatgacttcttcagcatttctcttcatggccacactccagtcagggagatacccctttttttttttttttttttttttttttttttttttttttgctcagccctatcttctttcttttcttctttcccttcccttccttcctgtctcctctctttctttccctgtccctcccttccttcctttcttccttcctccctccctcctcctcccctgctttcctcctttcctccttccttccttccttccttccttccttccttccatctcctgtttctttattttggtaaggacctgacccagaggtggtacaccttgatcagaaggtaaacacctccttgatcagaacatagtcacatgaccatatctagctgtggtctccagctggtggtcagttaatgtaaggagttctactattaaaattgggagagaagagcagatcttgatggacaactagaagtctccaccactgtccctcccccggaatgtaaactgccatgagggcagggattttgggatgttttgttcaatgtagtagacccagcagtggtgtaccaagggctgggcagtgggaatatgcaccctggcggggaagagtattttaaacaacattgtttgaattgccggtgcataacggtaataaaagtggactaacataattggtctcattattgtttttatattatccacagagtctgcatccaatattggctgcaccagagcagactgctctgttgcccagcccttggtacaccactgagccctggcacctaaaatagtggctactcatagcaagcactcagtatctgcagaatgaaccaatagatctacctctgcctcttttccttccatttcttcctgacttctacccttggagaggcagccctcaccaggtagtagcccttatggcatttcattatggttagctacttcttcctctttaaactgtgagctctttgagcaccagaacctgcaccagctgccacaacctggccaccaaccaggtgctcaattagtgctagttgaaggaaccagtaaaattcattgaaggctgctccccttagcctcacttagcctgcatttagttgactccaagcaggaattttctatctgattctctttgttttgtctgaacccgagatgttgaggctggaaatacagtcaagatccaatttgtgagctarcttatgagtcaggttaaggaatttacactgtatcctaaaaacagtaggagtcatcaatgcaatttaaccaggtggaactttcattaaaatgtaactatgtgatgtgaggatggggaagaaggaactaattggcsctttctcttcagacctcttgacttcagctttctggggactggcatttccactgttcttccatcatttctgagggtatcattggtttaccctctcaatccaaatgttcctctgtggttccccattttgatgtttaatctttgaggcatccacttatgtattcatcgatccttcagcagtcatgtactggaaacccttaggatgcatgctctgtaagacagggcgttctgccttgtccactgctgtggccccaagagtgggaggagtgggctgtcagtaggccaccaataaatatctgtgttctggctgacccccatatgctaggatactggagatgaggaactggagaaggtgcttaaagagcacatctgtctggtagaggacacagagctgtccttcaagcatttgaacgatgttctcatttccctggaatcttctcctctccaggctcacatctctagctccttcaatgattcctcttgcgacatcattttagttctcttccccaacctagtctttttgcttttaatgaatgatcactgatgtatagccctgatgacatctggtgtccacagtggtgcctgatgctccgggtgaagttgaagtttgaccagtaagagggaagaaagaatggctcctccctcatttcagagaatacatcctagtcacaagtgcccctaatgtcactcaggtttttgatagctacattccctcactgatccagtagaatacactaccaactgatgcaccatcttgattaacaacagcaagcctccccttccttcctcagtatctctcctcacatggtctcccatccagatttgctttaagcctgccactctggaagggacaccagagatcatttaaataaaacacrttatagaactggttaataggctacctctatgtctctgcaaatattccaagcatagtttggtgagtataatcaaagaccaaaacaatgtttgatcctcatggagggacactatgtcttgttatactattgtaagttcccggggttttattcattttggcatttagtggatttgtctttgacatgttggatttaaggacatcattattcttggaatttagaaaagaacactgtgcctggcatgacatgaagccaacttagaaaacccaaatttgaatcccatttttgccacttaactagctgtgtgatcttgggaaagttggttaatctcataaaacctcagtgttttcatctaataaagaatactaatataaacatagaatggacagaaaaagtgctaaaaatgtacaaacagttcatgtaataactagtacaaaagttttacaaaggtgaacatatgaaaaagatgtttaactttactaaggataaaaaacgaggtatgatcttaaaaagtgattttacctagcaggtactttaacaggcacttgtaggcattgagtgcagaaaaatagatactcttccccattgatggtagaaatataagtcataacagttttcttaaaagatatttataaattcatgtaaaaaccctgaaaatgtgcataccttttaccccaaaataattccacttattgttttgagcctagaaaaataatcatagcagtatataaggatctatctacaaggatgtttatctcaacatttttataaataatgataagttgaatataatggtaactgtgtaattgtggtcactaaaagtaatattttagaagaatacttcataatgtggaaaatacatattacattaaaaagaaaaaactatgtctagtataattccaatttgcaaaaataatttgtgtgtttatatgtatgtgtacagaatatatgctacatattaaccttaattatctgtggtttgtggatgtagatgattttaattcccttctttgtgcttctattcttcaaaattrccacaacaagtattatttttaaaagggtggaatgagaatgccctggggtatcttataagaatgtgatgaaagtctaaatttaaattataaattaaatcatgcacatttattgtattattgttagatattagactgatctcaagctttgcctttctttttctcccttcttccctttctccttccctctctgtctccatctgcccctttttcttttcttcactgtctattctctcctttccttctaggcccggttttttcctgctccttccatggggagcattgctcagctgcccctaggattcagagtcaaatagtttgctgaccctggtctgaagctcatttgaccaaactgagcaagaagtgcacaagtttcttgcatttccttccagacctctagtagccctgacacacatcctggactaatcaagactatgtgaaacgtacgtccatcagttcagagttgagctcttgtcatataggagcaaattaccaacttctcaaaaactgccaggggtgggarggggttctttccttctgcatcccaagtgctggatgcctctgccttccaacactactcgaaaatagctttgtcaaacaaagcatgaacactaggagtttctgacattttcataactatgagcatatgatttgcagttcatattgaataacgatgtaagaaatctgccaagaaagctccaaatactatttccagcactggttcataaccagttacagctgcctcaccacagaatgtgagcacaatagactaccatgttccatggtctcttgcttgcaaartttgtattgagttactaggagtcattctaatgggggaagtcactctcctggaaagcatttaagatgaataaagtgaagggtttaatgttctaatgaaaaaatttgtcaatatattaatcaaatgtgtgaacactaaacgtttttacgtatgtttgctgtagaggttttaaggcgggctttggctttccagactcaaataaagtagatagatgcactgttaaactttcgaacaatgacaaagaaaaacatggggtaattgcttcactcaaagcctgccaggagattaattgcctaagagatgtattttgtgcagtatccaaaaactgcagaatctacaggagtgtcttgctttcactaggagaaaacgtatgtcacctctcaccaaagatgtttatgtcttttcacaaacctgtctttttgcagtctaaaaacattccaactggaaatgactacaaagctgggagttgataggttaggggtgtttagtaaagcttcaaatactctcatggagtcagatacgattccgtactacgagccccacataacagcaacctgggcccagggattgtgaagccttttcatttctggttaatcagtgggagaggtggggagccatgagcctgccttggacccrccagccccgaaactaaaagactaaagttgcagggcttatggggagttcgcctagtgcacttaagaaatagggatggaacttgccttgttccacctttgggattgtattcaaatgagggcttgctaaaggctgaaggtgttggaatctgtaggaggtctgtgtagccatagcagagaaacatagagtgcgcttttataaacatttatttggtgccttctacaaaccaagttatatgtactagactctgctgggagtgagactggggttgcattactactacatggaaaagtaagaacagttgctgtatttctggaacattctgcctggtagaggaacagacttctcaacaaataataattatacagtgaaggatgctagagagaacatattttctcatgaactaatctgaaagtttcaggaaagcatcttaaaggagataagactgaaccgaaactggaaggatgagggacagagagccaggtgaagaaaaatgagaatggatttcctggaagggaaatagccaaggcacaaacatcagtgccagtgtgatatgttcagaaactataagctgttctttaataccaggacctgagaaccaagaggggcaatgcaggagactgggctgaagatgtccatggggcagttatatagggaccttgtgattgctgttaatgtgctaggactgttgccagtggactttatacaatagagagtcactgaacatttgtgagaaagagataatgcaatctacctattagctcatcattctatggcaacaggaaagatcaatttacaggccaagaatggaggtagagagaccagttaggagactcctgcagccatcttggtgggatattttgagagcttacactagagtaaccataaaaggttagaattggaaagaacatattatacagttcaacttccatattatacaaatggagtaagtgaggacaaagaaggtaagtgacctatccaaggttgtatggaaataaccttgttggcagccaaagtgggaccaagaccctggtcttctcatttccagtccrgtgacttttccactcagcaatgccaagttcagtcccagcatcatgcttcagttagggaatgccctagagaaacttgaaatgtacttggctggcatttttcctggccatatctaggaagtgagaacagtccttgttggatggagggaccttgaatccagccaggctgcctgggagggatctttttctgttcattatctttctggctttaggtacctcccacatcttccaccctcttcttctcctctaaaaatccttcttcagccattgcttacaaattctctcccttctgctgagtctaggcagtgtagaacaaaacctagcaccttttttcaagtttgtttcctcaatattttaacctaactattgtatcactgttaagcacttgggcaattttgaggatgaataatccaataaaatcgaactgtttccatctaaactccttccacactttacatggyggtgttatttgtgcaaatactgttttgtgttgtctctttttcactaaatcatatatgtacacatttcaaagctcttggctttattatatatttcttataatggacactgcaagaaatttggagcaagacctaagcttttgggaaagagacttaatctctggacctaattcttcaactataaaatggagataatgctacctaccttgaggggttcctggtacaaggtaggygtatagtaagctttcatctctctctctttctctgtctctctctgtctctctcctctttctctttcctctgtgtgtgtctgtctctttctctgtctcctctctctgtctctctctctctctgwctctctctctctctgtctctctctcctctttctctctttgtctttccgctgtgtgtgtctgtctctttctctgtctcctctctcttggttgcttctggtttggggcaatgtagtattttcataaacatgtatgatcacaaattatatccatgctgaaattcaaaggtaatttttttgatgtctacctcgaggcctagaatactgttgagcatagaataaaatctcaatagggcataatggtaggaagaagaaatgaagaggagaaaaagaataaaccatcttaacttgaaamccaaattagctgagatgctcgtgagcttccaatctcatacaggcattctaataacaagtattcacttactgtggacccaagaayggccagatggcttgtgaagaacatcagcctcagcaatcacacagatttccaccttagatggccttttgcagcctttggaggatggattggaagagtggaaggttggaggcagggctctcagtgaggggcagctgacaggtggtgggacctgagccatgagggaagaaagtggtcaaattcaagaattcctttggaagcaaatttagttttcaaggttgctactcttagaagctgcccctcttcctcttctcattatttcttccatttagcaaaactaaatgcatggggaggccaggtatggtggctcatgcctgtaatctcagcacttagggagatcaaggtgggaggattgcttgagtccaggagttcaagaccagcctgggcaacatagcaagaccctgtctctacaaaaaaaaaaaaaaaaaaaaagtraaaaaactagccaagcatggtggcacaagcctgtagttacagctactcaggaggctaaggcaggagaatcacttaagcctggaagtttgaggctgcagtgagctgtggtctcaccaccgcactccagcctaggtgacagagtgagatcctgtctcaaaaaataaagaaaaatgcatggagaggttgggtggctggggtggggaagtagagagattgactacacatttcagattgctagaggatccctctttgctgccaccacacagaaattaaaataaaaagtgggagagatttaattcacttattgaacgtttatttattaagtatcaacaacttgacactgaataggcactattctggccattagggacatagtagtgaccaaagcaaagttcctagtcccatgaagtttgtttataaacaataaacaattgaatatatcaatacagagtatgcctgatgagactaaatattaacacaagaggtaataatcaagtaagtgtcggggggaagtggcagggcatgaggtcagagaggcaaggtgaggcaggagaagatgatgtaaggatattgtaaagatgccagttttacttagcatgacaagggaagcctttaggaagattgaaacagaggaggaacaggacaaatctgtgcattacaaattaatcattattttaatgtgaattgctgcttctgccattataaaaatttgtaagattctacctgtgacatgggcatctctgtattgcctttgggtgggtgctggagttgagggtacagagaggcattaaactcaccattgctttttacggaggccagtagtctttttttaaccaccatcagcagaaggaatgggaaacaaagctgagatgagacagaaaagcaagaattggggattgggtttcaccccacttctgagtagtaagatgaaattaaaacccttctaagatgtccctgaattccatttaccactctttccacaaaccttctctttttcaatccatgcccaaaggcataaaaggaaagaaaaaaaaaatcaaagcaattccagtaacacttgtggtagaaaatctgcctagattggtatgtgtgaatttcatattattctaaagtcccattattcttaataggcaattttagggggtggtttgaatgcctgatatttggagaactttcaaagcacatccaaggggtctctaataagaacttgggggcgctgaactcggggactccaagtgtcacctatgcatttccagcttcagcctaaccttgggggcaaagcaggcccttaacagaggaaaagtaaaaacaaccaaagcattcttagaggtgcaaggccgccctatcatgaaaacctcagtaaattgaagacagtaaaaaatcactcattcttttgattagcartcttctgtattcttgcaaatactgtactagtgcagtcctatcatttcaaatgtgtgtttaaataggaataaaatatattacacacataattttccctcaaattacgtttgtgagatacaagcctgggtaattctgctcctgttccaagtgaaatgcaaacccttgtgtttccaaacatcactatgaagcaaagccaataccttcccttttctgagttggacacaagtaactcttccgtgctgctctggaaactatgacagaacgttattcatctgtttgttttaatagccaagggaaaaaaacttcaaaattttgatttaattttttaaagaaaaaaaggtggtatgaaacaggtcgagggactctttagctaagcgaataaatgttaaccaaattgtcactgaccagatgtgggaaccagcatgtgatattcgacacagtcacctcaaaattgcttatgcttacaaaggcattccaataaaagaaaaagggatgtaagggttagctgaattctcaaccctatagatttaaggcttctctgtgagtcgttggccctctgggttgacatgccttgattggctccctttcaaaactgaccttaaaggtcaagtatgttaacaygtactttttgatgcycactttcagaccggtctttagaaagcagagtttgtgagataacttcaggatcacatatttaacctgtaatctcttgaccacagccagcctgaggtgaagtctgcttttggtgctcccgacagctccccttcctggatcctcaccctccccagccatccctttccttgtctctgcctatacctgtccagagatgctccctctcccagggccatcatttcaaggtgtgtgcagctagggctgataagatttaagtgatgccccctcctcctggttagcagttaactaaggttgcttccaggcttgaagtctcctccagaagaggaaggaggtaggttggaataggaggtaacttttcagaccacctccaattataatctgttcttaaagtttctatgtctctgatcttctgtctacattggaataattctgcatcttttacttggatccttaattttataatgtagccccrtttttattaaaagccagggctaattttaccttgagagatctgtttgcccctcccaagggagaagaacgctgcctctgaagtgggaagcttcacactcagctcgaggttactagagccattatgtggccatgcttttaaccagatctgctaataggtggcccrattcacaagttttaaaaagggatgttttccatttattcatggccatgatggtcttttgggaaagcattagtaagttgtgtttgcttgggtaaagagaaattgctatccayatgacagaaaataactcccactttaataaactgctcactgagcaaacctatggaccgtccatctctttgagctgtgtgatgactttccttcaagggttttaggggcagccatcttgatgtgatttcctctccatggctcaaaacagggtgtatgaaaggggctggggggataaattcagaggtcagaggtgttgggctatttatttcactgctctctgtccctatgaggctgccatgctgtgggattgccaagtcactgtccccggcattccatttgaagagccatgagaatcagaacaaaagaacctgctgatactgagtaaactgctcatgcttatatcagtttagtctgcttggaagtgacttacaaagctacccccacgacctcccccaccttgaggcctgaatttgcaaccattggccctctcccaaggtccctctaccttggcccttgtgtaaatgatatttttttttaattaaggtggaattcacataacatagagttcaccattttattttattatttattttgttatcgttatgttttaaagagatggtcttgctctgtcacccaggctggagtgcagtgatgtgatcatggctaactacagcctcaaactcctggactcaagcaatcctcctgcctcagccccctgaatagataggactacatgtgtgtgccaccatgccctgctaattttttcatttttaattttgtagacacagagtctcactatgttgtccaggctggtcttgaactccaggcctcaagcaatcctcccaccttgatctcctaaagtgcggggattataggcatgagccactgcacccagccagaattaaccatattaaaatgaataagtcaatagtagttagtatattcataatgttgtataaccgccacatctgtctacttccaaaacattttcatcatcccaaaataaaattccttgcccgctaagcagttacttcttattcctccctgtccccagcccctagcaaccaccgatctgcttttctctaaagacttacctattttaaatatttcatataaatgggatcatacaatatgtgccctttttgttcagcttatttcacttagcatgtttttgaggctctcccacatcgtaacctgtttcagtacctcattcatttttcatggctgaataatatagtctattgtatgtatctaccaccttttgtctatccattcatctgttgatgaacacctgagttgttcccacctttggactattgtgaatagtgctgctctgcacatttgtgtacaagtgtgtgtttgagtacctgttttcaattctttggtttaagtgagattttacagtcaggaaagtccctctgcatccattctcttctcattaagaagaggtaggagacccggcgtggtggctcacacctgtaatcctagcactttgggaagccaaggcaggtggatcatctgaggtcaggagttcaagaccagcctggccaacatggtgaaaccctgtctctactaaaaatacaaaaattagccaggcatggtagcacacgcctctaatcccagctactcaggaggctgaggaaggagaatcgcttgaacccaggaggtggaggtttcagtgagctgagatcgcgccactgcactccagcctgcgcaatgggagcgagactccatctcaaaaaaaaaaaaaaaaaaaaaaaagagagagagataggcattttaactgaaattatccccaaaaagaatattttaggaccaaatttgtcagtaccgatcggttcagctatgtctgcccatgccctgtatattctgatgaggaagaaaatcgcttccaattagaggatactcctggtatggagaagggtccactttggtgggctaccctgggatagtctcctcatctcttctagttctattggcctgtcagtggtaaggtgggcgctaaacagataaaatagtatatgaaactggaaatctgtggaatggtttgatgaaagtactgggaatgggtggggttagtgagtgactaactttccagggaaggtaggggcatttgggtctgaaagatgagaacattcacaaggagaacgagggggtggagggcatgccagccctaaggatgagcatgggtcaagccatgtccgcatcgaagtgcatcctgtggtttgagactagcaagatcatccacatgactaataccatcaggcttgtaggcttgtctggcagggaaggaagctggaaaaactggcaagaactagattatgaagtctctgcagaacagcatttcctttccttgctctgcagtggttcctagatgggcactccttttgctgccgcactgttccacgatccctcttagcactcttcaaatatccttcataagctccttgccctggagaaggaggagaccctggaggtggattacagaccacatttgcgtttcccaatcccatggcagagaatatggcaggttgtagaggctggcaacatggtaactcaattacctttatgagaaacatgagctcccatcacaaagcacccctgcaccttgacatcatggtgaggcagcggcgcacgctggtgccagccactgtgatgaatggccaaattccatttgccctttcacaatgcacttttcttctccattgaatgcagccttgggcacgctcactgcaagtgcccttgcacttttgctaccttgccacttgcttcatgtttttaatttgctgagcatggagtaaggcaggaagacatcaatgatgaaagaagtgtgagctggaaaaaagcataaagctgattaatgctggaggagcatttgttcccctccagccaaagccagtggggaaaaatggaaaagaaagaaatgtgtttttgactttatgtttaaaagaaaaccttttaccacccagaatgcaccaaagcttctccacagcagaaagcccctctaagcagtgcaaaaactccattgccaagccacttggaaagaagttatagagtgtggttagaaacactatttagagcaaatctagctcttctacttgctgcgtaactttggataagttctctatgctttctgagtctcacttttctcatctgtagaacaggaataattacatctttacctttttttataagattgttgttgggataaaatgacttagtatctgttttgtaagtatataaaacttagcagtatctgatacagaatcaagactcgttataaggtctctttctcgagtaggctgatttaactaagagtagtattgaaacgcagaacatagttacagatctaacaacatgggatagtggcctcatcttgagtttcagtttaaatcctagctccaccacagactgactttgtgaatttgagcaagttacttaacttctctgaatttgagtttctctctcgtaaaataaggataatagctcatcaggggctgctttgaagaaagcacctaacacagtacccagcccagagcagcagacacttaatacatgtttggtttttttcagtgttgtggttctcaaccacattcaaatcacctgataggtttctttaagcatagatacctaagcctcatccccagagactatgatttaataggtctaaggtggggcctgggcattcgtatttcctaaagcttctcaaggagattctttcattcttttttttttttttttttgagatggagtctcactctgtcacccaggctggagtgaagtggcatgatcttggctcactgcaacctccacctcctgggttcaagtgattctcctacctcagccccctgactagctgggattacaggcacctgccaccacacccaactaatttttgtatttttagtagagatggggtttcaccatgttgactaggctggtcttgaactcctgacctcagatgatccacccgtctcggcctcccagtgtgctgccaaggcgattctcataaggagccaagacagaaccactccccagcagataacagtacatactggttttggggtttttttgtgttcttttttaaaaaatctgtctcccaggagactgaacaggatagtaggaattctgggaatagtcaaaaatttaatacacctgcagttctaagcctttgataagaaatgtgcagccaaggaattgcattccattttattctgaaaaaaagtattcaaagagtctttttaagagtcttgaactggaaaggtggtaagaagtttagcctaagcctcacacataaaatatgggaactcccagtaggttggggatttatatctgggggtaattccagggttttgtcctcccaagagatataaattgaagccttgagagtttaatgtgggggagaaagaagtgttctcataatgacaccttaaaaatccagggctctgctaatgcctagggatagaaaagcatcatctgtaatagcaggggggtggcatgggggtgtattctggtctctgtacttaggtttccaagatccaagtgtgggtcatcaagaaccttctttctccccataggtttatggtattagttacccaataaaagttgggttaattttacaacccaagtaaaatttaagccaaaaaggcttcagcattactctaggatttatgaaagtaaacatgtggagtgcttgcaggattgtgcaacagtaaaatttcaatgtctttatgtcaggtatatgatatattcatttgtatgtgtatttaaaggttaagtttttaagagctttgcaacacaaactattttcagtactaaactgaagatacttcccccactttcayctttaaaatgattcttttaatgaatgggagtagagagaagcagaaaattagtgtcctatcaggtgatttttccacttggtttgctcctatactttgactttctagactcctacgctagaccttcaagctgggaagtgagcaccacagcactaaccgcagtgcctcttacgatgtgggagcttagtaaataactgtcttttaaataaatgtccctttggtcattgtaaatactttaagaatagccatatattatctctacaatttaaaaaagcttttacattatctgatgggatcataatgactttcccatgtagggcagagaagtcagttactgtgtccaacttgtagatgagaaaattgtggctcagagggctcagacagcttgcctaaggatgcccaaatgttaaactcaggaagagaattttgttctcctgactttgctctgagggatttttacttagaagaaaccaaaggggaaaaacggtgtatttttttttttttttttgagatgatatattgaggaggagcatccagggttgaagtcaacttatacacgtggcaggcagactttggtttggctatggtctgcctttgagaaacagctggatgttctgcactcgagggatcttgtgctcatcgtaggccctcgtgggagatggtagcctctgccctttcaggttgagcctgccatcttgggtcttcatctccagccttagatctccagtccttttacctggcacatgaatcatgtcatttctggtgtccctctgtcttcaagatgaaatctattacccctccttataaaaaaagtcttataattttgaggccgcaaaattttaataagactatttttttaaattgtagagaagcatgaaagcaaactttccatggacattttctctagatttccttggatttagtgactcaattcaaactctccagactatggtttgccctggtcctctttgggcagggtagagataatggaggttcagcagtgaagagtcacctaactgggctaccctcgggtttctttccagctgcacccagcttctcaccccatggatccccctaattgacgtgtcagttggagtggatctgttcgcccacgcctttgtagcaaatgaagcagaaataatctgtgcttaaaaaacaaaaaactgtagaacatgtgcccagatttccaactcatttcctctttactcctataactacatcatcttccagcccaccaccagctgcgaaaataaaagcattttctcccatatttaaggatgattttgtgcttcaggatgactttctgggggtgtaggaaacttgaccaatgtgaccaacagatgttttaagaactgagcaaaagcccaattccttagcccagtcttttgtatattgtgcccaactgtgccccctagtgactatttagggtatcgsgcagtcagagcttgctgtgccctgtatgtatgtggtgcatcagctaatgtctgtctatgctttctttcagagatgagtatgaagaagatggattctgtcagccatacagagggattgcatgtgcaagatttattggcaaccgcaccgtctatatggagtctttgcacatgcaaggggaaatagaaaatcagatcacaggtaggtagcaccaatgaaattatatttgtcccttgaataactatttttctcrccaaaagttttattgagctcctctcttgacaaaggattaagctcagcatggaggttgggagcaggaccataaaaaagcatgagacatgatctctgtgctctggaatttacattaaagtaatttattgaaggttgctcttagaggaaaaggaagctttgtgaaatctcacattcattcaaacactcaataaatattattaagtgctttcaccgtaccaggaactgaatctgaatgggagaggtgatggtgtgtaaataagccaggtacgtctctgccctcacagagcttactgtttagaagcaacatgatgtcgactgagaggggatgaatttagagtttagagttctggacactcatcccagaactattatgacagtgaactttggggaaatcgcttactttcccaaaaagtccccttcttcatctgtgaaatgagtgatgaagcaagatgaccattggtctcttcttgctctagctttcaatatttcactcttcatttttcttaattgaaagtatccttttgatagaaatctaatagcgaagcacttactagcacacatgagttaaagtagcataggctgcctcataggattttgcacgcatcgttctggtggttacagcagctttgtccccttccattagtgtagttatgatgcctctgtgtcacgtatcctttgcaatccattcacattgtcttcatgacattctaatgaggttgccatatctagcaaataaaaattcaggatacccagtaacatttgaatttcagataaacaacgaataattttttagtataagtatgtcataaatatttatctgaaattaaaatgtaaccgttgtctttttctttatctggcaaccctagggtctaggagaggtaagaacaaacccaaggcagaaacatagaacagcaaaaggcccagaagctatgtggaagctatgtgctatgaggaatgtgaaggaactgagaggaggctggggggaagagggaggaggactttttttttttttttttgagatggagtctcgctctgtcacccaggctggaatgcagtggcgcgatctcggctcactgcaagctctgcttcctaggttcatgccattctcctgcatcagcctcctggaggactttttaaccaaccaaaagaagcaactgtaggaataggtagttgccattttctgaagccctcatttcaacaggaagagaattctgaaatttcaaagagcagtaagactgacagggaggagctgttaaacacccatttcaacctaatgtaagaatgccttaatgtacttttaactgaatatccacaaaagcaagtagacattttgggccaggcacagtggctcactcctgtaatcccagcactttgggaagctgaggtgggcagatcacttgaggccaggagttcgagaccagcccggcctacatagcaaaaccacatctctactaaaaaacaatacaaatatcagctgggtgtggtggcacatgcctgtagtcccagctatgtgggaggctgaggcatgagaatcccttgaaactggaaggcagaagttgcactgagctgagagcgtaaccctgcactccagcctgggcgacagagtgagactgtctccaaaaaaaaaaaaaaaaaaaaaaaaaagtggaagttttgatgtaaataattggtaacctatttataaaaatcctctcttggagatttctaatgggtatcagcctggtggaaagtttttttttaaattcatttacctttgtttatcccagcgtttcccaaacttgttggcttgtttctcaagcactattctatttcacatgattaatgttctgagcaacatacttggggaaataatgtatcagcaacctcctaggtttccttgtgaggtgtaagctccttgtcaatagcggtattcaaaggtaggctggtgcgctttttgtgcatcttaccctactagtaagagattaagctaaggaaccactaatattcgatgatacacattggaacaattgtactgtgctctttgagaacttccaagtgagttgcctcattttcagaagatggagtagaaagtattccagccacaaagaaattaagcaagttaccctaagtcatccagcaactcttgccgtccagcaagacacagaactggatcctgtgctcaggctcagccactgcggaaacaagttctgtccctacagctgtcaaatgttttagaagcctcacaaaactaataaaaagcaccagatgaaacacaaagttcgattgctttgtagtaaaaaatgaaaaatatattgtactttaacttaattaatttttttattaggaaatggtacatatgtaatttaatcctgttttattaactttgtagtcaaaatggtttttttcaagccagtgaaagtaagctgcttagacatctgaaatgaatctccttctctgggccttgtctgtttcagcacggcggattccttgcaatgtgtgtttatatctgatatccgttgactagataaccaaagaagataaaccctggcctctgggagttaataattgtgtttgttttccagctgccttcactatgattggcacttccagtcacttatctgataagtgttctcagttcgccattccttccctgtgccactatgccttcccgtactgcgatgaaacttcatccgtcccaaagccccgtgacttgtgtcgcgatgaatgtgaaatcctggagaatgtcctgtgtcaaacagagtacatttttgcaagatcaaatcccatgattctgatgaggctgaaactgccaaactgtgaagatctcccccagccagagagcccagaagctgcgaactgtatccggattggaattcccatggcagatcctataaataaaagtaagtggtagcccctgaccttctgtgctcttctaagggtcagcaacctgttggcacagggaaaactgghccttgacccatagtgattttcatactgttaatcaaattattttccaatgggctgagtactgtgcctgagcattcagtggtggattagacatagttatcttcaagaagcttcatgaagacaataattttaaaatattggagctggtttctcaataacttaaacatagaattactatatgacctagcaattctactcctgagtatgtaatcaaaagaactgaaaacagatgttcaaacaaaaactcatatgagaatgtttataacaacactatttacaatagccaaaaggtggaaatgacccaaatgccatcagtagaggagcggttaaacaaattgtggtatatccagacagtgaaacattatttatccataaaaaggaatgaaatacagatacrtgctacaaacctggatgaacctggaaaacattatactaagtaaaagaagccagacaccattgtatgatccatttatatgaaatttccagaatagataaatccatatagacagaattcagattagcggttaccaggggccaggctaggggtagtggagagtgattgtttaatagatatggggtttcctcttagggtaatataagtgttctagaacctatagtggtgaaggttgtacaatattgtgaaagaactaaataaatgcactaatggtacatgtaatggtaagtgtattatagcatgtatcagtacattctcacattgctataaagaaatacctgagacagggtaattgataaaaaaaggaagttcaattggctcacgtgtggttctgcaggctgtacagggagtakagcagcttctgcagaaggtgaacggagagcaagcttcttacatggcaggagcaagagartgagtggggaagtgccacatgcttttaaacggccatgagaatgagaacttactatcccaaggacagtaccacggggggtttgtgctaaaccattcacaagaaccctgcttccgtgatccagtcacctcccaccaggccccacctccaaccctggggattgcaattcaacatgagatttggtggggacacagacccaaaccatatcataccgccattttaaagatatagatgggtttgcctccatcccctaccccatcagcagcaccacgcaaaagactatttcagtgtacatttccctttcatctagaattaatctcaccggcaatttttcagtttccttttgatcgttaatactattttgtgagttaagtaaatgagtgcatctaaaatgcttaacacatggtaagggctcagtagcaacattattattattgtcattactcctccaaactccagttcagttcgactgtgtagattctgcagtgcttttaagcccctctggccacstgcgaggtcttcttaatgggatctgcttctcaagggtgccgaccccatcagcacagagatagcccccacttttgttagaaacccagaatgcacagcctctgataagcatgttctgtgaattacaataccaactagattccttattacatgatttcatgtctaaggctgtcagtcagaatggaaggaaaagtttggcttgaaccttccttgaaccattcactaggaaattacttctgtgcccccaggtcccaccccagttccgatttcttctgtgttcaatgttagaaatacttttggaagactgattttattcctgaagcaaaagctttaaatcctcccaggaatgtaactgcaaggcaggccctgggtccaagcccagcaaagcagggagactgtcctgcatggcccctgaccagcagggaagctgtggccacgaggttaattacctgccctcccctccagaaactgctggctagaggagagctccrgcatctcctatgtttctttctmattgtttgggtttttgtgtgtttttcagatcacaagtgttataacagcacaggtgtggactaccgggggaccgtcagtgtgaccaaatcagggcgccagtgccagccatggaattcccagtatccccacacacacactttcaccgcccttcgtttcccagagctgaatggaggccattcctactgccgcaacccagggaatcaaaaggaagctccctggtgcttcaccttggatgaaaactttaagtctgatctgtgtgacatcccagcttgcggtaaatagaagtcattgcccctaatgtattcaatcatctttaaagatccctatcctacccctcttatttaggagaatcctataagggggrcaaagaaaatggacagtatttgcttgatctcaatctggttttagggtaaaccttgccgtttctacataaaacacctcgtaaggtaccaaaacacgttctcaagaagtcaactgcctttatacctgcagccattgcactcatggatgtaacagggacccagcccttcagaggcacagttgagacagtttatcacattgatttttatagaaaaagatgttacccagaatggtctgcgtccaagtggaccttttcagcaaaaaaaggaatattggaagcaggaagaaattgttttctgtatgccttaagaacaccacaaggcaggatgaatctacaaccattactcggtcatccaggrcaatctgtgggtaaactgtgtccttcgttatgtctgttaatactgcagaagaagcatataggtatctagtaagaaaatggaattcctgagtcagttaactgttcctttttctagaaaatgtttggagaaaataatgaaaatgggccaagcatggtggcttatacctgtaatcccaacactctaggaaggccgaggcaggaggatcatttgagcccaggggttcaagaccagcccaggcaacatagtgagactccatctctaccaaaaaaaagaaaaaaaaaaaaagaaaatgttggtgaaacctggagttaggaactattttggaactaattcatcttcctgatcctagttctcatagatatcatagataatgccaagtttcccaggcatagtgggagagtcaggatgtcactgctggaaaagcaaaagctacagggtaggagggtgggcaaacaagagcaatagtcatgggacccacaatacaaagtgagctcggtgtttaaccagatgattattcaagccattcattcagaatatttgttgagtacctactaagtgccaagtacttactcatccgagcatggggagacgccagggaccctaaggagggagtaggcatagcacatccacaaagaagcaaggagtcatggaggcggaacaagcaaaagggagagtagcagaagattaggtcgggaaagtaacaggacccaatcatgtaaagctgtgtaggccattggaggacttaagctttgacgctgaatgagttgggaaagcatgagagggttttgagcagaagggtgacatgacctgacttatatgtttgaaggctcacctgggctgctgggttgagactagcctgtgggaaggatgcaagagcaaaagcaaggagatcagttgggaagctactgcaggaatgcaggggagagataaagtggccttgacaggaggaggagtggaagacggagggacacgtgggcagattctggatatgtgttgaaattggagacaagaggagtcactgatggatcagatgtgggatataaatgatggaaggaatcaagagtgactccggagcttctccatggaattgccttttgctgagacggagaaaactataggaggaataaatttagtgggagctggaatcaagagtttttgttcatgctgagtttgagatgccttttagaaatccaaaaagagatactgaggaggcagttttatatcacagactgaagttcaagtcagggtctgggatgagatggatacgaaggaaatgttggcatacagatggcatgtaaggccatgacacctgaaggaaagaggagcatatctacttaacaaaagagaaggaaatgtcagtgcaagacaatgaaagctagctttagactctgggtcaggggcagtagcctcagttcctaatgtaataatgatctaactgagtggctaccatgtgccagatcctatgtgagacaccttacctctgtcacctcattcaatcttcatatccagcttctatcatcctcatgttatggataagaaaactgacactcagtaagaattaagaggtttgctcaaagacactcagctatcagtgactgaatcatgattttaactcaggtcagccggattcccaaacctgttggctctttccactaagcatactctctctctagagagcaaaatgaatctgcttaatggcaacaataacaggtaaacaataaatatatagtttgtagtaaaagcagtttattgtaataggtaaggacatgggttctcatgtttaagtgcctgggtttgaatcccaggtcttcaatgaaatagctgtgtgctcttagccccttctaatctcatttttcttatcagtaaaatgagaaaataatgatatacacttaggatttattgtgagaataaattagttgttaactgaaaaaccctatgatgtccgaacatagtaaatgttcagtacacattatctattattatatagtcaatatataaagataaatcgattcgaattatcacatagtcaacatatgtaaataaatgcttgctctcagctcagcaaatattgtttgagagcccaccatggagtagggaggttataagaggaataaaatgattcatgcttttgaggtatgtcagttacaatgcagtatgtatgatacaatagaagttagcacaaatgttatggaacaaagaaggggaagggcttaaaaaattactaaagaaatccataagaaaaagttttaaaaatattgaaaagaaccctagtgatgaaaatttgagagacccttattctataattttgttcctacctgttacttgttattatagtgactttacttgcaaaatggttttacggaaagttgaacacaacaaattttagaaagatcaccacaccccctttgtgttgccgggtttcatacaccttcatatgggctttaatatactttcatacgtattacaaagtaacctcttgcagagccattgttgatcatttcaaggaaaattattctgtattttgtaatggtttgcacttcatttatgacattttccgtgttattttcaacagtgataagaaaggaataaaaacaaaacatagatttacttagttgccccattccttctcctaaaccaggtaaggtatgagagtctgcaagagagtccaggataaaagcagtacttactaagcaccttccacgcaccaggcacagtgctagggttttcacatgctttctttatcctcatcctcatactctgacaggtattattaaccctatttttgctgatacagaagctgaggctgagaaagccccagggtcatccagctagtaaatggaaggtctgtctgattccaagctcatcttcttgctactcttctgtgctacttcgggttattggttgatgtacagaggaaaccaaatgaactggtttgttttgtttctttgttttttgagacaggatcttgctacgttgcccaggctggtctctaactcctgggcccaataaatctttctgccttggcctcctgagtacctgggactacaggcatgcaccaccatgcccagctttaaatgaattgttttaagaaagaaatgggctgggcttggtggctcacgcctgtaatctcagcactttgggaggccgtggcaggcagatcacttgaggtcaggagttcaagaccagcctggccaacatggtgaaaccccgtctctaccaaaaatacaaaaattagccaggtgtggtggcatgcacctgtaatcccagctagttgggaggctgaggcatgagaatcgcttgaacttgggaggcggaggttgcagtgagccgagatcgcaccactgcactccagcctgggcgatagagcgagactcagtctcaagaagaaaaaagaaagaaagaaaagaaaagcattatttgttccaccctaggtaaacactattgttctttgggtgacttctgacccttaatttccaaccaatgcctatcagaagtagggaagtaatttgtccagaagctggaagacatattgatactctgattcaaggactcaagctctattacgattagtttaagcaaggattacaaattatacctaaagtactcgttttcatttcgatgcccttcctgcagcatccagatcaaacccatgctaggagggatgaaagaaaccttcgaaaggtctttcagactgagtagaaagagggagatcacttacatctacaggatacctactatgtgcctgcatggtgcctggtgctttacatattcatctccatttaaaattcacaaccatgctgtggggtaggtatgattaacatatttcactgaggttcaaaggggctacaggacttgtctaaatcacacagccaaccactgtctgcatagagctctgaccaaactcaaagctcatgttcttttaccagacactctgctatctctcatttgaagatttttctgaaataaatacaagcatgrtgattggttccacctctggattacatcatgccgatttccattatatgatatgacatcaaaatcttcccgtgctgatgaagaactctatcatagtattactcagtgtgttattatcttagtattaatcagtatagcaatgttgaaaacccttggaatatttcttttctgaatatatgtgcagaggacacagtgaaaatcctgaggactggttaatactagtcacatgagagatgaatttagatgaaagttaaatatagagatgacaaggcagttttcaccacttagatttttttttaaagaacattttcattttattttaaaacaaagcagttcctcttgaattcttcaagccaagccacgaatatatccattaaaggaacagggaagccttgacatatgatcaataagctgctggagggccagtagctcccaggtgggattcctgagaagacagtaggtcagcatcagctgtgctcaggggtatgcgtgtcttctcccagtcgccctcagcccacctctaacaaactgatcatcatggaatcctatttttataactcctttggggcatttgatttttttttctcatttcattgtcacaaaaccatgaaagatcaagtaggaatttccagccctgttttaccatatgagaaaatcaaggcccagagaagtgagaaggcttacctaagatcacaaatgaattcatggaaaccaggtctcctatctctaggaccactgctctttgttctacaccagtgattctcaaccaggggcaatttcatcttccagggaacatttggcaatttctggagagattttggttatcacaagtgggtggggttgggggatgctactggcaactgttgtgtagaggtcagggatgttgctaaatacactgcagtacccagaacagcccacacaatgaatcatctagcccaaaatgtcgaatgttggggttgaggaactcttttctacactgtacaattgtaaactatagaataacaataatattcaatagtaattatcatttattgtatgcttacaatgagctgaaaactctgctgacacttttaggcattatctcatgtttaaatagttctatccccctaggagtaggttttattatacccaagaaagaaaactgagacttggagaggttaagtaacatgtgtccgaggtcacatggttaataagaagtggacccaggactcacatctgtactcagccttttaaactgtggtttatgcatgtatgttgygtatgtgtttttgtgtgtgtaaacagataaaacttgagaataacttcattttacagtgagttgtaagctagtggggcagatttgaaatgagccctttttctcctccatcctgaatgagacagagtctcataggaaaattcctgcattctttagctaactcaaagttaaggagatttcagaatctccatggggtttctcattttcctactgataacttttgttttagtttcaactaagtagagctaaaagaagcataggcctaattaaatagaaaatgtgaacgtttgttgtactttctctaataaaggcgcttgagaacagtctgctgcagattgttttatctgtgaaccttcactccagagcagaatataaaattaagtacaatcaaatatggctgttgtaaattctgggaattggcttggctaggattatatgcatatgcccagacagtgcttagagaaagtgaaaaaaaagacraaagttkgtttgggcaagacctggcttctcatcctccatgtcttttctttcatgtcacaggcatctaacaattagaattactaattatttattcattcactcacagaaaccaatatatgttgagcttctactgtgtctcagaccctgtgaacaagctaaatcagaccatgcccttgtgtagcctacaatctaatgaaggaatcagatggaaaaaaaaatatgaatcacattaagtattgtcatatagttcccagttttatgtctgctcttatgtgcgtggcattttaatgatgactactgcttgttgaatactgtgctaagatatctgtgccggcatctagcctaggacttagttggtgctcaataaaatgtgttgaattaattggtttaatccacacggtaaacacaagataaaggtgtcatctccattttcctaaaggaaaaacaggcaatgttgtttttactgaagccgagattcaaaccaattccatagaatttcatatccattcctccatctaccatgccataactgcttaaacaatagagtcctgattatttcagaggaacacacattcctttattattttccctttccctttgatcattatgatctctctgggtctttgggatgctgcccattgatattcttatttgcagctccagggatataggaatgaagcccccagccacaaagatatctactctgagagaccctactgtgctcctcttagatgcagccctgatatagattagctccccagcagctccacccacatctcacagggtgtgcccttctcccattaagtcccatctcctctctttctggaagccccatgtctcctccagtcctcaaagttggccatcttctctgcctgcaaagcttcattcactatgctttcaccttttgttgtggtcaccttccaagtcaaatatcttgggttgggtgtaaactaaattgagaaagaagcattttgcctaagttctttctaactggcatctaggcacactgcctaggttcaccatttcactgtagccctttatcattgcttttctatgcagctctgggggtgtagctgtggaaactgtcaatacctctgagaactccttttgcaacaatctgtccattttactttggttgtattttattaataccacaagacttatgttctctctctctctttctctctgtctctcatttagatcccctatttgtttctttcttgatttgtatgggaaggcagaatctcaatcgtattggtatttttatatttaaaccatgggcctttrttttacccttgatcaaatcctgaggtcacatttcttctcctagccatgccagcatgtctgtttctcctctaagtaaaggtttctccctctaccaaataaaagttccaagcagcagtattgtttttactcctaaaccagcttcaccaaagagtatccatgataagaaaagtggtgaaccatttggctccatttggagttttcatacctggcctattgcttttgtatttccttttaagtcactggcttgcaacaatttgccaaagggcgcattgcccagttttgtgcctgaatagccttgacttgtcctataatcttacaaacacccaccctgggctccagtttgtcacaaaccatattctgcaacgtggtggtttacagttcggggcaaggcagatgttttccagattgtgaacactgccatttttaacttgctctgtcagcagccttctcccatatttcatagaagacctgttgtaaggcaatttgtctttcagccatttcttcaaaataaaattgaacgttacagtgaattggatggtggagggggtaaaggaggaagaagtatagcactgttttatatagtttgaagctttctggaagagttatttttatactrcagagattttcaagatgtgctttcatttccagtctctrtacattttcaacaacaaagtaaagaacaatagtgacccaaaacttatagctaagtcatgttccatgaacatttttaaccataaaataatttctctcaaaggtttttttgttgttgttcctagtatatattgagtcatttacccagtgtgtaagctgctctagcaataagcttctgaaacctctgaactttttgggctcaccaccatgccagtaagaagtgcttgttggtgtcttaacctttgctgacagaaatctgatataayaccacaatgattgttgccactggctttgtaacaaactgttttttggttaagcttctggcaggaaacacatggcacaagccgatagactaagggaaatgttataatgtaattatttagggaggcattggcagaattaggagaaaccattaaggaaaggtgcgagacctggggctaacatgaatgggaggtattaccatcctagatcagttaccttaccttgcagaatatagctgagactgaagagagggctgtccagcacatgctgtggcctttggtagagggatatagtcaaccctcagcaacccagcaaggaggaagccagaggaacaagggtttcaacccatactcttctcctgcctttcatctctggcaaatgactcccataggttcaacctaactggaagccacaggtcaaaggtatccattgacactatcagtagaggttggcctcagcaaggagctggtcagaaaggactgagactggatctggtgggctgaggatactcaggggaaatgtcatcactgactttaaatcgcttcataagagtcagctttaaataaattgtttcaagaaagaaatgggctgggctcggtggcttatgcctgtaatcctagcactttgggaggccgaggcrggcagatcatttaaggtcaggagttcaaaaccagcctggccaacatggtgaaaccccatctctactaaamatacaaaaaaaaaaaaaattagccgggtgtggtggagggtgcctgtaatcccagctactcaggaggctgaggcaggagaattgcttgaaccccagaggggaggttacagcgagctgagattgcaccactgcactccagcctcggtgacagagcgacactccgtctcaaaaaaaaaaaaaaagttcagtaagggcctaaataagttatttcaactgaatttataaaatcagagaaccttgggagcaaccatagaaatcatccagcctctacttgaacattgccagacatctccagagacagagaaatccttccacttcaaagtgattatggaatgattccaactgctcaaaagttctgcctttgtaagctagaaaccaaaactcgtatgcaaaatctgattttttttaaatgttggccactgattccaattttttaaaaaacctaataaagaacaagtctatggactggatccaaattttaacttctggataatttcttacacaaatttgaagacatatgtcacatccttcatttgattttctctttggcctaaagatcacatgggtcctcctacatttccttccccattcttctcctctaggtgtttcctagtcctttagagccctccttaaaaatgtggctcttagaagacacctttcagtgctttttaaccagagcaggtagaagaggaccacgatgttcttgatcattacccagtattgccaatgaatactactatgttgctataagtgccatatrtaaaattttttgagcaattgcatcatgctgttgctgggttcatctgagcctttaaatcttcagtaaaacttattagtaatcttttgtttgtttttagggtttggttacatcaacaattatttagtagatttgtctaatcatggattttataaacaagatctttaaccttaaagcaacttataatatttatttttaaaatttcagcttctggtttggattcattatattagcctgtcgagtacgatcctctaaaattttattccataattaaacagttaggtatctttcctagattctggccatttcaagtttgataaacatatcatcaatgataatgttgagcaggcaggattcctcaagcatagccctttacaatttgatgttgattgactgattaacactattaaataaaggcagatgatgaattacaaatacatctgatgatattattattcaacctttcatcttgtccataagaatgtcataagtcactygagtcatttgatcaaatgttttgctaaagtttaaatgtgcttagtctgtcactaataatctcatcaaaatgaaagagatttaattttatacaacctatagaattttgtcagttaaagattggcccgattaaaaagtgggcaaaggacttgaatagacattcctccaaagaagatatacaaatggccaaaagcatatgaaaagatgttcaatatcactaataattagagaaatgcaaatcaaaacyccagtgagataccatttcacacccattagaatgcactattaaaaaaatagcaagtgtgaagaaattggaaccattgtgatctgttgataggaatgtaaaatggtgcagctgctatggaaaacagaatggaagttcctaaaaaaaattaaaaatagaattaccatctgatgcagcaatcccatttctgagtatttaatccaaaagaattgaagtcggggtctcaaaatatttgtacacccatgttcactgcagcattattcatgatagccgtttaaggcagaagcaacccaaatgtccatcagtggatgaatggataaagaaaacatggtatatgcaaacaatggaatattattcagtcataaaaagaaggaaatcctgtcacatggtacagcatcatgaacctagaggacattagactaagtaaaatacaccagtcacagaaagatagatactgaatgatccacttatatgcagtacctaaaatagtcaaaatcagaaacagaaagtaccatggtggttgtcagggctgggggaaggggggaaatggggagttattcaatgggcatagagttttagttttgcagmatgaaaaagttctggagattggttgcacaacaagaataaatatatgtaacattattgaaatgtaaaattaaaaatggttaagatggtaaattttacggtattttttacaattaaacattttttaattattaaaaaagattagcccaattcttttatagaggaggaaactgaggccctgagagtttacagaaacttttagtgaacttgtgtggattccagttactaagatttttcccaaatgctcacaaatgagttgctctccctaacttattgtagttaaaaccttttctgcagggaaaattttaatcaatgtatatggcctattcagcatttttttttaaagaattcatttgagaatacataaggcaatagatcatctacttagtatttccatcatcaagtcaagagagtgaatgcctgggcccagcctgccaactgaaggcctaattacctctctctctcgccttccaggcatatgcctaaatcactggtgcaggcccctatgtgctaccaacctgcttattttatagttgtcaagtaataaattggtagtgattcctgtttgttttctatggtttttaaatttttttcagtcaaggttataatttaaacttgtttaatttcccttgaattctaaggttctgtaagatttcttcccacctttgccatatttaaaaccagagccttttcttgttttaactcaaagtaatatcccagatgatgtttcactttattaaaagtacctctttaataagaaatcatgattactttgctttaagcttcagggaaagaaaggagtattttctccattatatttaattactaatcaaagtattgaatatcattgtaaaaataaaataggaatgtcagatgtgaactgtgataccaaattgtttgatttttaaaaggaaattaatcatgtgatctggactaagtggttggtttcaaaaatctcaagtatttaacttgatrtaactaatatgtgcatttcacttttaaacagttattccaaagtattaaaaatcttcaacattctaatttccagccgattttctctgtaatgcattggaggtgtccattaccctttaaaatgactagtaagaataatgtccattgttccaaagtgaytttcttaaaatagtatgattcccaccagatattagtcttcattgaaagagaacttcggactcttaaggagaatgatgaaaaacaattatatatataatgttttagggtaattttgattagtaatataatttactagaagcactgaaggtagacaggcttgcattccaacccagactttgctactttgtagctttgacaagttatttttcctttctcggtcttaatttctctgtgtgtaaagtcaagataacaccaatgtgccttccgggttaaaatgaggaatacaaatgctcggacttcaaaaagaacctaggcagatattagttttctaatttttcatttggaaggctcattgttctatggaatatttttatagaagattttcagagccagcagagactgaatccccttctggccaaatgcagagagctgtgtagggaaggaagcactttgtatggaagacttacaatgggcctgaatgtgtttctgtcacttccaacatgaccatgtattgttctccttgattatttcacttggcaaaaagacactgggcccttgtgcttgttagcatatcctcagtgtaatcagaaggagccaagcttgactgtttaaaggattcagcttcttgaagtttgttctcctgcagacctacagggggatttgtcccagaccctcgtttacaatagaagaccttccatgaataatctgatagggcatgaatacagaatagactcctttgtttgccaggcaggtgaggccctactttctcttgttgctaaaaatctggcctggaaaaatgactagcattgcgttagtactaaattagcctcatcgcttttgtaatcattaccctcaaaatgatttcactgaaaaaccaagaataacaacagagactttacccccctagggtactgagaaatatgaaaatggtttataatgttaataataaccataacatccaacaactgtatggcaattttcaattatccaaggttctttcatgaacattatctcatttgattctcaggtgaaccaaataagattggtagagcagggactattattcctgctctaccaatcgtatttattccattgaataaatgaggaaatggagatcagagagattgtttcttgcttaagattatctagcccaaaacttttacctgtgaatccccctctagtctaagggtaaagggtaaacattgagtggtaactggtactagaatagatttgttgcttacagcaattctgtgaagtaggtattactcccattttacagatgagtttgcttggagtggcaaagggcctactgaaggtcacgtagataatgaaaaggcattattcagaggtttctgacttggtgccytgtggcagaccgtcttctactcaggtgattcctttctgtctatctataggcatgtagacacaatcattactggtgcaaccagcactgactacracggcctccagtgatgcctgggttatatatttacctgtaacagtgtataaagcagggattttctgtaatcccagcactttgggaggccgaggcaggcggatcacgaggtcaagagatcgagaccatcctggccaacatggtgaaaccctgtctctactaaaaatacaaaaattagctgggcgtggtggcacgtgcctgtagtcccagctactcagggggctgaggcaggtgaatcgcttgaacccgggaggcggacgttgcagtgagccgagatcgcaccattgcactccagcctggtgacagagcragactccgtctcaaaaaaaaaaaaaaaaaaagcagggatttcaaaagcatcacatttggcaaaacttcagtgttattcccttcctttcagatcaccctcatccttcctacctccatgaaacaagaggaaccctactatgagaaaataggggcaaaattctccaattattggcagtgaagtgtagtagctagaatggtgggcaaaaagcaagaccgacgatggaatcccagcttttgacttactagcagcatgtccttgggcaacttacttaaccactctgtcttccagcatcttcacctataaaaattaggataaggatgtcatctaccttatagagttggttgtgacataaaatgagtttatgaaaagcacctggtccatagtaataatagctaacatgattttgcaccagtagaaaatatttgataaatattaaaattgcgttttgttttgtttttttgagasaaggtctcactctgtcacccaggctggagtgcagtggcgcaatcacagctcactgcagcctcaaccttctgggctcaggtaatccttccgcctcagcctctcaagtagccaggactacagacatgcaccaccatgcctggctaatttttttaattttttgtagagatggggtttcgccatgttgcctaggctggtctcaaattcctaggctcaagcaacctgcctgcctcagcctcccaaagtgctgggattacaggcatgacccactgcacccagcctaaaattcgtattatttttattctactctgtaaccagatttaacccctctccaggctcttctgagggctaactcacagggcacagtcccaaaaccaggttttggtattccttttgaataactgatatgccatatctcacctgccaaacagttcccaaacaaggtgtgtacaagtaaaaactacatatggtttattctcatttacatgtactagggtaactcatcatttaaaggaccttttgggtcttttcatcactatctttatacttccagtttagcatttacaggacatgtcattatctttcttctattttccttaccagacgatgagctccttaagggcagaggacatgtcatacytaattttgtattcccagtacctacaatagtgcctgacatgcagtagcttttgtttattgacttactgaatgagtggaagggtaattgaatgaatgcatggttaattcttttgtaaggtaaataatcatctctgaattttgtgtcaatttgagttttcacactttgagttttcttaaagatagctgatcttcgttatcagggcatgtcattatgtaacccctctaattactatcccataattctgtgtttgttttaccagtcaaataattcattaatgacaatatatgcctaagtatttggtttcaatggttaggctcaaactgataaaaagacaagtatgtctcrtgttctacacatattatattcttttccaagcaatgggatataagatttcaaaaatatacttcaaagtgttagcactcataattattgggctcatatgaaaccatttaagaattctggggtttcaataaagtgtcagattatacagtgctgccatgctggaaggaattatagacaccatccaaaacagacacttcacttttgcagaggtaaaaaatgaggcccagagacgtgaatatttgttcaaggtcacacagctgatcaaagatcaaactgaccctgacttcaggcccccatattctcaggccagtggctttttggacactgggaccaggattccttagtaatgttgattctggaagatgcaggcttggccccataagtccaaaccagccaagacaaggtcatgatttctagaacaccatcttgtgggggctgatctgggctggcagccaatggaagaagagccctgtggtccacattaaggctcttggatgtatacagtccattcacgtggcgtttaacttttaaggtgttagagaaatgtaggtctgccactaaagagaggcaacatcagaggrggacccacacacgtacaaagtcttcataatgtccctctgcagtttttaaacatttgaactttaaasttttaaacttcaataaattatgttgaaggtttgatggaaacaaatggtaataagcagtggattcctttcttctcacagtggatttgtgtgtataaaagaatagaagaggtggttcattttaaactatgcaatgtaatattatrcatgttactttaaagagtataacttttgctctttttcatttctgcacccagattcaaaggattccaaggagaagaataaaatggaaatcctgtacatactagtgccaagtgtggccattcccctggccattgctttactcttcttcttcatttgcgtctgtcggaataaccagaagtcatcgtcggcaccagtccagaggcaaccaaaacacgtcagaggtcaaaatgtrgagatgtcaatgctgaatgcatataaacccaaggtaatgttagcagtacagagctacatttgttccgtgggcttcaagttaaagcaccatgttataaccctcccaagcttggaaatcgaatgatatggaatcagagttttataagtgctaaggttcattttaaccaaatgcaaagacgaactacctacctctatctaaaccaagacactttcatcagtatgtctacttcagtgttgagccagccatatcactgccttgccakagagtcattgggctagaagtgatccctaagaaatcatcctgrccagcccgtcaggactcagaacrtgagcaatttttcaaaatttcaaagaggaaatttcatacttttccatccaaattgcaagagagaacaagatccatcattgttcacaaacttcactgtcaagaaccttttcgttgcataatrtgcaaatagttaaaaccactgtactatatacttaaaaatgattaagatagtaaattttgttgtgtttttttaccacgatttaaaaaaaatcctttgtatgcctaacttacatccctttttctttggcttaagtatattttaaggaagtgttgtccttccaatagtcttcgaatgctgttttatgataaccaaccttagccttccccactttgagctaaatcaaccccttcccttttgcttttcatccacatctttcaacgtttgagttgctcgaggtcctggcaaggaacccagggtcactggcccttaccttaaatggagcccctgcactgcatcttggaactaaaatacaacagagtctttctttcaggaaagccagcaccacaatcccaggcctctcagcaaaaagatttcatttaaataatttaagactcttgcatctaacagcctgtttttttttctaattattccaattccataagaacattcattcattcaacaaatatttatcttccctgtggactagtaactgtattattcttttgatcctcataaagaggagaagcatcacttttaataaaattttaggaaaaaaaagtcttcacactcaaattaactaatcctcttatctaataaatggagtagcgtaattgggctgacacagagccctcatttttttttctgctttactgtttaaattttttttatctaaaaaatcttgaaaagatttttgctattataaagtcatatttattaataggatttggaattccttaaatgctaaaaattcagtgtatatattctgtattcagcaaaaccactgatctcttgctgagtgtgaatttttatcattaaaaacaagcaaacaacaaaaaaaaaaccctacaaatcctgaagaccatagagttcacacagtagcctggaggatgggcagggtagggattcaactcttttgacatcccagcttctagctagctgatttacatatattatascattttatataatatcacatttaatccttactacttagtgctactataaaagtagtgaaagcaaatggatgggggttaatattgctacacattcacctagttgacctggcagatacttttacctagctcatgacttcaagcttctagtgtaagagtcattgttccatgagactctttccctttcatttctgttggtaaatgttgagaagtcttagaaacaccagaactctgggcgggggagagacctagatcattttggttacagcagacggcagtttggtgcagtagccaccatcctggaaagatgtactcctcattgccagggcaggaaccatggaagaatcatttccatttttagaaattatcaattttgtgggttagccttaatctgmaattkaattacatttttagtggaggtttgttttatatcacatgatctccaacagaaattccagagagctttgtggcataaatagaaaaaaggctaatatatatatcgatgaatacaaactgtcaagaacaataccaggagcttttacatccattatcacacttaatcctcacagctattatataaggcaggtattattattactattgtacaaccagggtaattgagacacaaacagactaagtaacttccccaaggtccaagagctagttattagaagcaataaaatgtgaatacaggatctttcaccttttctaaatagagctggcccttgctcttgcagaatccgtgataactttttcacagaacagatcaagttgggaaggaggagggagggttaggcaagcaactgagtgtgatcccatttggtcagtttgtgcttcagagtaaccacaggcattctcctggcttctgacaaatatttaaggggcctgcatggcagtctctgaatgatgtagccctagccctgccagggacatgtacaatttggctagagcaataatagttccccatccttcatggtcagagacaaatgtgaaatatactggcatgagttttcccagagactgggtgaagtaaacattgttttcatagtttctggatcatttctgaggtgtgccttgctaaatctcccagtgtcaagatttgtccactatgaggcttagagcttagccttaaactcctgaaccagagaagtagaaatggcttaaatatttgaatgggttggggaggggaaaggaaacaacaaaaacaaatgctaactttttttttcttacacttctaagggacttggctccgatcaaatttgagttattcaattgtttgttttggttcttactgagtgcctttcctggaaaaagcacaaaggactctgtagaccttaaagaaaattcctaaatgtaaacagaaaatctctaaaactgctttggaaggtcactgacacataaatattacatgtacctataaaatctaaaaggaaaggacacacataagaaagaaacaaagaaaagtcctgaaaacaaacactccaccagagcaaaatcaaaagaatatttggaggcgaggatgaaaaaggaatgaaggatagaagccagtctgccctagccttattcttttttccccttggccaattcaaaagtcagagactctagggttcttatttatccaaatgaayrtgcccttcagggtttaaactctctgcttccatctctcttcacttgctgagccgctaaaattctcctgagtgtttggattgagaagaagaggctcctgtgggagattagaaactgatacccttgagagaggacaatagggagctgccgacagactggctgacgaggcccggcttgggtccccagagaggtaggacagtgcagttggaagtaaaagcttttgatgagccatgagtttccttctgatctgtgggcaaaggaagccagtggaccagagaggcaccttaacgccgaacaatcaggaagatggagatgtcctggctcccatgccaactgctctgtgactctgagaagccatctagctttttgcagttcaattttctcagctgttcaggagaagtagactgcattcaagtataagactgtttattttcctgttattttgtttagccaaagatttgaagccattcaatcctctaacgagtactgtagtgwtgcctaaactaagcaggattttctatattgcattacaaattttacaatctgagtgaggttgttttttcttcttttagtacagcagaaattgaaccttctcagaggagcctggaaactctaaattcccttctctgtttcttttcctttgcttctccttcccttkcccctacatcccctgccaggtatgactctggaaaacagcattctgtaagcttgcttgggtaagggagagaagctgtggtatgtgctactgtgggagcagggagggggcagagtctccccttcaagaacaggatgggtcccattcagcccaggcctcctggctcctcacctgcctggaggttaggcagacagagaggttaaaagatggaggagtctgaggggcatggttgctcacacctgtaatctcagcatttgaggaaaccaagctggacagatcgcttgagcccaggagttcaagaccagcctgggcaacatggggaaaccccatctctacaaacacacacacacacacacacacacacacacacacacacacaattcgccaggcatggtggtgcatctctatactcagagctactcgggaggctgaggtgggaggattacttgagcctgggaatttgaggctgcagtgagctaagatcatgccactgcactccagcctaggcaacagagtgagactcatctcaaaaaaagaaaaaaagatggaggagtctgagaatgggggcgaggaagagtcaaggcaggccaggggtgtgagatgcagccaaagcctggacagcccccatgagtcgaactcctgcagctcctggctgatgtaaggaacatcgcaggggaaagaaagcaagactggcccagctttccaaagctgatggctgtgttttacttctcaatttaccctcatctcttgccagcttctctcctttttcacttccagacaattcatctctccgttttcctttccagccaaagtagttgctgaatatactgaaatttgattacattctctggccctgtcccttttgccagcaacatgcttccatctaaaagccctgctggagtctggctaccctttttaatttgctgttcttaccaaatgtcaccacacttcatgctaaaatatcctcgataatttttccactcactccttaaagctattgtctcccaacacttctgagctcaccattctattaacatgggcctcttgggaagcaccagtgatgttatttaatccagtgacctttgccaagtcttcctcccctttaatttctctggagcctttgatattcttaaccaccatcctgaaatatatttttttttccccttgactttcctcctatctgcttcccacacttccttcactagttcttttaattcccttaatgggagcatcctctgacattcttttcctctctcattctcttgagctgatttcatcctctggcattgctctagctcccccttgagtgtaatgatttcccaacctggaaggcccagtttcaagttataaaattcttgccaccaaaatcctgccacccaaaagtccatactatcggggcctagcttacctttccagccacacttttctcttagtttatttctggaaagtagtctsatacacttcaaagagcaagagtgtagagacaaagagatatgattacaaatcttggctctgctgtcaactggccacaagatcttaagcaaataactaacttctctgaaccttttattttctcatccataaggcaaggataagaatagtacttaaaagggatattttttacactttgagatagcatgtctggcacctcacaggtacttaatarccagaaattactattattgttataactgatgagtacagatcttttttttaacttttattttaagttaaggtgtacaagggcaggtttgttatgtaggtaaacttgtgtcatgggagtttgttgtacagattatttgatcacccaggtattaagcccagtactcattagttatttttcctgatcctctccctcctcccaagctccaccctctgaaaggccccagggtgtgttgttcccctctgtgtgtctatgagaacaacatttagctctcacttaaaagtgagaacatgcggtacttagttttctgttcctgtgttactttgctaaggataatggtctccagctccatccatgtccctgcaaaggatgtgatcttattcttttttatgtccacatagtattccatggagtatattgtatgtaccacattttctttatccagtctatcactgatgggcctttaggttgattccatgtctttgctgttgtgaatagtgctgcagtgaacgtatatgtgcatgtgtccttataataaaatcagttatattcctttgggtatatacccaggatttaaattgctaggtcaaatgctatttctgtctttagatattttaggtttccacaatggctgaactaatttacactcccatcaacagtgtataagcgttcctttttctctgcaacctcgccagaatctgttgttttttgaccttttaataatggccattctgactggtgtgagatggtgtctcattgtggttttgatttgcatttctctaataatcagtgatgttgagctttttttcatatgtttgttggccacacgtatgtcttcttttgaaaagtgtctgttcatgtcctttttatggggttgtttttctttaaattccttagaaatgctggatataagactttcaccggatgcatagtttgcaaaatttttctcccattctgtaggttgtgttactctgttgatagtttcttttgctgtgcagaaactctttagtttaataagatcccatttgtcaatttttgctctggttttgattgcttttggtgtcttcgtcatgaaatctttgcctgtgcctatatcctgaatggtattgcctatgttgtcttccaggatttttataatttcgggttttacttttttttttttttttttttttgagatggaatctcgctttgtcacccaggctgaagtgcagtggtgtgatctcagctcactgcaacctccacctcctgggtttaagcaattatcatgcctcagcctcctgagtagctgggactacaggcatgtaccaccacacgtggctaatttttgtctttcttcatagagatgaggttttgccatatttcccaggctggtctcaaactcctggcctcaagtgattcacctgccttggcctcccaaagtgctgggattacaggcatgagccactagggttttacatttaagtctttcatccatcttgaattaatttttgtacatagtataaggaaagggtccagtttcaatcttctgcatatagctagccagttatcccagaaccatttattttactagggaattctttccccactgcttgcttttgtcaggtttgttaaagatcaggtagttgtaggtgtgcaatctaatttccgagttctctattctgttccattgttctatgtgtctgtttctgcaccagtaccatgctcttttggttactgtagccctgtagtatagtttgaagtcagctagcatgatgcctccagctttgttcttttttcttggctatttgggctcttttttagttccatgtgaatttttaaatagttttctctagttctgtgaagaatatcaatggtagttgagtaggaatagcatttaatctgtaaattgctttgggcagtatggccattttaatgatattgattcttccaatctatgagcatggaatgttttttcatttgtttgtgtcatctctgatttctttgagcagtgttttgactacagctcttttaatgaagcaaatgctgtgcaaacatagattaatgaagcaaatgctgtgcaaacataggatactgtgggctggggaggaagctataggatccagcaatgcacagcattaactggggtgaggacacaggcaagagaatcccagcaaagattatagaggtagctctttggacagctctcgtattccttgtgtccatcctgttagcatacattctcctgccccacaccctgctcacatcctggataaaatccatcagggtggagaaggtctgacagtgagggctgggaggctgcccggtacataacctcagcttaaaccaatgtctatagaaactctacttctgggaaaaacaagtcctataaatgactatattataaattggcatcataaacggactaaagtacttcaatatctcaatagaatctttgtaataaccctatgaagtaggtactaatttaagtctgatttttaggatgagaaaactgaggcttcagattcagaattggcccaaagtcacaaattattaagtgacagagccaaacttgaacccaggtctgctcaggtgcagagcccagtgcttttctatttgcctctactgcctttattttcaggctgactgaaatatatgagcccaagttatgagcaygtgatggctcaagctgacattaaaattactggcatctgttctgtctatttccaggcagaatagaacctctcccattggcattataaagtaactcaaccacagaatcaaccctgctcaccaccaaacattcaagctaactatcagaaagttacgttatagagaaaagaaatgcttctgaagttaaatcacttccagagaaatgcagctgaactccaagcaagtgtggcaaaatattggttgaaactccctctagaacttgattgcataagccagaaggcacttaatccagctgtagtctttgaaaatgtccataacctcccaaaacaaaatggctgtggcctctaagcttttaaaatgtaatcatttccatttatgagtagagtcaattgtttcataattctaacactgtttacctaagaaccagtaaaatgcacaagaaaggaaaataggttttggagtcaagcagatccatgtcaacagccaagtctaggtactaagaaatcttacatctatatactctccagggctctcatgctcaattcaggtgaaggttgccatggacaggttttgttcatctatcccagtcaactagctagcagagacaacagagcatcaacggagtgaggtctaactcaaaaaccagagagctcttataccttgagcatttcacttttgcatcaatggtcctcatgcttttaaaatgtagagtcctttgaggatcagatggaaagtctgcctcctcttcccagaaagctctgcaactttggtgtcagacattcttggatttgaatcttggcatcaccacttaatagttgtgcttctttaggcaggctacttaaccactgaatgccttatgtccttatccataaaatgggggcagtcgtaatatgaatctcacagaattgtgataaggattaaatgggttgatgcattaagcactttatgtccgagagcagacaaggagtatagtgtggtcattagcaaggcaggctctggtgtctgaattgaccacctaccagctgtgagaccacttaactgacctgttctttggtttttccatttgtaaaataggtgtgagtcatagttaccaatctcatggggttagtgtgaggatgaaaggagctaatatgtgtaaagtacttacagcctaacatataagcattcaaaaaatcatagccattattaggatctcagtgtctggcacatggcagatatttaataaatggtaggtattgttaaattcagattacagatatctaggataggagccatgtcttctctcttcatggttctttcatggcccctcatatagtagtctgtatgtatattcttcagtatattgtatatacagtatcagttgactgactgatgcaactagctattaaaatatatcctaaatgattggctctaattgaaactaaaggaaactggtgatatggcccaagctatgactacaagtagtcatgtagtatataaacctaataaatgctggttaatggttcttatatttttctctacctgatatttccaaagcatcttttcaagcaagagtattgttttctctcagttggataagtttaaattgcccaactaggttcatcagacacattgtggtcattcatcatgcagagagaagggacccagatcactaaggaattgactgatccagaaaactacatccatttattccaggggctctcaaagtgaggcctctaggccagcaggagtctcctcaactgagaactgtcagaaatggacaatctcagacccacataggaactcttgaggtggagcccagcaatcccagcaatctgtgctttaacaagtggcactgatgcctgctctgatgtagactatgctggtcagtacttgagattcaggaagcaagtcagcccatagggaataccaatctcagagaaaactgtgcttccaaagagaaaaaggacctgggatagccctcctattaccaaaaatactcctctaattttagtagggccagggtctgctcatcattcctctgatggggtgtattagtctgtttgaacactgctgataaagacatacctgagaatggaaagaaaaagaggtttaatggacttacagttccacatggctggggaggcctcacaatcatggcagaaggcaaggaggaccaagtcacatcttatgtggatggcagcagacaaagagagagcttgtgcggggaaactcccccttatagaaccatcagctctcatgagacttattcactatcacgagaacagcatgggaaagacctgcccccatgattcaataacctcccactgggtccctcccacaccatatgggaattcaagatgagatttgggtggggacactgccaaaccatatcatttgacccctggtccctttcaaatcycatttccttacattttaaaaccaatcatcccctcccaaaagtcccccaaagtctcaactcatttcrgcattaactcagaagtccacagtccaaagtctcatccaagacaacgcaagtcccttctgcctatgagcctgtaaaatcaaaagcaagttagttacttcccagatacagtgggggtacaggcattgggtaaatacagccattccaaatgggagaaattggccaaaaaacaaaggggctacaggccccatgcaagtccaaaatccagcagggcagtcaaatcttaaggctccaaaatgatctcctttgactccatgtctcacatccaggtgactctgatgcaagcagtgcatcagacacctctgcacctttgcagggtagagtacccctcctggctgctttcatgggctggcattgagtgtctgggacttttccagactcacagtgcaagctgttggtgggtctaccattctggggtctggaggacagtggctctcttctcacaggtccactaggcagtgccccattagggacttgttatggaggctccaaccccacatttcccttctacactgccctagcagaggttctccatgagggcctcacccctgcagcaaacttctgcctgggcatccaggcatttccatacatcctctgaaatctaggtggagattcccaaacctcaattcttgacttctgtgcacctgcaggctcaacaccacatggaagctgccaagccttgggacctccaacctctgaagccacagcacgagctgtaccttgaccccttttagtcatagctggagtggctgggacacagggcactaagtacctagactgcacacagcagagggaccctgggcccagcccacaaaaccattttctcctcctaaacctctgggtgatgggaggggctgccgtgaagacctctgacatgccttggagacattttccccattatcttggtgattaacatttggcttctcattacttatgcaaatttctgcagccagcttgaatttctcctcaaaaaatgggattttattttctattgcattgtcaggctgcaaatattccaagcttttgttctgttttccttttaaaactgaatgcctttaacagcacccaaatcacctcttgaatgctttgctgcttagaaatttcttccgccaaataccctaaatcatctctctcaagttcaaagttccacaaatctctagggcaggggaaaaatgccgccagtctctttgctaaaacataacaagagtcacctctgcttcagttcccaacaagttcctcatctccatctgagaccacctaagtctggatttcattgtccttatcattatcagcattttggtcaaagccattcaacaagtctccagggagttccaaactttcccacattttcctgtcttcttctaagccctccaaactgttccaacctctgcctgttacccagttccaaagtcacttccacattttcgggtatcttttcagcagcaccccactctactggtaccaatttacaatattagtccattttcacactgctgataaagacacacctgagactgggaagaaaaagaggcttaatggacttacagttccacatggctgggagcgcctcacaatcatgacggaaggcaaggaggagcaagtcacatcttaygtggatggcagcaggcacagagagagcttatgcagggaaactcccccttatagaaccatcagatctcatgagacttagtcactatcacaagaacagcatgggaaagatctgccccctgactcaattacctcccaccaggtccctcccacaacatgtgggaattcaagatgagatgtgagtggggacacagccaaaccatatcatgaggcaagcacaaatgccatgtgaaacctgctattcttctgtagacacttgtgtccagccagaatcagcttcaaaagaatagcatagatttgaaaaagggcagcagtcagtcttgggacattagaacatggggaattaactggccttgagtgaaagggaccacagggggaggtttggagctgacttatgaatatggatcctgtttcagcacctactgttgttaaagccccgtttctgtcccagagaaccaccctgggctcgattccctgcaccctaatgtagctctgtttttcatctgtgtgtctacttcaagttagactcaaaagtagagcaattatatgacattatgttcaaggcaaaaagtgacagagcaggcttcatgttgcatacaaatgttggcagctattgcaaaatcctcaccgcatatcctatggtaatcacttccttaaagtaagcaggaaataggttagtagtaggctgcttcaccaggagtcatttcaaatgtattgtcacctaaggtataacttcccaaagatggaaagagataaagccactgagtctgccctctttatccatctacagccaccaaggtaattacagtttttaaaaacgctactcatagttcattgctttcatatctaaagttaagagatctaaaagttcccccacatccccacttagcagtcatgactaaggtgaaaaaagccaccagtatcakcctggtctctcttatcagcagtttagaaagtactacaattttcccatctgactcacatctaaatgactcgcatctaaaatgtttttccttaattttccttccgtaaagagttcatttaaactctaatactgttgcttttcaaaaatttctaaagaaagaagcatcttggaacaatgtattaacttctgcatcaacttttatttcatataataattttatataattttttaaaggcagatgtgtgtttactttgagaagtaaaaatgttaacattgaaactgaaagcctgtttcagttttaaggtacttaattgccttacagcatataataaaccgaggccatcttgtccttcaactaatggagggagtgataaagagataggagcccgggaccctattcattccagttttcctttgtacttggtttactttggcaccatgcctcatgtgtattttacacttctttacattttgtacatccctgtatgacaaatacttgtcaaacaaaaactaaacagatttataaccccttaacttgaaatgagccaaaattgaactgccaaaactttatgacttcattttctttcatagttttccaccacattggttcaaacagacaaactccacttgaggtcaagcagaggtcatttcactttcattactaaaatataatttacaatatgccagacctaaacaagtttagcytaaagggtttgtataatgtaaaccatctgttcctcaacaatacagctaatttcctgccatcaccgtacagtctactgactgcttctttaagggtttttatgattttttaactagttcaggatttatgtaaaatttgaaaatgagtctatagttaggattcatttgtaccaagtaacttgagcaccttaaaaatgcaaatcactgtggaaattgttcccctgaaaccaagctaggagcattttttttctgggcacttctttgctggcagctgcacaggtgttcgaagggaagattttgtggactctgccattttagatgctttccatgcctctttgcaaagcaaaccccccaaatttagttttcagtagctctagtaaatgactccttggagaagacttgggattatatgctatatggcccactggatattggtgagataggacaagatacactttggggtaaaatctactttctttcatgtgtctgaacagggaggaagaacaattataattccatagagtgaccacatactgaaggctaacctagctctgtgaggtggcaggcctctcaggctgagcctccagagacattcggcttcaatctgggatcgctggccagcaggcttctctggtttcaaacagaatgctggggccgaaaaacagagagccttggagttgcaagtgtggctctttcggctctcctgaaaattcttgatactttctttagcccctttctccatctgtaaaatagcaaaattaggcgttctgtttccaaaggcaagtatatgagaacaaatttgcttacctcagtggaggggaatgcagctggccttcttagccacgaagccccaaggccatgtgtagggctgatgccaaggtcctgtccacctcttcctcttttcccacctccagaagtttggctggcttgcttcctttacccatctgctaccatccactcttccacacgagttcttgttgccttcaccttcattcacatctcagaggagccagctacaggccactcaacttctcacccaccctcaagctccaaaacaaattccctgtcatttttaaaggattttttttttttaactagcaactacaggagaacagagaaagattaacaggaagaaagttaaacactctgcaactacttaaggcttaaatggatctaaatcatttgcattactttacttcctggatgactttcctaataaggataataagaatgatttaaagggcacttattaggtgggaattacgttcatacatcgttgtatttaattcctactgcaacagctcaagctagatagtacattagttcatagatatggaaacagaggttcagaaaagttaagaaattcacccaaggtcagtgattaatattataagacctatgccacaggatcatggtgttaaataagttaatatttgctaagtgcttagaacattatctggcacaaagtaagtgctatgtaagtattaactattattcataaaaagcagcagattcaagatgcaaacccagatttataggagtccaaagctcacttagtttgaattatgccatactgcctatggatacttttcaagcagtgaaggaggagagggtattgggtttctaactcctcattataccagcctaatattccatgagtttacttcctaattcccattttccacaaagaagttttagtactcagtcccttaaagttctctgtctccaaaagcgtagagatcttatttttgtcaaaaagtaagtgatgtctactttgccattcaagggaccttcacctaaactggatttatttacatcattaggaaaagttctgatggaaatctccaatcttaatgtcatgcaggaaaaattcaccttgagttactcttgccagcaaaagtaaaatcatctgagtgctacaagacaaaaaaagtagggttggctcaactggttacctttctcatcacccacaccttgctctctcaaaggaattctacaagctcccacaagaatacagaccctaaaagcaaaaggaaaaatggtggatggacttacaattgcaaaagatatttcctagttcagtaagatgggaagattcgcctattgtttttttttttttaaaaaaatagttatttaatttaaaaaaatagtaatttaataaattaaatagttatttaatttaatatattcacctggttgaaaaattttaaagcatagaaaagcagaacctctgcccccctttttctagtttctacttccatacccccaataatcactgctatctatttcccaagtatcctttcgtagtttctttatgcttatacaaagaaatatgtttcatgtgttctttttctccttctctcttacacaaaagcagcatccagcattaactgttctgttgctttttatttttagctgagcaaaggattttgcagaccttcccataccagtacatacgaaacgtcctcattcttttttttcaaatgtggaatattctatttactagctccactgtaattgatttaatatattctctatagggacatggaggtcattgataatattttgctattacaaacaatactatattgaatagaactagatcaataagatttaatttactgaaagtttaaagcaacaaattaccattactttcagcacaagtaaactttctaaaactcatttccaaatataaacctcacaaaatctgctttgatgaacaaataagaccaatttataatgagacagtttatttgcatagaataattaatgttccaaaatccccaatcccaatttgtccttttaagtgagtattttgctgcaagtttatttacacttacaattaggttagtgggcattttgccctggaaaatatcagcctagaacaaatctaatcatcatgaattctaaattagtagagtttggataagagaacttttttaccaaattatctaaactgttgttttaaactctgtacagagagctctggatttcatatgtatttcaacattgtcagtttcagttagaattttcagggtagtattcttttttaaaaaataaggatttgaaggatggggattatttgaaaaatcagttgtatgtaaaatgcattgtttttattactttcttttctaacaaattaaatgaaacatcagactaaatttgaggtacattttaaaatagtaaaaacatataacattatagacatttacttgccaagatcaaatgtcatgattcaatacttattttcattgtgagctaatgccttcacctgtctgtcttaaggtcaattaataaacaacccacttgcgaagacctagggatatacgttggtatgaagggcagtgcttccaataagatttcccttgaaatctcgttgtgaggacaaaatacatgcataaaaagaacagaaacatcaagttgataataataacaaaaagttaaatagtacttaccatgggccagacataggtctgagtgctttacaaacwttaactcataggtctgagtgctttacaaacattaactcattaaaagtttgcaataacatggtaagtacaattattatcatcccattttatagatgaaggaattgaggcacaaagttaaatgttgtatctggggtcacacagctggtaagtggagaaggcaggattccaactcagactggctatggaggccacttgtgtaaccagccaccacactgctttgtgtatgtggtggcattcacagtaaaggcaaaagagtctagcaaagaaatgaccatagtggtcagggaaggttttgcgggaagtggggcctgaaacaggctttttagaaaacaaaggatttaatcaatggagaagaccgcatttcagaccttcccatctctattgtgagtacttcagaaggacaatcttttgttttggtttctcttttagcacaataaatattcgaagaatggcagaacattggaggaacaaaagtattaggcaagaatgtaaatggtttcaggagtggacattgagaaaacctatttaactaaagtgatgccatcacacagagaagtagcaagggatcatgtcaggaaagtgagttaggaccagattacaaatgctctgagtaccaggctgtagcctctgtggtagtgcttctgacaccctaatcttcacagaaaccactggggtcttgttaaatgcacatgcagattcagtaggtctgaggtgggcccaagagtctgcatttgcagtaagtttgggtgatgctgatgttgctggtccccagaccacagtttgagtaccaagactctagacaacagcaaaaaaccattttgtggctgggttgagggaaagggatagggtagtgatggaaagttgtctatggcacctcccctgagttgcagccaacgatttgaaagatatatagacctacaatattttattgaatttgtttatagaacctttttctatatgccccgtccctcctttcggatgcaaagctgtcttgcctgaagatatgttttaaaccacgtttttcctctctttcatacagagcaaggctaaagagctacctctttctgctgtacgctttatggaagaattgggtgagtgtgcctttggaaaaatctataaaggccatctctatctcccaggcatggaccatgctcagctggttgctatcaagaccttgaaagactataacaacccccagcaatggayggaatttcaacaagaagcctccctaatggcagaactgcaccaccccaatattgtctgccttctaggtgccgtcactcaggaacaacctgtgtgcatgctttttgagtatattaatcagggggatctccatgagttcctcatcatgagatccccacactctgatgttggctgcagcagtgatgaagatgggactgtgaaatccagcctggaccacggagattttctgcacattgcaattcagattgcagctggcatggaatacctgtctagtcacttctttgtccacaaggaccttgcagctcgcaatattttaatcggagagcaacttcatgtaaagatttcagacttggggctttccagagaaatttactcygctgattactacagggtccagagtaagtccttgctgcccattcgctggatgccccctgaagccatcatgtatggcaaattctcttctgattcagatatctggtcctttggggttgtcttgtgggagattttcagttttggactccagccatattatggattcagtaaccaggaagtgattgagatggtgagaaaacggcagctcttaccatgctctgaagactgcccacccagaatgtacagcctcatgacagagtgctggaatgagattccttctaggagaccaagatttaaagatattcacgtccggcttcggtcctgggagggactctcaagtcacacaagctctactactccttcagggggaaatgccaccacacagacaacctccctcagtgccagcccagtgagtaatctcagtaaccccagatatcctaattacatgttcccgagccagggtattacaccacagggccagattgctggtttcattggcccgccaatacctcagaaccagcgattcattcccatcaatggatacccaatacctcctggatatgcagcgtttccagctgcccactaccagccaacaggtcctcccagagtgattcagcactgcccacctcccaagagtcggtccccaagcagtgccagtgggtcgactagcactggccatgtgactagcttgccctcatcaggatccaatcaggaagcaaatattcctttactaccacacatgtcaattccaaatcatcctggtggaatgggtatcaccgtttttggcaacaaatctcaaaaaccctacaaaattgactcaaagcaagcatctttactaggagacgccaatattcatggacacaccgaatctatgatttctgcagaactgtaaaatgcacaacttttgtaaatgtggtatacaggacaaactagacggccgtagaaaagatttatattcmaatgtttttattaaagtaaggttctcatttagcagacatcgcaacaagtaccttctgtgaagtttcactgtgtcttaccaagcaggacagacactcggccagaaaaaaaaaaaaaaaaaaaaaacaagcaaacaaaaacattgtgggatgtgcactccattggagtgcatgacatggcattgggattggaacatgtggtttcgagcactgaaagctgcaaaccagtgaagaggaaaagaaccttgtgattaaatataaaaccaaaagtcaaatggtgctttgtgttttagccttcagtcaccatgactggtctctcccccagatgtatatataccatagcatttgtctacctgctgtcttttcttcaggacagatgttcaggaattatattgattgaatttagactctgtgcatgttcttatggaaatgatgttcagaatccatgaagaaacttcaggccaaatttgaaaccctggagggaaatgagccataagggaagtataacaagccctgaagccttttatgtcgttgtgcttctttgggaaggtgtagagtgtgcctttttgtgaatcctcctctgatcatgagggtctttcccacagtttctcacagtgtgtttacactgcccttggaataacacagcgcatcagaccataagaaggctagatgtggatgctagaattgattgttggttgatagttctctttgctggattaggaatgaggcgccaaaggaagcacagccaggaaaatggccccacagcctagatcagcatctgtgggaaaggaaaaagggttcccatggggacagcccccataggagttttctggaaccagtaacactgaaaaataagtgtgtggctacagatgagcacgcccaccccttgcaactccctgtttacaagttgtccgaggcattggagtgcttatggtcaatgggctctagggaagtaggaaactccatcatgatacaaatgtctagtaattttaaagtttctttccctttttttctgtgctggaaatgttcacagatttgattcccgccccaagaattacaacaatgtattcatacagtcagttggaatccaaaggcaattaattctattttgcaaaatatgatggtcttcctaaaaaacaagtactgagttctcatttcaaaagttaccaagaactgaattctttaaactagcaaaccgaagtaacatgaccatttttgccttagtgggaggtttcaaatgtgcagctcatggcatttacctgccgaccatcttttgccaagtttagaattcttatgcgtttcaagttctatatagaaagtaattttacttttgatttttctcttgttaaaaaaaaactcctttattctaagaacaatgtctcaaagtctcatttttactttaaaggtataagagacttctaaagagacttacgggatataaaagtaattcctggaaatgatatttgatgaggagaatgtaagagaatgaaaaacacattgatgttttcatttttaaaaaatacaactagcatgagaaatcaagaaaatatgtttaccaaaatgcattgcaattttcccaaacctgagtcttcaaataacaaacatgaacttataggtactgtgaactagaagaattggttatatccagatttctgggagataaattaaaacatatttttgtggcataaataagctgattcagaagttacatttcttaactttaggtagaggagaatatttgtatccttttgttgctatgcaactgtttaatgatgaagcttcaaaccacaattttgtatatcatatgacaatcaattgttttccaagaatatttattattttaagtacacaatttcagtgaatcttgagtttttctaggagtcccttaaagggaaattagcattccatgagccagtaaaatacctactctggtaaaacattattatggttaaaaagtaaattcaagttagttttttataaagaactataacatttattttaaacattttataataactgaaracattaaagtgagcaaatgaaatttcaaaaccacttgtaataatgtattttataatcgcactgtgatactatataacacagtctcttttgtattaaaatagtatttttttcacaagctgaaaaatatcttttcctttgttgacaatgttttgtaagatgactttattttcagatctttttctccttttttgcacaaaactatgcttatggtttgtgtcacagaagtgaaaatatatctttgcatttttatatctggtctgtttttcttgtttcctttgtttttaacttgatatagattttcttcaaatatataatggcaattttcagatatctcaccttaccatatctttccttattttcactgcatgcatttaatcactgtattacttaatgtttgatttgttattatgggcatttcaaataggcaagcattgaattgtaatgacaaaaaggctattttatattaaggatatatgcatttgtatttcacacaccagagatgatattaaacactgattattttatgctgctgtttattaaaaatgtttactataaaatattatttcctgaatattgctgtcatagaggtatttggggattttaacatttacattttatagaaagaggaatcacaattcctatttgctgttatttcattaaatttttttttttcagtaggcttttaaaacagacttgggcattattttgctagcaaccataggtggagaggggaatcctaatgatttcataactgaatactatccacctatatatggcaagctttgaatttttaaaatcaaaataatatattgaatagttacaaccaatggaatataaaaaatatttgattttaagaatatagttgcatcattttctgccttaatatttccatataatcttagatatcaaaagtcacctctttggactctaaagaagaagaggctgtgtacatcttatcatgcccaacttagcttccaaacatattgataaaataaatggggccatttaattgtcacaacttatctttatgaccttatttgcccaaaagaaagagttcctcatctggcaattaatacacatggtcaaggaaaatgagtaccataatgaaagttcaaagaagttgtccatatctgctatttaacacagaaaggaatacaataaaacctttagggccttatccatctgttttaggtacagctcttgtcaccacctcaacaatcaaactcaataaagcaatcccttcacatggcagtgagatccgtgtcaggctgggtttctccctctcacttgaattcctcagcctgccttttacccccatttccttcttttatctcccagctcttgaccctcctgccatccccaatcccttcaactctgagattcccttaattccctaatcaccaacatctgcaaactcctagcatcaccttcccataatgcctactacaatactgaataaagaggagctcttttatccacacatcttctaagatgattacctatcccagtacttctcaaagtgtggttcccagagcaaagaaacagcggcaccctggaactggttagaaatgcaaattatcaagccctactttgaagtactaaatcaagggatccacgggagatgctaggggtgaagttcatcctcttaatttagacagcattttttttttcagctaatagctcaaatgctaaagaggaaatcctggggatgagacccagaaatttgtgttttagcaagcctcacatgattctgatatactctaaagatcaagaactgacttaatttaaaggcacgggggtgagtgatcattacattcttttgtttgtttgtttgtttgtttgagatggagtctcactctgtcacccaggctggagtccactggcgccatctcagctcactgcaagctcagcctcccgggttcacgccattctcctgcctcagcctcccgagtagctgggactataggcactcaccaccgcgcccggctaattttttatatttttagtagagatggggtttcaccgtgttagccatgatggtctcgatctcctgaccttgtgatctgcccgcctcagcctcccaaagtgctgggattacaggcatgagacaccgcgccaggccgatcattacattcttagtaatgtgcacgtaagcatttaataacattttagcccctttattcccctttaaagaaaatcaagttttactgtaaaattcagcactaaaagctgtttgtgttagccatttgacaattagctatattttttgaagttgttcccttggatagaaaactgacaacatgtagtctttgtcaagaagatattcctcatccagttcacctgagacctaaattcttggatagtggccaaatgctttttccttcatatggacaaactcaaagaagttggtctcttagtacgcgtttttttgacccatgaactgatgattgacaaaacaaaacaaaacaaaaatcccttctatgttgcaacttaacaaagataaggtcaaggataggctggtctttgggaggagggataggctcagccctagtaagcatcaagcaggaagctgctgcaggggctcccctccctcccttgcacttcctgtgatgccctgacccagctggctggatgcagacacctgtggcttgttctgctgttttccttggccagctggaatccatcatcagtccctggctggccatgagtgctcttctgcccggactttgctctcctctgcctttaaagggctgaaagctctgaggaaggacagaaagagggatccaagggaggttctggggtgcagttcatactcttcttaatttatacgcatttttttcagccaatagctctaatgctaaagaggaagtgccagattagcggagaaagaacaagggagcacacacaagaaagggtttttgcagccaaaatatgactgcattgaagtttgttaccgtaaatgccaatggtaataggacgctgttagctcaagaaaaggagagtcttacaaaccatcaaagcactcaaggtcaatgtaatcctctgggaaattaggctgggaaggcttaaaaatatagacatatagagggagaaggtctgctgacatatttatgactagttgaatcttaagcacgtatgaattgcttactcacaaatgagtaccataacatttgctgaccgggattggcaagataccttaccaaatgactatgttagtaaatacagtcatgcrttacttaacgaaggggatacattctgagaaatgtccttaggtgatttcgtcacggtgcaaacattatggtgtacaattacacacacagtacagactactacaaacctaggctacatagagtatggcatactgctcccaagctacaaacctgtacagcatgttacagtactgaatactgtaggcaactgtaatacaatggcaagtatttgtgaatctaagcacttatcatgaatggagcttgtaaaactggaagttgctctgggtgagtcagtgagtgagtggtgggtattgtacactactgtagactttataaacactgtacacttaaactacactaaatttatttaaaaattcttcaatcataaattaaccttttgatttatgaactttttattttaactttttgactcttgtaataacacttagcttcaaacatgtacagctgcacaaaaatattttttatatctttataagcttttttctatttttagtttttttaatttactttttaaacttttttgttaaaaactgagatacaaggccaggcgcagtggctcacacctgtaatcccagcactttgggaggccgaggccggcggatcatgaggtcaggagattgagaccatcctggctaacacggtgaaaccccgtctctactaaaaatacaaaaaaattagccgggtgtggtggcggacgcctgtagtcccagctactcgggaggctgaggcaggagaatggcatgaacccgggaggcggagcttgcagtgagccgagatagcgccactgcactctggcctgagcaaaagagcgagactccgtctcaaaaaaaaaaaaaaaaaaaatactgagatacaaacagacactagcctaggcctacacaggattaggatcatcagtatcgctg

SEQ ID NO: 8721 - DNA, 15470 bp, Homo sapiens
ggcggggacaggtggccgttgaggggtgcacctcactcacggtggggacggatagccgtcgaggggtgcacctcacaacggggaggggctgtgggagaggstgacggccacatcctgcaggtgacccagctaagggtgttygtgtcagtgctggacgtcaatgacaatgcccccgaattcccctttaagaccaaggagataagggtggaggaggtgaggccagcgaagcygcggggactgggcacgggggtgtgggagcccagggtgagggcaggaggtgagtggtggccgggggctcaaccacagtgggggtccacaggggccaagagtgtggccggaccaagcccctctccctccccaggacacgaaagtgaactccaccgtcatcccygagacgcaactgcaggctgaggaccgcgacaaggacgacattctgttytacaccctccaggaaatgacagcagtcagtgccgcccaccctgccccagcacgagcccctcgcctctgacacccacagccgccctcgccctccaaggctcttaggctctgtcctccctgaccctccccagggtgccagtgactacttctccctggtgagtgtaaaccgtcccgccctgaggctggaccggcccctggacttctacgagcggccgaacatgaccttctggctgctggtgcgggtgagcaggtcaccccagccccgagtcccacacacttgaggccccccggccccagctgctcccaggcctgatccagcacagccgtctgttgcaggacactccgggggagaatgtggaacccagccacactgccaccgccacactagtgctgaacgtggtgcccgccgacctgcggcccccgtggttcctgccctgcaccttctcagatggctacgtctgcattcaagctcagtaccacggggctgtccccacggggcacatactggtaatggggagggaggggcagtgcacggggcagggccttctaggcaggctggacacagggacggccaggatcaggagaggaagggcggggtcggggtcagggggtggggccgatttcggtcgtgattttgaaacaaatgcagactctccttggaaaccaacccttcccatcttgagcggtgagggagcaaaccctgaacacacagggaggagcgtgggccccagagccaggcggtctcaggggcctggggaggtgggctggggccctggagctcttaagggatgctgacatctctgccctgctcacagtcaccactgggcccacacaggctgtctgcaaaccttcctggcaccaaggcacctggggccaccaaacagtacatgggaggcagaaatgcagaccccgggagcccccacttcctaaatgtttgcttacccgtcaagacaagccttgtgcaaatgggactcagtatctttgggcaactggactcattcattagtaagggacccacaggggtgttactgattgtgatgctgggacaagggactgtcctaggcaggcagggacgcccggccaccagcgggactgggcccctcctcagccaaccctgcccttgatggggagtcagaggggccaggctggggccatccaccccagccccacgacgtgccctcccttccgccatccytgaagccatctcccctcgtcctgcgtcccggacccatctacgctgaggacggagaccgcggcatcaaccagcccatcatctacagcatctttaggggtgagtggggcccagccctcaacaatgccctgtaccccctctgtccctgtctccatccccaccttgggcagagctggctgggtccctgggcctcagggggccggggctgagcacttccatcatcctcccaggaaacgtgaatggtacattcatcatccacccagactcgggcaacctcaccgtggccaggagtgtccccagccccatgaccttccttctgctggtgaaggtgaggtgggcacctgcatggggggcagggcagagggggaagggtggaaggtagggcggggggtcagggctggggggccggggcagggcccccgccaagtctgcacctgcctttcctgagccccagccttcagcgccagctccaccttcaaccccactagtcactgctgcctcccccgcctccagggccaacaggccgaccttgcccgctactcagtgacccaggtcaccgtggaggctgtggctgcggccgggagcccgccccgcttcccccagagcctgtatcgtggcaccgtggcgcgtggcgctggagcgggcgttgtggtcaaggatgcagctgccccttctcagcctctgaggatccaggctcaggacccggagttctcggtagagagtgcatccaaggcctcccctctgtgggtgggtcagggctgtacgtgggaggcagcctggccggggactcaatgagaccctgtccaggacctcaactcggccatcacatatcgaattaccaaccactcacacttccggatggagggagaggttgtgctgaccaccaccacactggcacaggcgggagccttctacgcagaggtgcggggcagggcaggcgggcatctccaagggtgtggggcttaaagatgtgtctaggagggacaagccccttcctgccccaggttgaggcccacaacacggtgacctctggcaccgcaaccacagtcattgagatacaagtttcygaacargagcccccctccacaggtaagcccccctccacaggtgagcccccagggttctccaaataagccccttcggtggctcctttcccgcggtaggtgtgcaaggggcgggcagaggcaagcccaagcactgttcccggcccccagatgtccccccatccccagaggctggaggaacaactgggccctggaccagcaccacttccgaggtccccagaccccctgagccctcccagggaccctccacgaccagctctgggggaggcacaggccctcatccaccctctggsacaactctgaggccaccaacctcgtccacacccggggggyccccgggtgcagaaaacagcacctcccaccaaccagccactcccggtggggacacagcacagaccccaaagccaggaacctctcagccgatgccccccggtgtgggaaccagcacctcccaccaaccagccacacccagtgggggcacagcacagaccccagagccaggaacctctcagccgatgccccccagtatgggaaccagcacctcccaccaaccagccacacccggtgggggcacagcacagaccccagaggcaggaacctctcagccgatgccccccggtatgggaaccagcacctcccaccaaccaaccacacccggkgggggcacagcacagaccccagagccaggaacctctcagccgatgcccctcagcaagagcaccccatcttcaggtagcacccactctgttgccttccctccctgactccggtcattggctggtatgggaaacgctgtaggaagggtccaccccaggctgacctggcctgaccatgaaatcccaaagaggagtctgtttgggactgacagacacagacaggcccaaggcccccagtgaggtaacctgtgatgtgtgtaggacagaggccagatgtggggtccagcgaatcccacgattcccacggctgccgctcaccctgcaagtccctgcacctcttgtgagctcctgtgagcagcttggcctcccgggggggagggggtgggcagggtctcgatgggacacacaggccccttgagccagggtcagcagagcctgagatttgggagacagcccaggcctgggtggaacccaagtgtcccaagcctggcacaggttggcatgggaaatgcctggggcactcaacagtgcggggatgatgacrttttccactgcgatgccaggtggcggcccctcggaggacaagcgcttctcggtggtggatatggcggccctgggcggggtgctgggtgcgctgctgctgctggctctccttggcctcrccgtccttgtccacaagcactatggcccccggctcaagtgctgctstggcaaagctccggtgaggcccaggatggagaacagggcaggcgaccaggcaggaagtgggggacgggggacaggagaggggagggcagagggacagatgtggagacggaggggtgtccagcgtggaatgagggtgtgcagggccaaggctgcagagacccagggaccccgctgacgcctcgactcccgcctgcaggagccccagccccaaggctttgacaaccaggcgttcctccctgaccacaaggccaactgggcgcccgtccccagccccacgcacgaccccaagcccgcggaggcaccgatgcccgcagagcccgcaccccccggccctgcctccccaggcggtgcccctgagccccccgcagcggcccgagctggcggaagccccacggcggtgaggtccatcctgaccaaggagcggcggccrgagggcgggtacaaggctgtctggtttggcgaggacatcgggacggaggcagacgtggtcgttctcaacgcgcccaccctggacgtggatggcgccagtgactccggcagcggcgatgagggcgagggcgcggggaggggtgggggtccctacgatgcgcccggtggtgatgactcctacatctaagtggcccctccaccctctcccccagccgcacgggcactggaggtctcgctcccccagcctccgacccgaggcagaataaagcaaggctcccgaaacccaggccatggcgtggggcaggcgcgcgggtccatgggggtcccattcactcagtcccctgtcgtcattagcgcttgagcccaggtgtgcagatgaggcggtgggtctggccacgctgtccccaccccaaggctgcagcacttcccgtaaaccacctgcagtgcccgccgccttcccgaggctctgtgccagctagtctgggaagttcctctcccgctctaaccacagcccgaggggggctyccctcccccgacctgcaccggagatctcaggcacccggctcaactcagacctcccgctcccgaccctacacagagattgcctggggaggctgaggagccgatgcaaacccccaaggcgacgcacttgggagccggtggtctcaaacacctgccgggggtcctagtccccttctgaaatctacatgcttgggttggagcgcagcagtaaacaccctgcccagtgacctggactgaggcgcgctgggggtgggtgcgccgtgtggcctgagcaggagccagaccaggaggcctaggggtgagagacacattcccctcgctgctcccaaagccagagcccaggctgggcgcccasgcccagaaccatcaagggatcccttgcggcttgtcagcactttccctaatggaaatacaccattaattcctttccaaatgttttaattgtgagagtatctgatattcttgactgaacaatgtaaaaaacccaaagggggctgcgcacggcggctctcgcctaaatcccagcactttgggaggccgaggtgggcagatcacctgaggtcgggagttcgacaccagcctgaccaacatagagaaaccccgtctctactaaaaatacaaaattagccgggcgtggtggttcatgcctgtaatcccagctactcgggaggcttaggtaggagaatcacttgaacccgggaggcggaggttgtggtgggccaagattgtgccaccgcactccagcctgggtaacaaaagcgaaactccatctcaaaaaaagaaacgcaaacggtgcagctgcccctttttcgaggcacgtccacctcccattacccacttccttttttttttgagactgagtcttgctctgtcccctgggctgtagtggagtggctccatctcggctcactgcagccactcccaacgccctccactcctccctactccgcgctggccggggcggggttccgctggtcgcatccaataataagaacaggcggcgcgcgcccttcccggaaactcccgcctggccaccataaaagcgccggccctccgcttccccgcgagacgaaacttcccgtcccggcggctctggcacccaggtactggggaccccagacccacgcggtgcaggccgggagcgagagcctccgtgggggctccgygaccccggaggggtagagccaagagctgggggagcctgagagatgagggtcgggcggggagggaggcggaggcggaggcggggttccgcggagctgagaaccggacggggtgggatcgaggagggtgcgaagcgccactgtttaggtttcgctttcccgggagcctgacccgcccctgacgtcgcctttcccgtctccgcagggtccggcctgcgccttcccgccaggcctggacactggttcaacacctgtgacttcatgtgtgcgcgccggccacacctgcrgtcacacctgtagccccctctgccaagagatccataccgaggcagcgtcggtggctacaagccctcagtccacacctgtggacacctgtgacacctggccacacgacctgtggccgcggcctggcgtctgctgcgacaggagcccttacctcccctgttataacacctgaccgccayctaactgcccctgcagaaggagcaatggccttggctcctgagaggtaagagcccggcccaccctctccagatgccagtccccgagcgccctgcagccggccctgactctccgcggccgggcacccgcagggcagccccacgcgtgctgttcggagagtggctccttggagagatcagcagcggctgctatgaggggctgcagtggctggacgaggcccgcacctgtttccgcgtgccctggaagcacttcgcgcgcaaggacctgagcgaggccgacgcgcgcatyttcaaggtggggaccccagccccgccccgccccgggtgggagagcccgcctaggaccccgcgggcccggcacacgtgttctgtccccctctwmaggcctgggctgtggcccgcggcaggtggccgcctagcagcaggggaggtggcccgccccccgaggctgagactgcggagcgcgccggctggaaaaccaacttccgctgcgcactgcgcagcacgcgtcgcttcgtgatgctgcgrgataactcgggggacccggccgacccgcacaaggtgtacgcgctcagccgggagctgtgctggcgaggtgagcgacgccggctgccaagggcgttggcattcgtcctgcttgggcaaaggggaacattctctgggtcagatttgtggttttagaagctgttctgggagaggctgccagcaggcccaggacaggtgsagagccacatccccacctcctcaggccacagcmtaagggttcacagccaggaagctggtgggggctacaccaggctctccttgtatctctcactctggtgtcggggcctaacgcctgccccattctctctcagaaggcccaggcacggaccagactgaggcagaggcccccgcagctgtcccaccaccacaggtacccttctctctgcctgcctctcctcctgccaggccgcggagctgcttacgttcaccctgacttttccctgcagggtgggcccccagggccattcytggcacacacrcatgctggactccaagccccaggccccctccctgccccagctggtgacragggggacctcctgctccaggcagtgcaacagagctgcctggcagaccatctgctgacagcgtcatggggggcagatccagtcccaaccaaggctcctggagagggacaagaagggcttcccctgactggggcctgtgctggaggtgtgggcgtgcccggggagggggggagcgcgggaggggccagtgcacctggacggacactttagaagggggctggggattggggagctggagaattaggaggggaccaccgttcccactgtcctcccctcctcaggcccagggctccctgctggggagctgtacgggtgggcagtagagacgacccccagccccgggccccagcccgcggcactaacgacaggtgagaggggtaggggttgggaggcctggggcacagggagaggctagggatgaggtgccagcacaggattcccttccggatgcaggcgaggccgcggccccagagtccccgcaccaggcagagccgtacctgtcaccctccccaagcgcctgcaccgcggtgcaaggtgagtgcatcccaggaaggggcagccygtccccgcccacccycgtcactcacggcttgtccccgcccacccatcactcacatcctgtccccgcccacccccgtcactcacatcctgtccccgcccacccccgtcactcacagcctgtccccgcccacccccgtcactcacagcttggtctccacacagagcccagcccaggggcgctggacgtgaccatcatgtacaagggccgcacggtgctgcagaaggtggtgggacacccgagctgcacgttcctatacggccccccagacccagctgtccgggccacagacccccagcaggtagcattccccagccctgccgagctcccggaycagaagcagctgcgctacacggaggaactgctgcggcacgtggcccctgggttgcacctggagcttcgggggccacagctgtgggcccggcgcatgggcaagtgcaaggtgtactgggaggtgggcggmcccccaggctccgccagcccctccaccccagcctgcctgctgcctcggaactgtgacacccccatcttcgacttcagagtcttcttccraggtcagtgaggcccytgcctggggggctgtctccaggggtcsttgggagcacctgcctgccaggtactcagcagagtccccttcttcagagctggtggaattccgggcacggcagcgccgtggctccccacgctataccatctacctgggcttcgggcaggacctgtcagctgggaggcccaaggagaagagcctggtcctggtgaaggtgagaccagagcctcaaggaggggaggccaygtgctcaggcccactgacagacgcctgatgccctcagagcctcggagagggggaggggaggccatacaccgggtcactgacagacgcccgacgccctcagagcctggggagggggaggggaggmcacacgccgggtcactgacaagacgcccgatccctcctggcagctggaaccctggctgtgccgagtgcacctagagggcacgcagcgtgagggtgtgtcttccctggatagcagcagcctcagcctctgcctgtccagcgccaacagcctctatgacracatcgagtgcttccttatggagctggagcagcccgcctagaacccagtctaatgagaactccagaaagctggagcagcccacctagagctggccgcggccgcccagtctaataaaaagaactccagaacacgtactggcatcttggctggtggggaattgggtccaggctgaacacgggtgaggcccagggagggaggggacctccacggcctccctgcacaccaactcacttctgtcttcaccacacacatcacagccaagctttgactcaaagaacaagacccttgacaggccagtggccgccaaagccactcccaccagctgtgccaagggcagggacagcatttccccatgcaggacacctgtcgccagccctcaggctgccactgctgcaccctgcctccaggaggcaacggtgttgagtgcaaactcgagcaattatttacaagagcacaacataattggaaaagagaaagtaaagatattcctaattcagagccaaaggtacacagcagctgttggcgggaggccacctagagatttatcaaggacgcgccaccccaccaggagcccctcttgatcaccaagtgctttatcttccaagtagtaagtcaatcaagaggtttctaaagataatccatttttgataaattagaatggaaacagtgtctctataatatacatacaaaagtgtccagttttcaactgtgagcaacacaggtgcacagaccaggtgtcagcgcaggaacccgacggcaggcatggtgatgccccccatttcccgccactcccgacagctccccgggcatggccccgattcccgccactcccgacagctccccgggcatggccccgattcccgccactcccgacagctccccgggcatagcccgtgattgcctggcctcagccctcggccccctgcgtgggcggctcctccccggcctctggtttcttgtgcctgcgcatgtgcctgtacttgtccacgtacgccttcaccaggttggccaccttcacggggttgatctctccactcttgctgtggcagatctggagaaagaggtgcratcaccaaatgccctttcacatccagatgttccgggccagagcccagggccaaagctgggctccctcgcctgccctgctcaggagcaggccctaggtgcagcacgcagacagacggcggcagaggccgccccacctatgtgagacccccgtcctgttcgctatgccgctcacaaggccactgagggtcccacggtgtcggtgggcggggggagcatgggctgagacgtcaccaggcaactgctcacctctgggggtcgttctcccacctgtaagctgggcgtgggctgggtagttttaaattacccagggtgcactgaggcaccctccttcctaagcatctgccaggggcagccacaggcgaacaggcttgaccccaggcctacaggatgtggcaatacagccccctgacccctaacctggctggctgacctcgggcctgcactcatggccaccccaaagtccatgctgacgagacagcagcgacgtaccgcccgtgaccccgagccccacacacaggctcgcacacagcccaccttctgcacggccttgcgcaggatgtccttgtactcctccttggtcacctccctcttctggtagaagggcttgatggccagcttcacctcctccacagcacgctcctgcatgtgcagcttcttcatgtactagaggggacatgtgtgtgatgcggccaggaagggagccgggagtccctctggccagaggcactgtggttctggacacccttgcagttccagaggcacagcgaccagcttccgcccataaactcagccccaacaactttagtttcaaagtaagatgggaacatggggaaagtgggaggaggcaggactcacctcctccttcttggttttctccgcagctagcctgggggccggggtcttctcctccgagttgctggctgcagtggcttgactgyctggctctgaggctggggtcagggcagcgggcactggggccagggtctgtgctgccccacagcccactagcggcaggctcccctgaaggatgaactggaccgtgggctggctgaccagtgcgcagggtgggatgcttgagggctgggccggggcaggcggcaggccggggctgtaaacctgggagggacacccctgctgagcactgggccctacagctagcagctctgtgcccaggagctgtgaggcctcagccccagcctagtgtggtgtgtgtggcacgggtgccaggccactgcccacggcccacagccctccagcccagacacccacctgagaggggtctgtgtctgggaacccgggttccggaagcacgtgactgggaaagggcagctcggagaacacctgcctgacccctgtgggggccacatcctccatgtcccaggctccttctcggggcttctgtggcctgtgaagtggtgcccctgggggcccgacagacagggaggtgggtgctctgtgcccacccctgcccagaatgctgtttcatggctggaaaaatccagaaaagcaccaggagcaaggaccacagagcagccctcagatccacccccagcaccaaggggaggttgcgaggtgtgccagctcctagccactgatccccgaccatgacctgttctgcccacctgcaggagacccccacacccactatcccagtgttccctggctccagaagctccctgtggtggccggggccctactcactcaggggccctgtccttgacaggagtcagattcacagggggctctgttctcagcggaggccagggccctactcacggggggctctgtcctcggtggaggccggggccttactcacggggggctctgtcctcggcgggggccagggccttactcactgggggctctgtcctcggtgggggccggggcactactcacggggggctctgtcctcggcgggggcgctgctctccgactcctgcaggttccaggtgacccgcttcaccagggctctggaccgcagcaggggggtctgcgaaaccacctcctcaggccgggctgcctcctgtaccctcccactcgcagaggggctgtcttccttccccgcaggcgccacatccggggaactgggtgcctcagccttctcagccgcgtccggcctgagcaaatgtggctcctgggtgccctctggcaggggtgggggctgcgaagggtcttcatcgtgcatcaatgacacctccctctggatggcggccacggccaggctggctgggggcaacgcaggcttcagtgggaagtctcgctcyggggaagagtctgtgctttcgggagaaggtggcgagctcatgtcatcgagctggatgaaaacggcgtcgcttgagaaatcatcaaagacgtgtccggcctccacggagtcgccataatccaggtccaggtcgtccggctcacactcagctgccacctccaggacagggggagcctgcaggggggccttgtcggccgtagccacctccggcgagacatgtgcttcccccaaggctggcaacctggtggggaggtcttcccgccctggctccccctgtgcaaggggygctggggaagcctccctcacagcccccttcctctctggggaatgggaccgggtctgcggccacttctcacgggaccgaggccgcctgtgctcccgtgccctgtgctccgagcttggggaccgggacctccgcttcctccggtctcggggccacgccacactctccttcctgtctggccgctcgtggctgcgttcccgctgatgcttgtgcctgcagagcctctccaggctgctggtgggggagcactcccttccccgaggtctggacgctgatctccttttcttcttcttcctactctcatagtgctcataggaagagctgccagggctccccgaccgcgaccgggacgtcctccggctgtggccccaggggccccgcctgtgctccctgctcttgtccttggctttcttcctcttagctcgctctcggctgctggagcggtcactggaggaccgccggctcttggccttggaccgctgcctcctggggcgctcctcacccactgatggtgacgctgacctcgagctcctgtccctggattcagagcgcgtcccagagcgcgtccgtccgtgctccctggacaccctcttcctcttggccttcttcctgctgcgggagctggatgtggagcgggaccgggaagggggcctgagctccacgactctgtgggtggcagcctgcagcacgtccgggctgggtggggcttccggctccacgacagtcacacaggtcaccgtccgctcctcagagccaaagaaggtgctgcaagacgccccatcctcctcatcccagggctctgggggggatggcctccgcagccgggcagccaggccctggctctctgtgggctcctctcgctccgtgtcagaggccccctcggcagccactgcaccccggagcttggacatggcggaggacggtccgagagggggttcgggctctgtaccaaagatgctctccaccgtgtaggaggtgacgcagcgcacagcctgcaccgtctgggccttcgggctgttgatggagatggttcgtgtgatctcagagggcaggaggccggggccagacctctcggggctgctgccaggggcgctggagtcggagccggtggggtcggatgggtcgtagacctcgctccgcagctgcttcgtcttcttgatggagaagaggggtgaggggttctccttcctctgctccttatcgtccacaggccggaacgtgttacagaagccagggctggagagctggctggaatgtgccatgtttccaggaatattgatccggaagctctcaaaggtcgacccgacccctttccctcttgatggtcccagtggggccaaactgccatgggagctgggggctgggggccgggagctgcccgtgtgcaccccgggctcccggggcaccctgctgctggcctcgctctctgcccgtgtgcctcgccctggctgcccggtgccctccctgccagtcagtcggctgatgcaggcactggggatctcaatgctctgcccgtgggccggggccgcatcccgtctgccaccaccgtcatctctcctgatctttggtatcctgggtagctcagagatgtctgttcttctgggcgctggcttcaggggaggccccggcaccacactgcgacatgggggcttagaatctctgcttgagatcttagacgcggcagaggcaaggggcaaggtgtgcttgttggtgccgttgaaccaggggctgtggctctgtctgaagccaggcacactcccatttgacaagttccgagcctgaaccgccccaggggctgctggcaagtccagcctcacaggcgcccccgcggtgcgggcgggggtgcgggacctgccttgacagctgagccctgtgctctgtggcctgtttcctgacgggccttgggccgggctcccggagggcagtgctcggggctgcaggcagcccttgaatccttcttcccctctggacagactgcctgagtttcgctgaaaagaaactggagctaaaaaacaaaaaagtcaatggcaatcatttcccacccactcttcttaaatgtcagtggtttaatttttatcacaactggttttctgtgaggtcgtgcgctttaaactcctgtctgcctgttgaggtggacacctcgcctttccacacccggagagctgcttcaacagccactctgtggatgacaaagtacagtgcctgaggccatcaggacacgatattaaccaggggcgggggcagtaccccatcaggacatgttcttatgaacatgaagctgtggggctgggtaagaactcggagctaactgagaaactgctcaagaagggaaatcaatgcagaaaaatggctgaggaatggtccccccaacttcagctacatcttccgtgactgagacatgggctgagtgcttgggaacagcctgaggaccagcagcccacagaggaaggggccgtggcagggaaggcactcacccgccctcttggcgctgagggagccgtcgcggtggatgatg

SEQ ID NO: 8722 - DNA, 87467 bp, Homo sapiens
gcccttctctccttccattcattcatttgacatttgccaagtacttatccaagggtgcctggtacctagtgctgggcatacagaggaaacaagacagagcctctgcccccagcaaacttccagcccagtggagagtcgatggtaacaatcttccacatttgattcaaaatgctgaaacacagccaggctgtttgaaggaaattggttcccagaagaatggccttggctacaacagatggaaactggtagcgtgtcagttggcagagtcctgtgtgacatcttttgataaattaatctcatgtgaaagaagtcacccacaaaattctttagccagttgtcttgcccatacctttggttctgagggagaccattatgtaatcacttgactaatcacctggtattgacagtgacacaacttgacgccacaatttctacaaggcttgtgattgagaaaacttcattctttgtcaattatcaacaaacttctcagacattatactcatgcgagctgccttcagggcattttctttttccttttcacatctgtgcttaatgagtagcatttttgcacattgtttttctaagctttatatcctcatctgtaagaggagaggatgatagtgcttaccttaaaagtttgttgatggttagatgaaaaaaattcatatgaaacacttagtactggatctggtttagagtgtttaataaaatgtagctatttatttctatctaggtgctgaaatctttgtgacttcgtgactacttaaatgtgcatgcatgtaagcagtgccttagttttcttttttttttttttttttttttttttttaggcagagtctcgctctgtcacccaggctggagtgcagcggggccatctcggatcactgcaagctccgcctcccgggttcacgccattctcctgcctcagcctcctgagtagctgggactacaggcgcctgccaccatgcctggctaatttttttttttttttttttgtatttttttagtagagacggggtttcaccatgttagccaggatggtctcgatctcctgaccttgtgatccgcccgcctcggtctcccaaagtgctgggattacaggcatgaaccaccacgcccggccagcagtgccttagtttttaatgtttaaaatagtaatgattttaaatgtccattttatctcagtaaaatggtcatacttaatgaaagaatatatcaaacttatctagaaaatagttcaatataaatttacaataacatgtatatggcatctttacaattcgattgaatgtattcttaatttattttaactaattaattcactaattagacaggtaggcataaatattgactgctcatatcaaaatagtctattgttggcataaattgttatttactagataatgtttgtggttatttttaagcatttggctcaactaacttttgtgattagctgcatatgagatgtttaaagtatgttaatgcaaaaaggatagaaaataatttaaatatggcaaaacttctatttttttttaaattcagcctttcaacaacaacaaaaaactctttaatgccagcaacatgaaataacatacaaaattaaaatttttacaagaagctgctactttgcttggaaagatgaaatgttctccaagacagttttggttacatgttccagctacacagtagttagttcccattttactggataagttaaacacctttgccatgcctgttgggagttacatcactctaatgagaaaagaatattcctgttaagaagcaaaaagcatagattaaggcttttaaaaagtgctgattaaaaaataaagtcacttaaaatgtaaacaaaatgcctattaagcgmaaactggttagctttcatggcataatttaaagcccttatccagtattttctccctggttgcaggcaccctgtcaattcttgacaaacttttcagacattctacttacgagggctgcccgcagggaagtttatttttaacttctcacacctgtggttaatgagtaacatttttgtaaacgtggccattttcaaggaagaagggaagcattttatgccaaaaaaaaaaaaaaattcaaaataagaaaaaaaaaaaactaccctaatttatctccctctaatctacctatagaagaagatgaaatgaaagttcgagctctccagagtcaatggcctcctctctagcagaactggaagaaattaataacaggataaaagccaaaggtttcaggaaaaacagcccatcaattaaatgttacacctaaatgtaacatttgaaatgtaacatctaaatgtgacatatttaaatgtaacctttaacatttaacatttcaatgttaaatgttaaatttttgagacaggatcttgctctgtcatctaggctgggtctggagtgcagtggtgtgatcacagctccctgcagctttgatctctcgatcttctgggctccagtcatcccccaggactcatgtcagactcctgartagctgggacgagaggtgcctgtcaccatatctggttattattatcattattattaagagtgtctcactatattgcccaggctggacttgaactcctgggcttaagtgacccttccacactggcctcccaaagtgctgggattacaggaatgaatcaccacacctagcctgtttttatttcagtccttctaaatgactggatctgatcaattattttttgtgcttaatcaaatgtctccattgctaatcttcaaaacaaatgaaatcaatttaattcagatttccataattgctcatgctcctccttaaccttctggaataataaaatttcccaataccattgcccccygccacccacacccccctagttcccraaaatatatgtgcttctttttgttacaaaaagtttaaattgcctgaggctctgggaaaattctatcactatggcaattccaagaagaaacaaggcacagtcctaaatgaagatttgttctgtctctaccacatatatgccttcacacaaatagtaggtttcagaaggagttactggtgtagaagaaatccactactatattcaaggcaaacttcctctcagaaaaatgaagaaatgaggacgccttgtgtatgttgctgctacctgagagcaagtctttgaaaccaaaatcaggagatggttaagagtaaaaaagaacaaatactaatttttaaaatcaacttttgaaaaaaacaactttattgaagcataatttacataccgtaaaattcactcattttgtgtataatccccagaattttgaagcttttaccaaattgtacagtcatcactgcaatgtagttttagaacacagatttccatcacctcaataagattccctgtgcccttttacagttaattcctgttcccagcccataaacttgggtacccatgaatctactttctgtctctattgatttccctttttttgtcacatttctctctctgaatacagttttagaaagaaagaaggaaagaaggaaaaagaaagaaagaaagaaagaaagaaagaaagaaagaaagaaagaaagaaagaaagaaaaagaaagaaagaaagaaatccaagagtatttcctaccaataggagaatacaatttactgaggaagaacccacctggataaaatagaattcttaaggaagtccaacgatcctggacaccacacacgttggttgaattagagtcagagtggtctttaagatttaattatctctccaattagagataacagacttagagttacaagggaccttgataattaaagaatactgtagtaagccctgttatcttaactaagaaacgcctctgtttctaaagtttaaaaaaaaaggcaaaaaaaaaaaaacctttcaagtaaaagagtaaactcccaagcattcctataaaaatcagtcagatgttattttttttcttatgagacagagatatcctgtttccttaaataaattagatatctatgggattgaaatataaaagtttcttccaaaatgtaaggtgggctttccacttcaagctccactatgcataygattctagtgtattttcagtgcagtaaatatatcaaactatcatggttttggttgaccaaatacttttctaatcacttatttccttcccccagaatcaatgaattttaagaaagctttagctacaggtttatcttgcttacatccggatttccaggtatccttccctctggaagaaacactcggcttcccagaaatttaccaagcattttacaaggagctcttttatatttgaaaagagaaaactgttttgtcaagtgatgagaaattccaaaaaaatcctctaayccagacaggattctaaatttggggaaatccatggcactctttcaatttrgagtgtgggtcacaaagattcctcaagaggtttttttacactatttgtaggaaactgatatttgctgggtgttttgctttgttttggtttggttttaaatccttgcatgaataaaaacaaatgctaattttgtgtctttaatgtgtcaggcattttatagaacacagagttctaattactcctgtggcaattactgaaggtgaaacttttggagaaaataggtaccttgccgaaataaatatattttattagtagcttcttgtgttttaaagcaaatggaacctctgaactcctaacacaaggagaaggcaaagcattcagttcgggtctctctggatctactgtggaagtggtggactcctccttctgaagatctttaaaagcaattgtgcctgtgtttatctgacaaaaaggactgatgtgatgtgttgctaaatgagagacttttcagattccctttccactctgagtttagagttcaaggcgggggaatcttaaaggagaactttccacactcttggagtaaataacaattgaaatataaaaaatctggcggcgggggatggagggggcattctgtaatggaacttgtcagcaaaaagaaaatggcaaataaatgtgagaaaggggccgaaggagggcaagacagtacatagggtgccccccacccacccggcttttaatgattcaagcaaaaaaatctctgctttgtgtgtaactggcacggtgaacgtgggaaaggacacgaagacctttctctccccacagctggtccaactttccaattttcaggttgttcacagtgatttcactttcagtggaaacgggcgtcccatccccaggaaaggaaggctttcctgcatgtgtaaaaaagtaaactgttactttgtccttgcaaaagaaaacttcattctctgaacttccccgggatctgcaaagcgccccgcggaactcccggtacttagtagaagctcattaaaggtctctgttcccctttgctccccgttcgcccgctggccctttctcagagccagacaggcacagcgctgagaagggaagaagtccgaacagggagctgtgaagacaaaataagggagtcccgagtcagtaccctttagtccaaagaaagggagcgggatggggggaaaggcagccccgccctgggactgaaaagtctggattcttaacagctgcaaggtcgtggatattttatgggttttcttcctcacaaaatacactcctataagcagagattccccccctccaccccgaagagaggtgacgcaatgtcctcaaacactaccaccacccccaataaaaaagaaaagggaagggggagcgtcttgcaaccccttcgcttcacacaagtccagccactccctttcctcccagccgcttcccatcccttcccccatcccctaaaaagtttgatgaccgcaaaggaaaccgaaaaaaagttgtcttgccccagtcctggcgggccatcagcatctcttttgttcgctgcgaacccacagtcccccgtgacgtcacccggagcccgggccaatcggcgcgcggtcggctgcggcggccggcgggcgggcgggtggggtggggcggggcggggacagcccggcgggtctctcctcccccgcgccccgggcctccagaggggcgggaggggaccgtcccatataagccccggctcccggcgctcggacgcccgcgccggctgtgctgcacagggggaggagagggaaccccaggcgcgagcgggaagaggggacctgcagccacaacttctctggtcctctgcatcccttctgtccctccacccgtccccttccccaccctctggcccccaccttcttggaggcgacaacccccgggaggcattagaagggatttttcccgcaggttgcgaagggaagcaaacttggtggcaacttgcctcccggtgcgggcgtctctcccccaccgtctcaacatgcttaggggtccggggcccgggctgctgctgctggccgtccwgtgcctggggacagcggtgccctccacgggagcctcgaagagcaagaggcaggctcagcaaatggttcagccccagtccccggtggctgtcagtcaaagcaagcgtgagtactgaccgcgggctgaaacaggctgcctcagggatgggaccctaaagccgaccaaagttggggctgaagttttgtgcgcgcgygtgtgtgcgagtgtgtgcgcgctttactgagagaaaccagctgtgcacacaaaaggaccgagttttgagcacgctggttctgagggcctgggatgataagaccrtgcattggaggacgaggactctgcgactttcccgtgttctaataaattctgcacgttcagattgtccttctaggaattaaccaaaacttgcctttaaagagaaaaatgatgcatgtctataaattttccgtctgggattagtgtggtccttactgctacttatttccttctgttaaataattggtcaaatattttcaacatgggggtggaaagggggtattgaaatagctgtcttgtttctaactaacttggaagagatgtaattggttcagacctctttagggccgctcaggatacttcaccaagaacagaggttggaattctttccgtttttcaaagacacaccctccttttgctttgagaaagctgcttaaagttgtcctttttgactattactccaaaagaatatttaagttccttgcatgttttaaaaatgtgacttcaattgtctgccttccaaaatgtttccaacttttttatgtagacccctggccagatggaaatgacatcattgtatataacttttagcaaagttaaaaggaaaaaaatatgtacstcaatattcacatgaagaaaattccataattttgggaaaaggagaaatgcaaatgtaacgttttccttcaattatttkyagccggttgttatgacaatggaaaacactatcagataaatcaacagtgggagcggacctacctaggcaatgcgttggtttgtacttgttatggaggaagccgaggttttaactgcgagagtaaacctgaaggtaagtgacaacaagccccatagttagtatcttttaatacatgaagtggtaattgttaaactttgcattagtaagtaaaaatacatacaccatttttctaatagaattacctgtcatttcctcttaagtttaaaaackgcttatatttgcttttcacatgcttttacctttaaaacaaagaaacgaatctttcccaaattagttcctagagtcttctttttgctttactctcccaaagtttttgatgagaaaaatgaaagattttgtgtgtcctccgacaaaaaaaattgcttataaaattttaatttattagaaagcagtctcaaatcttaaactgttagtttatgagccagaaaacactttggggacttacatcgtaaaatgatttgtcagcggcagttaacacaaaaccattagccacttcaaagttctcattcctttaggaccaatgatatttttctcataaattatagcaactctgtcagagaagcactgatcaggggaaaatggaaatcataggattaacaactgtcaaggccttgtgggaggtggggatcttcgaattgtttgtttgtttttgttttgttttgtttttgagacagagtcttgctctgtcaccaggctggagtgcagtagcrctatctcagctcactgcaacctctgcctccagggttcaagcaattctcctgcctcagcctcctgagtagctgggactacaggcacatgccaccacacccagctaattttcatatttttagtagagacggggtttcaccgtattggtcagggtggtctcgaattcctgacctcaggtgatccacccgcctcagcctcccaaagtgctgggattacaggcgtgagccactgtgcccggccaatcgtttgctttttatgtgaaccttgctttgactttctgagtcagagattggaatgtgaaacccttcacaaatctagctctgtcataagttagtactttatatggccttttcctaagagcctgagatttttctacaatatgaataatttacagaaaatttgacaatatgtcaaggtcaaaaaccatggccttattagagcttaggataaaaatctgtatctctcacttcattttattctttgaggtgtaccatgttacttgtggaatagagaagtgggttttcctttagaggggattagtgaactagaaaarcttgtacctaagtgaggctcacatggactttccttttcccctcagctgaagagacttgctttgacaagtacactgggaacacttaccgagtgggtgacacttatgagcgtcctaaagactccatgatctgggactgtacctgcatyggggctgggcgagggagaataagctgtaccatcgcaagtaaggaagagattgtgtaaaatgatgccaaaatatcaaatatgaatttctctgttaccatcactgtcattttctgttatccatgactggatattccgaactttgaggtttgcccctggtgaccaggtactcttaagtggtcacccaactggttcctgtgtttcttaaagacgggtatgagcacagatggaatcagtgtttgatgtgtgtgcgtttatgagtgtgtgtgcatttatgagtgtgtgtgtttstgtacatagtagaaccaagagacctcttgggttccatttcagtaagacatgcttaggggagttgcccattttaaatcacctggatatcttcaagctagacaaatcatgagacttttctgcagtgactgggaaggtgttcrtgaagagtgaaccagccatgtgttgtctggtcttcatgtttgcaatgcagagacctcttgcacctcacagaaacagtctggtttcttggtgaccagtaggttatacccaggaagcagatgtcactattcctagggataatacaaaattattaacccaatagagtttgctaaggaactttgggaaccgggctgattctcaactctagtttagctaaggcactctttccagtatgattcactgggttaccaatagattctattaagatagtatttaagttttttaatccattctttaaatataagtcgtcttaaagacttctattcaaaagaacaagtcccgtgtgaataggcccaatcaactttccccatatttcatgttagggtttatccaagttcacaggcaaatcgcaagaggcaagggtccrtagtgtttacaatctagttcagcatttgaatgtgccattgggcttaacaacttagaaaactaccaggatttccacactttatatgcatatgtctgtttgctttccaccaaaatgacatttctatcctagggtaaaatacaggctctccatgctcccaaaagctggagtgctgtgcctgatgtggccttttcactgaattagtctcagtcttagcctgctgtgtatgagtgaagaccaagcctcccagcctttcttttctgcttaggacccaatttcctgtgatctctctgggaaagcaggattcatgacctcttccttgccatccagatttctctgtggttttccattgtgttctaagcaagacacttaaytgaattgactccaagtgaccagacctgttaacgtttcccctgtctctgatgggaaagctgttgtctgtgtctctactttagccaacctaagtacctaccatgggtggaatatgagaccaaaaaaaaaaatctgttctgccctctcctaacattttcgttgtatcttcaacagaccgctgccatgaagggggtcagtcctacaagattggtgacacctggaggagaccacatgagactggtggttacatgttagagtgtgtgtgtcttggtaatggaaaaggagaatggacctgcaagcccataggtgtgtgagtcttagggctgagcaagagctgggatgcttagttctaatgtggggttggaccagaatcacatctacataggtcatagacctgaattccagtgaaaaccaataaagaaatgggaattttgtttgaaataatgaattattatataatccatagtcttcttacaggagttagatcaaaaagtactgactacacatagaagtcttaactttgcttcaaaagcataaggtagaattgaaagatttagaatggagtcatttcttttacctaatagctgatctcagattcctccttsgtcaagatataatttatttaaaagaaaaaaaaatgacactttggacacatttctatatggaatgtcctggaccgaaacatgaaatagtgtgtgcttgtcacactctgctcatttcttttcaaattaaaagttgttgagcttctttggatctcaatcctcagttgaattttgtaagtacaagcctgaaagtttctggctataaattttactctgtttacttgtcttctaatttagaggtttttgtcttgttttgtattgttttgctttccaatatttaaaaatagctttctttgtcattgtatttaggccactcaaaattcataattggtcatttataattaagattggaattttgcatatgtagtctcccacagactagatacatacatagatccttgctactggaaatgctgctgggaagtttggggctcgctgaaaatatgtagtccatgtacttattaggagaatggaatttctgcctgccaactcagcttgagctttcttttgccttggctacttactgtgtgcttagatgctgggtgtgtcattctttctgaacagagtgccacttaaaaaaaatgtggctgaatttttgcttacacactacactttaaattacagggagcttgcayaattcaaaataacctttttttcctgtttttcttccaaatttccctacagctgagaagtgttttgatcatgctgctgggacttcctatgtggtcggagaaacgtgggagaagccctaccaaggctggatgatggtagattgtacttgcctgggagaaggcagcggacgcatcacttgcacttctagaagtatgttttacatctttatgttaaagattaagccaggtattgttttctggattcctagagagaagggtaatactatgttactcagaacacatccagtataycagcatgctttggtaacttctggawgtcaagaaaactttcataaccaacttattcygcatcttcagagaagactacataaatagaaaaacatatcactttgataaggttcaatctcagctcactgccactgacatagagttgaammaaaggtttaggtttccttctatgtttgaaatttaaatagggcacattcacaggctaaattgataaaattaaaaagaatttatcccataaattaaaatgatttatctactctggagttagggatagtgtctctgacctaacgcatttgattagtgctgtaaagaagctggcctctggygtctttactgctccttctaagattgtcttggggtcttaattgttgcctttgggtttsaaggctccttttttgatattgtaaactaataacagctagagagtttgttgaagtaaaacagccattaactactggtgttgtaaataagtttaaaatcaaatccaaataatttgaacctgttttatttatctagctgaacccatttaactacctttaacatagccatcatccaaattcaaattctttgctaacaaaaataggtctctcatgaaaagtggtaaccattttgaccaaagctttcccagaaacttgctggtttattagatattttgcatttaaaatgttactgtgatyatcagacttccaagatctttgtggcaatattttagcttaagacaaattagatgtctgattcaaaccttatctgttatttagaactctttaaatagcaagttgggaaaagtttctcaaagagaagtcatttattccagaaaattttataaggacttactttgttcaaggtattataggggtgcagatatgaaatgaacattagcccagccttcaaagagtacttagggggtcagggagatgagaaagtcttatacatatttatcatctgcaaaacacagtattaaagatttcaacagaaatactgaaagtagtgctatggaggttcaggggatgataatacttttygctggggatttgggaaaaagctctaatcagtaattataccttcatgcaaacttctattcttgtggtagatggatgtgggtgtgtatttgtttgaacctacatcaactattaattttttttctctaacccaggagttgcaacaatatccaattcacaaagacatcagatcctctatactcacatcgtggcayagarcaaatttggattataatttaaataatctatttaccagataaatgcacgcatagactaatggtcatttagttacaaattatcattttatgttgatcccactcttccaktggagggctaacactgaataatttggggctattttgctagtgatttttaaatactgtagatgtttgggtataggggaagggaaaataatattttagtcaaagaaattgtgcatcctctacattttttacataacaaatgaagaaagagatactaccaccttcttatagcttctttgtagccattggtgaagaccctttgatacctgcttgcctccccattgttataagcttttttttgtttgcttgttttttttgttttgttttgttttgttttgtttttgagacagtctcaccctgtcgcccaggctggagtgcaatggtgtgatctcagctcattgcaacctccacctcccgggttcaagcgattctcttgcctcagcttcccgagtagcttggattacaggcgcccgccaccacagccggctaattttttttggtatttttagtagagacgggggtttcaccatgttgcccaggctggtcttgaactcctgactgcaggtgatccaccctcctaaagtactaggattacaggcgtgagccaccgcgcttagcctgtttttagttttctaaagcaaggtccctattgaaaggcaggccataaacagtgatgactaagaaaaatcctggaagagcctgagaaggaaaaagatgaaatataatgccagagaatgaagttagtcaaaggaacagtgtgaaaacaataaataaatagataaatgaaaatgttatttgacagagagatgaaactagactaaaccattcagctgcctttccactgtaacaaatgtaatttcatctttcagaagtgtaataccttgcagcaccagagctgaatatgaacatattaccaaaaatagattaccaggcatagatagcattccttttttaagtttgaattgaccacttgcgactctcgacctgatgtatgtatgtgcttcctttgtgacacagatagatgcaacgatcaggacacaaggacatcctatagaattggagacacctggagcaagaaggataatcgaggaaacctgctccagtgcatctgcacaggcaacggccgaggagagtggaagtgtgagaggcacacctctgtgcagaccacatcgagcggtgaggcacaggacgagcaggggcgggaaatggggaagcaggtcaagaaatatttccgcaaatccatctttcctttgacatgccatttgaggataatttgcagtgtttcagctaataacctaagataatttacacattattggttgttaaaactttttttaatgtcaagttttaaatttttcagaaaaaaagaaaaatgacatacaaataaaccttagggggaaaaaagccagatttatctccaaaagataaaactgagttttaaagaatgctagcatcataaaacttaccatggatagatcacgcacacacgcacacacacacgtattttgaatatccaaagttcatttgaaaggaaatgagagttataattaattatatgactacctggttcttctgctaggaaaggacaaaaaaagtgcatttggattttttgtttgtttgtttttgaatgaaatatacttccctgtcccgacattgaactctttttgtagtggaaaccatcctttatatgtggtttctatgctctggcaaactttgttacattctataaagtaacacacaattatttycttcatgtattggcattcgaaattttagaaattcagagaggacttagagatggccatgaaagacatgatatctaagcattctttttaaaaaacaagttttaatcatttttggcatgagaaaaagatttttacgtcataaatgtttcataaaaatctgaagagagaaatatggccaacaaggacgtgcactcctctcattatttttaatatgttttgattaactttttactatatgatgtgccaacatcattacgtagtgtctcagccatccttcaattaaaaatattaattgttctaatttttcttcttttgatgagtttttgtcttgctttgagcacttatgaaggtgaacaagattagatttgataatatctttgagttattttattatcattaataaaattgctactggccaaaaaaaattataaacatcggccacgcgcggtggctcacgcctgtaatcccagcactttgggaggccgaggcaggcggatcacgaggtcaggagatcaagaccatcctggctaacacggtgaaaccccatctctactaaaaatacaaaaaattaaccaggcgttgtggcgggcgcctgtagtcccagctactcgggaggctgaggcaggagaatggcatgaacccgggaggtggagtttgcagtgacccgagatcgcaccactgcactccagcctgggtgatacagcgagaccccatctcaaaaaaataaaataaaataaaaaataaaaaaaattataaatgtcagtctaccaaaatagattaaaagtgtaggtgggaattaaatggggataaacactcaataaatgttagctatatatgaatattgccaatactgaaaagattccattgttcaaaaaagtttgagaagcaatgggttaaacaaaatggaacctgctctgcagaatctgtgtgttcctttacatcatactctccatggtagagtgtaggggatgggcgccatgtctccctagtacgtttgaccttgggattctttgtctgtgaacatctttgggttctagtgttcagcagcacttagggaggcactgaattcagtgtacctttggtctagcctcagccctgattctgttctgcggtgggccctggccttcaagagaacagatatctaaaagttgaaagaaaagatcggccgggcgcggtggctcacgcctgtaatcccagcactttgggaggccaaggcgggtggatcacaaggtcaggagatcgagaccatcctggctaacacggtgaaaccccgtctctactaaaaatacaaaaaattagccgggcgtggtggcgggtgcctgtagtcccagctactcgggaggctgaggcaggagaatggcgtgaacccgggaggcagagcttgcagtgagccgagattgcgccactgcactccagcctgggtgacagagtgagactccgtctcaaaaaaaaaaaaaaaaaaaaaaagaaaaaagaaaagatcaacacatcctgttgtgttattctgaaaggaaagctgtcttaagaggatcaattggttttagaaaaaacacaatagaatcacaaataatccagaggagaaataaaatgtggaaggtggaggtgacctccagaaaatccaggacagctgctgaaggcaccctctgatgagctcggttactcagaagagtgaggatgtgttgaaggtatctgctgtatggagtggcaggatgatgtctgtgattgagaaatataatcccggccaggcgaggtggctcatgcctgtaatcccagcactttgggaggccgaagcgggtggatcccctgaggtcaggagtttgagacaggagtttgaggtcaggagtttgccaacatggcaaaaccccgtctctactaaaaaatacaaaaaaaatcagctgggcatggtggtgcgtgcctgtaattgcagctacttgggaggttgaggcaggagaatagcttgaacccaggaggcagaggttgcagtgagccragaccgcgccactgcactccagcctgggcaacagagtgagaccccatctcaaaaacaacccaaaaaaccaaaaaacaaacaaacaaaaagaaatataatcccagtagccccagctgagctggaggatggagaccacttggtagacacttgtggattatttcctaggctaaatgcaaaagctactgctgaataagggwcatttttttccagtcccaggccagtagcgacatagatttcagagtgatctctgtgagatcctgaagatcctgactgcagaaagtagtgaattgtcttctctcacccagttttgtgacattcccttttcatgccattaggatctggccccttcaccgatgttcgtgcagctgtttaccaaccgcagcctcacccccagcctcctccctatggccactgtgtcacagacagtggtgtggtctactctgtggggatgcagtggctgaagacacaaggaaataagcaaatgctttgcacgtgcctgggcaacggagtcagctgccaagagacaggtatgcattatctttttgaagaataggactgatgactttattatttagtttttgaaggacaatacattttcaatgtgaaacaataaaacaaacaagaagcctgtaatcttaccaccctgtgataacaattagggttggcatttgaaatagtttcttccaatctttttaatttatgtattttctttctggtcatggatatcatgggtaaaaattttattgtatttatctgtctaaagtgttgttacaagagagctactttctgaataatcatcaatgttttatattctaaatctcaaatttcagcagctttgtgatgtaaacatcttccaataacctaatatatgtattctgcactacaaacatggtagtcactatggcaataacaattgctacacaattctcccccagaatagtctcatatattaattttatggcatagatatagtcataaatattatcccaacatccttaagyagcatccttaattgacctgtataaatatagctttacaaatagagaaactgaggcatggcagcagaagtggtcatgaaggacatcagcagaagaactcaggtgtcgttctatccacagtagacatggattcctgagtaatgcattttgactgaaattaacgagatgatcatctatactcatagcttcttcctttgagggcacaagctcagtatctcattgaagccataaataagcagctgctggtgggagataaagcatctctgtttactgacactcttttgattatgattgtagctgtaacccagacttacggtggcaactcaaatggagagccatgtgtcttaccattcacctacaatggcaggacgttctactcctgcaccacagaagggcgacaggacggacatctttggtgcagcacaacttcgaattatgagcaggaccagaaatactctttctgcacagaccacactggtgagtgtcccaagggggagccacagaagtgagaaaaactcactttcatgccctagttttatttgccagcattytagccatttattttgaacccgcccaagaagcatcgcttttgttcagtttggactcaagagatcgcagcgctcacgtaacagctgaggattcttccatcttccccagtactgttgggaaatgacaccaagggagtagccttccagttcatttgatttaacacattgggattatgatgtgattaaagatacttgtattttggaatcagtagatgatcccacagggctgaggaatacaaaggatgaatgttttagtgccttagcttattttccagttaaaacaatgttttattcaaagctatcatttaatcttttgtggggggggtgctggggaaatgacagtgaaagtgggatttaaacctgttttgaaggtgtgaaggtaaatatgctaagaagcttagaactatattatcagacattttttattctgagatagactgtctgtgaatgagctgcagaaacctggctctctcagaccagtaattctgtgtacattggaaagctcagcggtaatcttttccttctttgttgtgtattgttcctggcagttttggttcagactcgaggaggaaattccaatggtgccttgtgccacttccccttcctatacaacaaccacaattacactgattgcacttctgagggcagaagagacaacatgaagtggtgtgggaccacacagaactatgatgccgaccagaagtttgggttctgccccatggctggtaagatgaagcccttgtgggttgtcttgtttgacaacaatttagggagtagagactaaagactagtgtccagtttactcccatttcattcattaacacaattttgagacaacagaaaacttcatgtgaagtgtgtttgtgtgtgtgtgtgtgtgtgtgtgtgtgtgtgatgttacatcatatacataaggattgggaagaataattagataattatttatataatttttaaacctcattgacatgatttaatgtcaaaaatataattacttatttgtaagtctggaaatatgaatttgcacaggtttgtctttgtaaagagcacacaactgagtagcttacaacatttaatatatgtatgacggctttagtcacagagctacaatattgacacatggttgtggtttgatgggcataagctctatcacttattaataagtgccaaagtgactaaaactcaatgttttctaacaggtagggaatctcactctttttttaaaggtccccagtttgtatagatggcgaacaaatggaaacgaataccttttacttgttttcagatttcaagaaccccatagattccctttaattttccagttgtagaaacaagagcctgggcggtaggcactgtcaagtgtgactatgagacaaagaaattgcttatacttttatttctttcaacaaaagaagatgctgagtttagaagaaaaaacccacttttgcttgtaattctatatccaaacccatagtttttatttgatccagaataaactggaactgggaaaagttatgaagcygtagttaaatccaggcttctagaacagcaagaaccctttgtgtggatgtgtagatattatcttagtttaacatcccctaacccttcctgtaactattttctatgacacgtttggactacgttttctgcctccagggctcaaaaattctaccccttcacctgacagcacttagatgtctytgaygcacacaaagcttcttcccaagtgagaattcttaggatgaccaaactgaactgatccttttgcacacatacatgtttagacctggtgatcatttatcaagtgcatttcttatccatttccaaacagcccacgaggaaatctgcacaaccaatgaaggggtcatgtaccgcattggagatcagtgggataagcagcatgacatgggtcacatgatgaggtgcacgtgtgttgggaatggtcgtggggaatggacatgcattgcctactcgcagcttcgaggtatgctggctgattaacaaaaatatttgagatggcaaaaggtacagaaagggacacttttttttatgaaaacttgcactatgccaaaagcaggggaagaaatatggaatgccacgtcattcattagtctactgtgcatggtaagataagcctgaaaggcttagcaggcagcctgctaagacaagcggcatagcaatgctaatgttctgaaacactcctagcatgtaagtacttaggctgagccaaaaagatggcttcaaaagtaagaatgaaacatttgatccattcagctttaggctatgccactggattcatgtctagaaaagataggataatttctgtaaagaaatgaagaccttgctattctaaaatcagatccttacagatccagatttcaggaaacaaatacataggggactaactttccttgttcagattagtttttctcctttgcacccagctatataatatgaggaagtattgactttttaaaagtgttttagttttccatttctttgatatgaaaagtaatatttcgggagaaccctgagctattaataatctatgtggctagtgcgtagatattggtctgaatttgttctccttttgtggtgtccagtgggtaacaccatccgggagtaataattacatgtggtgttgcagaactgaaagagaccttaataacacatagagacctcactctatatagatcaaggagctgagacccaaaaaggaaaaagtaattttctcaggatctctcaaagagtgagcaacagagttggcctaatttattttagcgttgtgaatactgttgacattttatttcccaaatctaagtatctcctccccttccccctattccagagaccagaccaccacatcatgctgggtgttagataaatatgtttaatcttcttcttatttatcctaacaagcagatatttaaaggaaattatcaactaagcaagaaattttcagaaagtaagacatgtatttgttcaaatactggcttctcacaggaaagtgtattttaccacattctttacttgagcatactgtaacctctgcaaaagttacacattttrggaagaaaaaaatttttttggcaaaaattgtattactgaccaaactttgaaaaaaatgttattctatgcttgtagaaaagttattttagtggaaggtgttgataattaagtggaagtagttgtatgctttgagaagcataccttttttctttcatcaatggaactttaaaaagtttctcactcacccacctgtttcctraacagatcagtgcattgttgatgacatcacttacaatgtgaacgacacattccacaagcgtcatgaagaggggcacatgctgaactgtacatgcttcggtcagggtcggggcaggtggaagtgtgatcccgtcggtgagtagccctatttccctagatgagtttgcacagggggaatggttagcaagtttcagataagaaaagctatgtgaaatcacatgactgaagttggctccagactttgatcagttgcttgcaaagaactttgcaaagtcttctctctaatactggaccaaaatatctcgatattggtagtcgtctggtttttgctgaatttggtgacaaatttaggcttattttaattgaatggaatttattcttgggtttagaatcataaagataatccatgctattaaaagtattctttccttttttttttgtttgtttttgtttttgtttttttgagagagagtttcgctcttgttgyccaggctggagtgtatggcacaatctcggctcactgcaacctctgcttcctgggttcaagcaattctgctgcctcagcctcctgagtagctgggattacaggcatgcgccaccaggcccagctaattttgtatctttagtagagatggggtttctccatgtgggtcaggctggtctcaaactcacttccttaccagctgtgtaacagcatgagcaaagggtgtaaatatcacccaccaaaacactctaggtttttttttggccgcccttcaaaatagaactaagcaaatagtgaaggctgagccttaaaagagctgtgttaccagcactacaaagtttaaggtgatccattactatttctttaccaaaagagacaggttgctcactgagaaaacaaactgataacatccgtttgtttgacgtgagattaccagaactgagagagaagcctgagaggttttcttagaagctgctcagcaggtatactcgtaaagtctagttcattcatttaaatgtcaaacagtttctttaaattttgaagaagtaaggaaaatgaaattattgcagatttttttcttgctatttaaatgttaagccagttatattaatatgggtaaaaataataactaatatttaaaattaatgtgtagattatcaatatacactgaaatctaaatctttacatttttatttagaaatattaccttttagaaaactaaatattcctcctaataggtactttggttttttttttactacaaactgtcctgtaaggtaaagaatgtgaacaaaatatttttttaactgcatatatttgtaagaacaattgcaaatttctatttaagctaaatgtatgctctagcaccctgaaattaaattcgtagttataagtcttcaaggctgtttatcttttccttccatgtattttagaccaatgccaggattcagagactgggacgttttatcaaattggagattcatgggagaagtatgtgcatggtgtcagataccagtgctactgctatggccgtggcattggggagtggcattgccaacctttacagacctatccaagtaagtwgctctattactgcaagttgagaactgccarttgggttataacaacagggcagtgattattaatgctctcatgcctaagttgggggtctcccctctttcccacccttttctcttgttattatctaataatcaattgaatttttgattaaaataatttttctctcttcctctatcaagtaaaaggtagagaaggctatgaaaatgtgcctgtttataattttacttcttaactctgtaaaatattctgttaggttaagacactctggctaatttcatcttatatccatacatggaaataaaaaccaccaagtgagttatgctgggagtaaaggtttggggctttatattatgattcttaacagagaagctgcatagagagatggcatgaaatgcagcataakgtacgtgttcattcaacatgtcatctaagctccctttgcatcaaacttttcatttgtttgatcagttgccaccaggaacacagtatgttgggccaagggttgagtaacttggtcaactctctgcccacacagttcaaacactctcaaatgtttattgctgggtttttccaggtcacaaagacatcatgcctagctgtaggtgtaattagttcatttggggggaaaattgcatttaaatattcactgagtgattataataaaacatgttaataaaacatgaaaggctaattaaaaggcatcagttatttgagcaactgctgaggtgcaaagtctccaaagtcttcactaacgtttgactgaaaatatggcctacattcagaaacaaaagagtttcagggtgtcagaatctgcatgcgacagaaattaagattaactctgtgataaaagattcrctgtgacagagaacaagctatgggaacaacttggccaaaggtagtgttagccaagcctcattcctccatttcctcatctgtaatatgggaagattgtagctgattacctttartgttccatcctaaatactraacacccagatgcaccttttctaggaacttggaagattctgcttttcccaaccctcagacactgtcagtgctggggaaggtgacttcacttttgaaggcttatagcacagattgaccaacctcctaaattgtatttcttggaggatttaggtgtaggaatcacttaattttttgtaacttaatatatatttaaatctgattgtggaagtactataagtatatgaatggtttgtttgtttatatgatgcaaatgatacttaaatggtagaaacttctaaaaaaatgctctgtggtttctatatttatgattgttattggtgttgcaatttgctgaaaatgatttccttctgaatgattgagagagatcttcgtctctctcaacataaggctgtccacatagctgcttgctggaagcatttaggtggacatgttggagataaaatctggaaaggaaggaatccttgagtattggagtattacatgttgaccttaytcctactctttaaaaaggagaacagcaagatcccactgagcatagaggtgatttcggagggaagagattggaatttgacctcagatatgctctttggtgcttatctgtatgtctggtttgctccgtggcctagcacgtagggctttaagagtgtggtgagaataagggaacagcagattaccaacagattgtctctgagtcctgccttgtttgttcctcctacagagaacttggtagagttgttcaaactagcaaaagataagaggcatttggtttgtcaataagcaactagaaaagcacagatctcagcaaaataaatagagaaaaaaaggactgagtcaaaaaatcataaatgtttaacttctccaaggacactactattggaaattattcatttagactttatttgaaactaattttaaaagtgtagacattgtactatctcctttttttggtatcatctyaactattttattgttagtttattcatattgaataagagagggagtaaagatttcacaatggcgatagctagtatatgccaattaagttaatttaaaaagttataccaactaccagtagcgaaaaaggactgtcaaaagtttaaatctaaataatgtaaaagatgtcataatttttaacttttctgtctttaaaggatacatagtataagctagagtaattatacgtagtataagctagaatataggaatttaattgatctaagaaataactgacacaaagtctctttacttcctgaacaaaaacatgctaaattccattgctgttcagtccatttcctttaaaggtgggctatgccacagggctagattttaaaacgtggaatttcasaccagtgctcsaaatcttatgaaagcaaaagggacctctgtagttgtactccactttggcttgagtaaaaaccactgctgtaccctttttctttcctttccctgcccatttttatcctcctccttgtgtccttgtggacatagaaatatgattaggcttagaggtgaacagtaaaggtcatttatgttatcttttcaaaacttaatagacatttawccatcataagcttgtcccccctcaaaatcatgattgacaagactaaataaaatgtatatcaggtgtctctttatggaggaaattgtagtaggatttatttaaaggatcaatatttaaatagccctatgccaattatcataaataattaaggacatgatattcctagctttcctgatttacatggaagtacgttaaatagtcacatctccaaaatttttcttgaatagttgtctttaaaaatgtgtttacatttgtaaggatcttcataaacagaaggggtaattcaaagatrggcatggaattgacttatgccaattgattaaaacaaacatcctgtgtgttctgtgaaatacatacaactttaaaatgaaaaactcataattttatgcatgaattttggtgttcatgtggcttggaaatatgtgcattaaatggaattaagattcaaagtatttgctaatcttcaaccaactttgaattgttactggtgtggaagtgagcatattgttttagaatttctgaatctacatggatatccaagttatatattttttctgctacagaaagctttgttttccaagagaatttaatggcttagataataaagtttgaaaatcaatgtattttttttcctagaagctttcagaaaacttaaatctgttaataatctggtgaagtgctttattacacatrcaaaattttgctctgtttgacagagtgtcagttagaaattcttgaaaaggttactataagacacaatttttatttctagtaatttaaacattgactgacatcataaagatagtgttttaagaaaagatagttttctgttctgcaagcrtaaattttctagctatttcattattatcttaaatggagttaacactacttwgaaatkgatgctacttcccttattttccttttattttaaacaaaagaaccaaaaccatactttaaattttgttgataacagtgatatacatcaaggtgtagaaatactgaatttagtatacacttcataaagtcatttctgttgacaactgattttggaaaaaaaataaatttaatcacttaataatttgatggatcaatggtgtgatttgggagtaaacttcttgaataaaaataaaacttgatgttttttccaaactgatagactgcttagactgatgagaaataaaactaggtctttaattattacctttgctatttgtctaagattctacccccatttagaaatgtgtttgttttacatcatctcatatggcctttggaatgttgtttccttcttaggtagtagattcattcttgatgaaaaccttccaaaattagaatttgctttaaaagaggctcaatacaataagtaaatgaagtctgtgttctgtattacattatttttgtaggatcgtttcacaattttctcacaattcttactttgatagtagagaaaataaaagcaagccaagagacttttttttaaaaatatattttatttgctataaacaactatgatttgcatttctcatgtgaagaataataattatcggctaaaaatggatttgctgcattgattttcaacgtaaatatttaaaagattaatgccagataattttattatactcacatttaacgacaagcaaagctgtttataatgatgactgtccatgtacacagttttaagttgaagtgagtgaatattcaagataattaaatgctacattttcattttcaggctcaagtggtcctgtcgaagtatttatcactgagactccgagtcagcccaactcccaccccatccagtggaatgcaccacagccatctcacatttccaagtacattctcaggtggagacctgtgagtatcccacccagaaaccttggatactgagtctcctaatcttatcaattctgatggtttctttttttcccagcttttgagccaacaactctgattaactattcctatagcatttactatatttgtttagtgaacaaacaatatgtggtcaattaaattgacttgtagactgaggggattttggttttggttttgggttttgtttttttgcggtgggggggctggtatttggaagaatttagctctttatgttacagaaatcttttttgcaaggacttagaaatgataatgcttaagattgttcttgcccaatgtgggaagagaatctaaggtttttatatgtcttgcaacctcatcaaaggaaaattactggcatcattttcataatttgaaaaaaaaagccaaattaatatatttcttttttgattcactttttaagtgatcatttttaaaactttacttttgacccactgwatttatttagatagaaggaaaagagatgatgggagggaagtttagataaaggatggaagttggttttatttaaacaatagccctgtgatttcctaatgagaagtgactagaaattgaagaaaccaaataaggaggatattggtcaatttagctttagtttctcttactctctcaagcctgccctgtttaactccaaagttcatggctcataatttgagaaacactgttttaaacacaggagaaaaaaatgtccattttaaatcatagctattgaattctacaattacaaagaaacaaacaaacaaaatttgaccaacccaggcggttaaatttaaactcttcaggaaaaatttaagctgttaaaattattctttttctaaatttctaaagtggagggacagaatttttcagatttaaaagggcctcctaggtgcccagaaaattagtggaaagaaccacgtctagacgcatctttgatgtgtcagagttccaaggataaaaagaaacttttaaagtcttctatactcagccaggttatcaatcaaatatgagggcaaaataatattttcagacagattttaggcagtktatcttccatatatccttttctttaagggtatttgtagatacactccagaaaaacaagagtgaaatatgaaggaagttgtggggtccagcaaacagtgcttccaaatcagacccctgatagaggtggaaaactttgcaatgcaacaactgcgtagctggcttagaggacagccaatacagatggaacagaaagatgaggatgggattgagggatcagggattgaggtctccaagaataaaaagggacttcatggaaaaagtaggcttgtggataattaatcacaggggcaaataatgcagttaaaataacaacatgacaatcaggtggaggaatgtataataaacccaaatgtggctgggtagagtggctcacacctgtaatcccagcactttgggaggccaagccgggcagattacctgaggtcaggagttcgagaccagcttggccaacatggcgaaaccccgtctctactaaaaatacaaaaattagccaggcttgggggcgcacgcctgtagtcccagctcctcaggagctgaggtaggagaatcacttgaacccaggaggcaaaggktgcagggagttgagccaagatcgcgccattgcaccctagcctgggcaacagagcgagattctgtttcaaaaaacccccaagtgtattataaggcaataattcctatacgaagcaaactaaaatgcagcaatattaaggtataaaaacaaagaggaataattccattgaaccttgattctggaaactttgatccacccagcagtcatgatgttagactcattgaaaagaatgtatttctaatgcatgatgcgatcggtctatagatgtgtcatggaaacttggttgcaacttcaagacaaaataaaaagtaaacatttacatgaaaaatggtggatatggaaggtggagaagagaggagataacagctttatctttcaaaatagagaattgagagatggtaccaaaagctgatgaagtaaaaaaaaaaaaaaaaaaaaaaagatacttaatataatactttaaattacaaatataaacacaagaagaacaaatataatgatacaaatgtcagacactgggaatgtccaagattctggaaggaaagggtggtattattgagctaaatcctcaactttgtctgggcacagtggctaaaaattagccgggcatggtagcatgcacctgtagtcccagctacttgggaggctgaggcggaaggatcgcttgagcttgagaggcggaagttgcagtgagccaagatggcactactgcactccagcctgggagacagagaaagaccctgtgtcaacataaataaatatataaataaatcatcaagtctcatattaaagasyctgtaaatatgactyattgttgacaaatgaaacaaatagaggtgtaagcatgttgtctacatggaggcaagaccagaataatagaaaatggaaacagattcccttaaagaggggaatcgtgtctttctcattggctcartgtagtctccgtagagtctagaatgcttcagcacctggcacactgcttaacaaatggtgaatgaaaaaaaaaaaagaaaagtcattctttttcttctttcaccctatgtycataatctggccatttgcagaacwtgatgtccagtgatcgaaatcaacagcatcagtgcatccaatatcttctagtctctcatcttcttattacatcattaattttatttactttaaaattaaggatatccaaagtattatgtgagaccattgcaatgggagacttaaaagtggtataaaatgtactttgggccaggcgcagtggctcacgcctgtaatcccagcactttgggaggccaaggtgggcggatcacgaggtcaagagatcgagagcatcctggccaacatggtgaaaccccgtctctattaaaaatacaaaaaaattagctgggcatggtggcgcatacctgtaatcccagctactcgggaagctgaggcaggagaatcgcttgaaaccagaaggcggaggttgcagtgagccaggatcacgccactgcactccagcctgggcaacaagagcgaaactccatctcaaaaaaaaaaaaaaaaagtacattgaattgraaagtcttcaaaaagcagcagtgatgaattttttgagatttttaacaattacaaaaattcagggttttttctaatggatgccacctgagactttattttctgttattttcttgtaataactaaccaaacaagctcatgttgaaaaatgattactaaatttgagctaattgcaatgactggtttcaaaattttccacagtgtatttgagttaaaatttcactgtgaagagtactacgatcactctcgcttattccaaaaatataaatggacacttgagtatttgaattattgaggaaatggttgactgggtaatttttaaaaatcactgggcataaaaaatatattttgacttatattagtttagagtatttacacttgaaagagtctcatcttttctgaagggtgtttctttcatacacattttattgcactgagttttgtgacccatggcatattaatgaagctgaacaggatgtgaaatataaactggaagcaaaagattaaataaaccaaaattgcattttttctgtagtcttgtccaaaattgggtaaccacttctgatggggtagctcatatccaagaatgagtcacaaaaccagacttgttgaacctggtatatgatgagtcacaaagcaacattctgcctttgttttttcaggacaagaaacttgaattgtatcccactgagttaaaagataaaatatatggcattggcatttctgtacttcagagaggaatatatctgtttgtggtaggaataaaaaataagtgagagaggcaaagcttaggttcatcatattatgttactgatataacacaattaacttggtaaaagtgaaggtgtgggtgggcgtggtggctcacgcttgtaatcccagcactttgggagtccgaggcgggtggatcacctgaggtcgggagttcgagaccagcctgaccaacatggagaaaccccatctctactaaaaatataaaattagccaggcatggtggcacacgcctctaatcccagctactcgggaggctgaggcaggagaagcgcttaaacctgggaggtggagtttgcagtgagctgagattgagccactgcactctagcctgrgcaacaagagcraaactctgtctcaaaaaaaaaaaaaaaaagtgaaggtgccyagtgtctgcaactatgtcaccccgggcatatcacatatcactctgtttttccgtctgtaaaacgggagcaacaatgccattgccttatcatcagaaggatatggagactaaatgggagaatgtaggtaaacagcacagagtatgggtatcagtaagtaaactgcagcagtttgttgatgttaacaatagttagcattatatctaactatatctaacgatataaccattgggaatccagttttccatgattttcctctagaatggagctgcctaagtcctgcttaagtcatttttctttgaagattactgaacatcatcttcaaatgttcatccttgtaaacacgtgtgtgtgtgtgtgtgtgttaatttaaattttcagaaaaattctgtaggccgttggaaggaagctaccataccaggccacttaaactcctacaccatcaaaggcctgaagcctggtgtggtatacgagggccagctcatcagcatccagcagtacggccaccaagaagtgactcgctttgacttcaccaccaccagcaccagcacacctgtgaccagtatgtacacaaccaccctcatgcctcctacccccgaggttcctagagctaggctctcctgaggcaatgctttccttctcaattcatattcttccaggaggggcaccaacgttttttaaaatgatgttggcgacgaggacggtaaattttctagatgactgaaggctgactttcccctttctgtgactctctaggcaacaccgtgacaggagagacgactcccttttctcctcttgtggccacttctgaatctgtgaccgaaatcacagccagtagctttgtggtctcctgggtctcagcttccgacaccgtgtcgggattccgggtggaatatgagctgagtgaggagggagatgagccacagtacctgggtaagctcaatatgtcgctcaagacaggttcagggcagctgctggaaaactctccttgtgggggtgggtggcctctaggcaggtggtatctgtggtttggaactggttgacagctcagactgaacaaaccaccctctggcatgaggaagggaaggactgactctttctaagaagtggccgggtttttcccaagccactgtcacatgttcctggtccctgatgccagctgcatcatgcgcctacctgtgcacaagttcctacagcaaaagctgtgttcttggtggaagtaattaccaggactgcagctgacaatgtgagcacagtacggtcactcatacttttcaaattgttatggtgaggggcctttaaaaaacttcattggcgcactgaagtgtgtgccatcgtaagcactgagttcagtgaatttgaattcttataaagtgaacacaccacaagaccagcacccagatcaagraaaagaatatctctctaccctcaccccatcatcttccgccaataatcactaccctgactcttactgcagagagctatttttaaaaatttggcattcgattacaaaaattatacgtctttagaaaaaaagttggaaaaatgaaaggaagaaggaggaggaggagaaaggagaaagacaagaagtggkgttttcccatagtacattaataatcacagattaggtgggtgcggtggctaactcctataatctcagcacttcgggaagctgaggctggtggatcacttgaggccaggagttcgagatcagcctggccaacatggtgaacctccatctctaataaaaatgcaaaaaaaatagcygggtgtggtggtgtgcacctgtaatcccagctactcgggaggccgaggcagaagaattgcttgaaccggaaaggtagaggatgcagtgagctgaaattgtgccactgcactccagcctgggcaacacagcaagactctgtgtaaaaataataataataatcactgattagctattagcacattaccttctagtcgcttttccctatgaatrtataattcttaaaatatccttcttataagctgtagagtcatttgagggactagtttgctctgattagttaccttttcttttcatttcaaagatcttccaagcacagccacttctgtgaacatccctgacctgcttcctggccgaaaatacattgtaaatgtctatcagatatctgaggatggggagcagagtttgatcctgtctacttcacaaacaacaggtacatgtgtgctacatagtgttaaaagaatctttttctgtaaaacacaggcctgtagtagcacttcctgactgttygccccactttctttctttcttagcgcctgatgccccwcctgacmcgactgtggaccaagttgatgacacctcaattgttgttcgctggagcagaccccaggctcccatcacaggtcagctaagcstccccctctttggctgctatgttaatsttaatgacatcagcagggagggcgcagattctgactgcggacctgcatatcactttaaatctccaatataatttatgggagaggggtttgtgtgtgtgtgtgtgtgtgtggtggcgggggtgggggagttattttctatggcacatttccccttgaaaccatttcaccaactcccttatacacacacaccacaacatacacacaacctgtaaagccagctcattggcttattaaagcaagtgttcccagggttgaagaggtgtaatttcctgaaaacgttgctctaagatttatccttaaggagaaagctgagctgtcgtcttagctcattaggtgattcaactgcctcatcactgaagttccaaaaagacacacacagtgctagacaactctgcttaggctggttcattaattgcttccctcgtctggagctcaaagaggaaaaatcagcttaacatgaatattttcacctaatggcatctctaattgacatttattaaggatgtcaggtcttcaaggatgacatttattattaaaaaggttcgcatgactgttcttattttatcttcgtgctgaatagtcattattagaagaagtggcaatattcaaagagtcaaaaagtatcactggctcttcactaatcaagcaagatgctaagggatattagaaaagggaggatttatggtgtttctaagcctctgtctcaaagaaaacagtgcatcttacttttgctcatgaatctgcagggtacagaatagtctattcgccatcagtagaaggtagcagcacagaactcaaccttcctgaaactgcaaactccgtcaccctcagtgacttgcaacctggtgttcagtataacatcactatctatgctgtggaagaaaatcaagaaagtacacctgttgtcattcaacaagaaaccactggcaccccacgctcaggtaacttttttaagaagacacttcctatgttatcttawcaggattgttcctgaaggagggttgttttgtctctgtcaacagtcctcwcattcaagaaatcttatatattagtttttccctaaacttctgatatttagctgaaatgtcataagtaacttatcaaagctggctactggcctttctgattaaaaactgacaccataacrtccatctacaaattttcccctagaagcttaagggtcatttcatttttgattcttaagtattataaaatgattcagtaaaacaaaaactgttacattattttctgcagttatttcaaaggctttttctaaaaaawtttttagtatcttttcttataaccctctccccccaccaccatatgacacttcatatgctggtaactcacttattacctattttagataaaaggttcaaatgtcataatttaagcactatgactggaccatgaaaatgtgatctgattaagagacaaaacttagcaaaactctcgaatgagaggctcaatgaactgcctaacatatccaagaaactggcttcttaaaagtaatcttcagcagagaatgtgaatgaccagttgactcttgtctgtcagatacagtgccctctcccagggacctgcagtttgtggaagtgacagacgtgaaggtcaccatcatgtggacaccgcctgagagtgcagtgaccggctaccgtgtggatgtgatccccgtcaacctgcctggcgagcacgggcagaggctgcccatcagcaggaacacctttgcagaagtcaccgggctgtcccctggggtcacctattacttcaaagtctttgcagtgagccatgggagggagagcaagcctctgactgctcaacagacaaccagtatgtcttctcctatctctatctcccctccaaattctccaccctcacttgcagcctgtgagaaagtgcagtaaaccattcactcagaggtgtatggcttasagagagggaaatacccagccggcaagggaatgcatagtgaacacaaagcacattaaacttgaaaacaaaactcagacaagctccatggatgctaagtggtaacccatttctaaaatacatgtaccagctgaagggtactaagaggggagaactgaagagaatctaatttgagtgcatttttcgtgtaactaaatatatctagatcaaagttaaaatgcaggatcataacacttagagtagaattcatttaacaatagcaattgtcaagtgtctagtattactagccaccagcttatctgctcagtttttacaagcattattctcatatttactctttgttttgaccttaggaaggaaggtcttattattattattttatttatttatttttttgagatggagtctcgctctgtcgccagggctggagtacagtggcaccatctcagctcactggaacctctaccacctgggttcaagcaattctcctgcctcagcctcccgagtagctgggactacaggcgtgtgccaccatgccctgctaatttttgtgtttttagtagaaatgggtttcgctgtgttggccaagctggtctgaaactcctgacctcaagtgatccacccactttggcctcccaaagtgctgggattacaggcgtgagccatcgtgcccagccggaaggtcttactagtatccktattgaatacttaaagaaactgaggctttaaaaaagttctgcaacttgtagggtcacagagataggaagggatagagctggctctataacctatgtccgaagcccatgctctcaattattatactcgactgcctcttaaagatttcctctatttgaaaggtaatttaaatttcggtgggaaaactgctggttattattctcaagaataaactccacaacttatgtgattctgatagtgcaaactcaccagtatcctaccatgaatctgaggatacgttatcattactgtaattactgtctaatctgaaccatgtgaaaataacttttatttctctagcaaagggctattcacagaatattgcttttgacccatagagagcttcttcttgytgtcattttaggaggcatatccctttttccttaatctgtttggctcagagctaactgtgaacttcagaagtgtttgttttgcctttttaaaaataccattgctttaatgtaactataatttctgagactgatgygaaagtcttgctggaaaattagacttcccaaaggatcacagtcaagcaaaatggttccacaatttctcatgactggcagagttttggcaaagttttgtgtagcactcaatctcttactggctcagtttttccagggttttgactttcacatagttacaaccttgaggagagaaaacttagacattcaatcaagtttcaggacttgagttatgatcattactgatctaaatatttcttggcatgtttcatcttttttcctagaactggatgctcccactaacctccagtttgtcaatgaaactgattctactgtcctggtgagatggactccacctcgggcccagataacaggataccgactgaccgtgggccttacccgaagaggmcagcccaggcagtacaatrtgggtccctctgtctccaagtacccmctgaggaatctgcagcctgcatctgagtacaccgtatccctcgtggccataaagggcaaccaagagagccccaaagccactggagtctttaccacacgtaagctgaaaattaartgccttttcttaactatatttacattctctattcttcatgctttaaaamaaaacaaaacammamaaaaaaaacattaaaaaattagtacataatttaaatcagtgatactaaaaatgtgctccatagactggctgctggcccgttaattgtttgctgctagtctgcaacaagaaaaacggttgtgccagaacrtaaatcacaaagcacactgcttagtacagctgagaatttttctgaagccagattttcttgatgaaggaagcagtgtgttaatttgcacacattgccaagctcgctctttcctctagggccagcactttgagtaacatgggtttaaagcagtctgttattagaaaaattaaattcgattacattaaatgaatttaccaaacactagttaacgcaagaaaaaattagcacctatgtctacattctattactttgggcattgaatagtaactataaatgcagaataaaaatatctatggattgaatgggaaccaactaattgaacatgaagccaaggaaatgatttctttatgagtgttggctgcagaagattaaagtacttttgcagacggaatcgctcttttcttaaattactcttgaaattcctcagaggagaaaaatactaacaataatttttggtyatgtctatccttttgctcaacattttaaaggaagtggtcttaaatctccyacatatctacatcacaataacaacctctattcacaaacygattcctattaaatacatttccatttacattacagagaattatgagactccttatttctagctgaacatcatttgttattttcaactcgacattttgaattatagaagcacctaacataagtactttttcagcatatattctaaccatggactagtttgcaattttctaagagctttcaacaaatgttactcttcgactaatttaaaagtatggatgttaaaaagcattcaaaaagtccatacaagcctagtttgtaaataactatggaattgatttcccaaagaaaatacaaacttttccccataagaattcatactttaagaaaaacttacttccatttaaatttactgtatgaagtttggctcatgaaggctttttcctaaataatagttaatcgtaagcaagtaaaattcacttttaatttgcaaataagcttacttgaaaatttggctaaaattttacacggttctaagatagtctaagatctactctcatgaaattaatgtctttatatttcttgtaaatattcatttcttataaatgtccttcagtgaattagaatggagatttcagtgaatgcgccctttcagtagatgtcgtcttttactaaaatgtagaattctatagttgtcttgttcattccttaacatgagacatattttatgtagtttcttttgttgaacacagtgcttataaaagaaaaagcatttttaatgatgctaacaataattaagggaaggtggtgggccaagatatttcaagtacttctgaagactgatatattggatatattattttatgctttgcataatacattcatataaaatataatgattttaactgaagtactgatagccaaaactaattttattagataaaggttaacatagtgtctggaacattgtatgctttcaaaaactatttggtgaatagataattgagaaaggaataataataaaaacagctaaatgaagcttatatttaaataaactaatgtaagcagggtattctacaactccatttgaactttaagcactccctaaggctgtaaacatccacaaggcttgcatgtttttgaaattactaaatttctgtagttttttactatcttactaagctgaattctgggagtaacttttctgagttttataacttgtgctaaattcttaagagcaaatgtgagaaaagttaggggaaaaagctgtttctggggaaaattcagcttagtcttatattgatagggcaaattttatttctttaacagctgggctgttcttccctaacaagacctgccagaacccatagctcacacttagaatcacatcctttgtttgacatcgtttgkgggtttgtggtttggtgattttcccataatggccttcccaggcagagagcatcatcttaaacttgggaagactctaggtggctggctcaagcaatagaaaatacctagtcttaaagcccaggacagttgaggcgaatataatttgtaaaaaaagttgtggttttcacagatgttcagtgaaagaaactgactgttctctgaattgttttttgtgggccattaaaaatggtcacacagggctggccatggcattttggcacagtcaccagcagycaagtggtgtataatttcagaggtactaaaaggcatcgggtcacccatcccagtcatgtccccccaccccccaccaaacaccatcaaaataataacatacatagatgaaacagcccactaaaccagtagtacctcaattcagccattagagctatcattatgaagtggcccacacatatatttggctttttctcacacartatttttaaaataaaaataaaaaatggctccttagaatccagactgaaaaaaaaatgcgagaattgcgatgttgattctaaattcccacatggcaaagaaaaaaaaattgactggagttgagttgagactggagtctgaacactttttaatccctgtttgtataactctggagactaattctttgtcttgccagccattcataatttagtataaatgcattcagaggttttttcccaatgggaacaaaatttgattgagatgtaaagagaggaagaattgtggagatgtcaaacatgtgaccagagctatkaacacacttgatacccttgaacttaaacttacccaactcaaaatatctggccttctgcgatcttacctttctacatttataataagatttgcaaggttgttggaaatctctatcttaactttatatatacatgcctctttctttctttttctttcctttcctttccctttctttctttctctttccttccttccttcctttctctctctcttttcttcctttcctttcctttccttccttccttcctttctttctttctttctttctttctttctttctttctttctttctttyctttctttctctctcactctctctctctttctttcttatttttggtgctaaaacccaaaacaaatcttttatttaaaaataagattttttttttttttggccaggtgtgatggctcatgcctgtaattccagyactttgggaggccgaggtgggtagatcacctaaggtcaggagttcgagactggcctggccaacatagtgaaaccccatctttactaaaaatacaaaaattagctggatgtggtggtgggcaactgtagtcccagctacttgggagtctgaggcaggagaatcacttgaacccaggaggctgaggttacagtgagatgagattgcgccactgcactccagcctgggtgacagagcaagagtccatctcaaaaaaaaaattgtttaagtaaaattttattttctttcttttttttttttttttttttttttgagatggagccttgctctctcaccctggctggagtgcagtggtgtgatcttggctcactgaaacctccatctcccaggttcaggtgattctcctgcctcagcttcccaagcagctaggattacaggcatccaccatcacacctggctaatttttatatttttagcagagacaaggtttcaccatgttggccaggttggtcttgaactcctggcctcaagtgattcacctacatcagcctcccaaagtgctgggattacaggcatgagccactgcgcctggccaaagtaatattttcaataagaaaaataacagtgatgtcaggatgctagaaaatgcaaaataaatttgttataattcctgattctggtgatraaatactaaatttttgcagtattattctgaaagaataatcacgtatttaaagtacaaatctttagacttcaaagtgcatccatggtggcagattttgtttaacttttatatagcatcttttattgcaaccaaaaatagctgaccattattgtggaataattcagcgtaaagctttttttttttctttttttgagacrgagtctcattctgtcacccaggctggagtgcaatggcatgatctcrgctcactgcaacttctatctccagggttcaagcgattcttgtgtctcagcctcccaagaagctgggactacaggcatgagccaccatgacagttaatttttcatatttttaatagagacagggtttcaccatgtttgccagcctggtctcgaactcctgacctcaagtgatccacccacctcggcttcccaaagtgctgggattacagtcatgagccaccgatccccgcccagcataaagctgtttttagatcaccttctataatttaccattgttcttaaattaatggttaagaaacaatatgataatcagtttgtggtggccagttttacattttataagggattttacactgacgatatagggaaatttattgtcatcaaagtcaaatcccaacaatcataaaaagacatgaattagattatataatttcaatgaaaggaccaccttagcaaacatctaaccccttgttactcaggtatcattcacgggccagcagaattggtattatctgtgtttgtcagaaatgcaaactccctagttttttgttggacctccagaaacagaatctgcattttagccagacccmagatgatgtgtgtggcacattaaagattgagaagcctgatcctctcccaattctcacccaatgaaaaaatatgttacatcctctatccactgcttggttaaactgaggttctccataaaaatacttgttatctatatgctatgcaatcatctgtgagtttgagttttgaatatgtgcattgattctctctcacagtgcagcctgggagctctattccaccttacaacaccgaggtgactgagaccaccattgtgatcacatggacgcctgctccaagaattggttttaaggtaaactgcagatgttcctaatctctgtgatacagccctgaagctgtccttgtgkttcccatgtagtggaaacagggtgctcaggagtcaggagacctgggttttgtcacctgcttctgtccatacatctttgactacattgtcagggcctaacagtccttccctgcctacctcactgaattgttggaagggtagatggaggctgcgaaagtgttttgcaaaggataaaacattagcacgaagctgctgcttattgttatcttattttctctatyctttcctgcagggaattacatttcaaaaaaacatgggaaaactttatttgatgtgttgttctaaatgagtgtgaacaagttcacaaaagccagtttagggagaccagttaaactcagagtcacttaaaaatcgcattttcatccaatcagtttcatctccaactgttcaaagcactgagggtgaatctcttaatagaagttaagattaaggtttccctgtggatatctggattcatcttctttaaagtaatgatattagggaagcggtgaatacaaatgaatatgtttaaaagaattccattctttggcatttagtgtgaagagagaaatatttgttatygctggaaatcatgactcaatccccttgatygtttaaaaaaatacaccaaagataaagtttgtaaatggccatatttatgattatgctactcaaatatagaagaactttctgaagagtgccagtataccttttaattcccttaataatgtcatgctgactttcagaagccttatgatgtgtgaaggatctctctagagttgaacactattggataacagtgttacctaagtttttgaaatagaatcttaaaaggattttaaattatgggcatagttattctaattcttctcttgtaatgtatcatcctgcagttgaagctatgtacatatctcttcaaaaggtgtgtttttgcaatacagttgctacaggggctggtgcctttaaatggcaactaaaaggttaattgaatgtgaataactcgttaaagggagagctcagacattccttctagcacacacacagaaaaatagaaatgaactaccatgtgacccacagtccctgtatacgtctggtttgtaacaagagattctttatcaagcaaaacagtatgtaatgacatttctctggaaccttccatyacaagccaccttaaygcagtttggaagatacctcccccacctgggggaatttccagctaaagtatataaaagagtccccaaatcatttcccaataaaagtacactgtgcagtttctgaagagtttacactatttaaagcataatcatagcctcacagcagtaacagkcctctggaaatatttgtccttggtgtttactttgcattccttcctctagctgggtgtacgaccaagccagggaggagaggcaccacgagaagtgacttcagactcaggaagcatcgttgtgtccggcttgactccaggagtagaatacgtctacaccatccaagtcctgagagatggacaggaaagagatgcgccaattgtaaacaaagtggtgacacgtaagaagaattttttcccttttctattagtttttaaaactgttctacttttcgaaaaaagctagtgtcaatatcactttttacttatgagaatggcacaggggagatatcttatccttacttatattattaatgctattcctgaatttggagtagcaggttcaattcatgctttatattttatggcatcagaaatgttctttccatgtcaagaatatttatgaactggcaagatgaaaataatttcaatagtattgcaaaatcattaatcataaaraagtctttgtcagagaattactgctgtccatcatattttcataatgtaacctatatttttatgggagggagggagggagggaagaagcatggaagagagggaggtagggaaggaggaaagattacacaggtcaagagctttgtgtcagctttgacttttaaaatgttctttctgcatagcattgtctccaccaacaaacttgcatctggaggcaaaccctgacactggagtgctcacagtctcctgggagaggagcaccaccccaggtaagtttgggatggatcagagggcaagtatacaccataccttcccaagacaaagattttagaaactgtgtttctttcagagaaagaagggattcaaattacaaatgcttagctctccataaaaactatagcagtacatgatgtacatcatggagcagcctgcaggatgctttaatgcacgttgacttcaatcacaggaagcagaacaaccttacactagtctagggggacaagacagatcctcacacagctgtagggctgaagaaaagcactgtggaaggtggcttttgctgagtgcattaaaaattgccaaacaaatggttgaagtcatattacgtaatttcccttttgtgagttgttacagagcctaagtttattattccctgaagttttatgaatgttttgtcatgggttgcaccacaaatatttaagggtgatgaaaggcagaaataccttcattttacagaataagaaaactgagacttagaaaaaattggcctactcatagtcacacattttaaatgttacaaaactgggattgtaacttaagtttgtagactccttctcacacccaatgtcacatatttggaatgtaatttttttttaattatattctatgcaaactgaaaattctgattaaggggtttcctgaccatttttagagctttaaatgaagcatttgtctaaattccttgttcacatatatttgaaaattatttataaaatgctaaaatgtataaagatagttgttaacaatattcaaacagcatgaygtactatagcaataacaggaaattttagatacccattacttttgccaaaaccacatggaagtctcaacaaacctatggagaaaaatcttaaacaaaaataaaagttccaattaatgttgattgcattcttacctcatatacttgttaatttaagggatatgtttaggttattatttagctatttctaattttactgtaaaattcttgtgaaatttttgtttaaaaaaaagtattatatagttcttatctttgccggggcacagagctaaggctatcatctctaaatctgattaatgtatgcaaacacacagaatgaaactagctcagaatatctcttttaatctccctctgaagtagagtgattttggtaaagttttcattatctgcggaaacattgtttaagccaaagctatacaatttccagctgagttgctctgaatttgaaactttaagttgacaatcttcgtgcttgttagcagcaggatcattaatatctcgtctcaatggcccagcccacayatatggatgaycactagcaagtgtaatgatctcaatatttatttctcattcagttgggtttccttgtatttgccacattagtgtttaccctgttcctaatggcaaaatattctgtcatctccttgccttttataaagtttaatatactttctcattttaatctgtccccacagatctctagtcatcactgtttttatttgaatgtctctcatccctctcaactcttttactgcccaatttctgtgattcctgaagacttcaacaatcaayactctctttttttgtttgttttgtttttttttttgagacagagtctcactctgtcacccaggcttggagtgcagtggcgccatctcaactcactgcaacctccgtctcctgggctcragcgattctcgtgcctcagcctccccaagtagctgggactacagacatgcgccaccaagcccagctattttttagatttttagtagagacagggttttaccgtgttggccaggctggtctcgaactcccaacctcaggtgatctgcctgcctcaacctcccaatcaatactctttctagaataagtatcascacttttgttyctcaccttttctcctttcttggttctcttcctataaatcccatagtttcagaccttttaaattaggagagctctctggggaatgtgcttaaggtggagarcgattctatactaggcaggtagaaaggaatattcctcagctgtcttcaaatgattcattaaggaaaagcagggtacagtgataggaccatgagatttggaaacaaagaaagctttggggaatcactcccctggttcaagatttcctttaaagtgaggatcttggcggaggttgaagtgagccaagatcacaccgctgcactccagcctgggtgatagagggagactgtctcaaaaaataaaaataaaaaaataaagtgaggatcttagtactgcctgaaaggattgttgcaagcattgaataacagtgacagtggagtcctcagtaaatgccaagtcctgcattccgccctgtgaatccatcattggagtctagttaaatatgctctggctcacagatyctctgtgcaataacttcccttttcttttttctccagacattactggttatagaattaccacaacccctacaaacggccagcagggaaattctttggaagaagtggtccatgctgatcagagctcctgcacttttgataacctgagtcccggcctggagtacaatgtcagtgtttacactgtcaaggatgacaaggaaagtgtccctatctctgataccatcatcccaggtaatagaaaaataagctgctatcctgagagtgacacttccaataagagtggggattagcatcttaatccccagatgcttaagggtgtcaactatatttgggatttaattccgatctcccagctgcactttcyaaaaccaagaagtcaaagcagcgatttggacaaatgcttgctgttaacactgctttactgtctgtgcttcactgggatgctgtgtgttgcagcgagtatgtaatggagtggcagccatggctttaactctgtattgtctgctcacatggaagtatgactaaaacactgtcacgtgtctgtactcagtactgataggctcaaagtaatatggtaaatgcatcccatcagtacatttctgcccgattttacaatccatatcaatttccaacagctgcctataaaatagttttgtccctgtatgtgagcactgaaacagcatttggttgacacatctagtttttcatcttgcagtttcaaatccttctttttgaaaattggattttaaaaaaaagaagtaaaagtcacaccttcagggtgttctttcttgtggcttgaaagacaacattgcaaaggcctgtctaaggataggcttgtttgtccattgggttataacataatgaaagcattggacagatcgtgtccccctttggactcttcagtagaatgcttttactaacgctaattacatgttttgattatgaatgaactaaaatagtggcaatggccttaaccttaggcctgtctttcctcagcctgaatgtgcttttgaatggcacatttcacaccatacattcataatgcattagcgttatggccatgatgttgtcatgagttttgtatgggagaaaaaaaatcaatttatcacccatttattattttttaaccttcttcatgcaagcttattttctactaaaacagttttggaattattaaaagcattgctgatacttacttcagatattatgtctaggctctaagaatggtttygacatcctaaacagccatatgatttttaggaatctgaacagttcaaattgtaccctttaaggatgttttcaaaatgtaaaawatatatatatatatatatattccctaaaagaatattcctgtttattcttctagggaagcaaactgttcatgatgcttaggaagtcttttcagagaatttaaaacagattgcatattaccatcattgctttaacattccaccaattttactactagtaacctgatatacactgctttattttttcctctttttttccctctrttttccttttgcctycccctccctttgctttgtaactcaatagaggtgccccaactcactgacctaagctttgttgatataacygattcaagcatcggcctgaggtggaccccgctaaactcttccaccattattgggtaccgcatcacagtagttgcggcaggagaaggtatccctatttttgaagattttgtggactcctcagtaggatactacacagtcacagggctggagccgggcattgactatgatatcagcgttatcactctcattaatggcggcgagagtgcccctactacactgacacaacaaacgggtgaattttgaaaacttctgcgtttgagacatagatggtgttgcatgctgccaccagttactccggttaaatatggatgtttcatgggggaagtcagcaattggccaaagattcagatagggtggattggggggataaggaatcaaatgcatctgctaaactgattggagaaaaacacatgcaagtattcttcagtacactctcatttaaaccacaagtagatataaagctagagaaatacagatgtctgctctgttaaatataaaatagcaaatgttcattcaatttgaagacctagaatttttcktcttaaataccaaacacgaataccaaattgcgtaagtaccaattaattataagaaatatatcaccaaaatgtaccatcatgmtcttccttctaccctttgataaactctaccatgctccttctttgtagctaaaaacccatcaaaatttagggtagagtggatgggcattgttttgaggtaggagaaaagtaaacttgggagcattctaggttttgttgctgtcactaggtaaagaaacacctctttaaccacagtctggggacaagcatgcaacattttaaaggttctctgctgtgcatgggaaaagaaacatgctgagaaccaatttgcatgaacatgttcacttgtaagtagaattcactgaatggaactgtagctctagatatctcacatggggggaagtttaggaccctcttgtctttttgtctgtgtgcatgtatttctttgtaaagtactgctatgtttctctttgctgtgtggcaacttaagcctcttcggcctgggataaaataatctgcagtggtattaataatgtacataaagtcaacatatttgaaagtagattaaaatyttttttaaatatatcaatgatggcaaaaaggttaaagggggcctaacagtactgtgtgtagtgttttgtttttaacagtagtacactataacttaaaatagacttagattagactgtttgcatgattatgattctgtttcctttatgcatgaaatattgrttttacctttccagctacttcgttagctttaattttaaaattacattaactgagtcttccttcttgttcgaaaccagctgttcctcctcccactgacctgcgattcaccaacattggtccagacaccatgcgtgtcacctgggctccacccccatccattgatttaaccaacttcctggtgcgttactcacctgtgaaaaatgaggaagatgttgcagagttgtcaatttctccttcagacaatgcagtggtcttaacaagtaagcagttgaatgtatctgttccataaatattaacctagagcatagcaaatgaattctaaattctcaagtaggaggagctaagagcaagagagctgcaaccaagctacaaactaaactctgaattsaatgcmcagctccattaattttgaaagatgtaatgtttgttgctatcttaatatacttttgatatctacagctttwaaaaaatcatagtggaaaaacacctgcaggaaagttccatgacttcaaacaaattctgcttctaaataagcacgtaaaaataagtgaatatcaagagaaattatatgactaaatctaaatctttagagaaaaaaatgagaactgaaaatagtgtcaccatatgtgctttattctcatttttataaaaaaagtgtcagcagttgattgatttaggatttgaatacttagaaaagtgactgattgtttggtctagattagaatgttgttgtgaagagagtcagaagtttaatttgtacttcaaaaagaatctgttagaaggatttctcagaagactgagagcttagaaaaaaaactgacattaaataaataacaacaatttatggaaattgtctctttctagtcccaaccattatagaatagacatcttttgttaaagaataaaacagtaggctgcaagatggtgctgtgtttcacataaacagtgctttttattattttcactgtaatagtcaaatatataacaacagcaaaagattctacataagggaaaaatagcttacatttaggtacattaccaagtattagtctgaaaacatctacctttcaaacataatttagataatgaaacacaaagaagagcagctcagcgtgaccataatcttggtttcttactttgtggctgagggcaagaatatctttatattggcatatccaccaccccagggctgttgcttctgtmcaccctggaatcactaattacagcatcacccagtatacaagcccctgcatcacaatgtctgtcccttagccgtagacctgtcacatgytaatcatgtgttctaagaccttattataatcctaatgctacagatgacctcarggtagcccctctccctcctagcaaagtcattattatcctcttttaaagatgaagcaaaccagtgcagtggctctcgcctgtataatcccagcactttgggaggctgaggtgggccaattgcttgagcccaggagttcgagaccagcctgggcaacacagtgagaccaagtctctacaaaaaatacaaaaattagccgggcatggtggtgcacacctgtggtctcagctatgtaggaagttgaggtaggaggatcacctgagcctggggaggttgaggctgcagcaagccatgatcgtgccactgcactccagcctgggtgacagagtgagaccctgtctcaaaaaaataaacaaacaaataaacatgaagccgtcgaggtccccagcagttaagtaaattgccactggccagctagtatggtggaaatggaatccaggcatctggtcctccattctggcacttttccaaacttttgtagggggctttatagaaacgctgaagggcaaatggtgtgcaggggaatgagggtttagtgagtaggagttccaaatttagaaacctcactctctgtatcttttagatatacaaatatttaccatatattacagttgcctctagtgttcagtacagtaacatgctgcacaggctcatagcctaggagcaataggctagaccacatagcttatagcttaggtgtgtcaaaggctctaccatctaggttttttgttttgttttgttttgttttgtttttgagacggagtctccctctgttgcccaggatggagtgcagtggcacgatctgggctcactgcaacctccaccaccaaggctcaagtgattctcctgcctcagcctcccgagtagctgggattacaggcgtgagccaccacgcccagctaatttttttgtatttttagtagacgaggggtttcaccatgttggccaggctggtttcaaactcctgacctcaagtgatccaccctcctcggcctcccaaagtgctgggattacaagcccatctaggtttgtgtaggtacactctatgatgcttacacaataaaatcaccaaatcacacacttatcaaaatgtatctccaccattaagctatgcctgactgtgtatcaaaatggaagaagaagctgggcacagtggctcacgcctgtaatcccagcactttgagaggccaaggcgggtggatcacaaggtcaggatttccagtccaagcctggtyaacacggtgaagccccgtctctattaaaaatacaaaaattagccaggcatggtggcaggcacctgtaatcccagctactcaggagtctgaggcaggagaatcacttgaacccaggaggcagaggtttcagtgagccaagatcacaccactgcactccggcctgggcaacagagtaaaacctcgtcaaaaagaaaaaataataaaaataaaaaaaaatggaacaagatactcagggatgtatatttaattttttaaaaaatattctgctctcattttaatatggcagaaccgattgctttctaagtgtggcttttttccagtaaaggttaattattaagaccactagtcctgscctgggtcaatcccagtatgatcctgggcaagtaaattaaagaagataacttctctgtgcctcagtttttttttgttttgttttttgttttttcatttacaaaatggagataattgtagtaaatcaaatttttagaggtgataggtttgttcatttcttgaatgcggtgatggtctcccaagtcacacatatgtaaaaacccatcactttaaagatatgcagtacgttgtatgacaagaaattgcttttaaaaggagcaaactaccttccagggttgttgtgaggcataaatggcaatccacagcaccacagcaaggattatcatgtgccctccagagacatactctcaggtggatgcgagaaatatccagctgttgcagcaacttcatcccactcgaaatccagctgagtcacactcacaggtggaatggagggcttcgagaggccatggggcaaggtgacccttccttatcatctaattacagaccttctcaaggtctgttcactgaacacttcgctgtagtgttcacttaggtgtaagtaggctataggactggacatttggatatttcatcagttcaaatagtcctgggcgtgctttagtttctcatgcttttgagcagagttttaaaataagcccsatttgcccctacagatctcctgcctggtacagaatatgtagtgagtgtctccagtgtctacgaacaacatgagagcacacctcttagaggaagacagaaaacaggtgagtggtgttggcagtatgactatccagtagcttttgcctatcaattctgtataacaaatgaaatgctacttctaaaaatacatctccattttttgttgtcatggtgtgtgtacctttgtcatcacagtatgattttatcgctggtctcaaaaactaaaagataccttactcaacartcacctagactttcagtcactaacaaattaagaaatttgttgtctgtccttttaaaaaacattttctaagaagatctttgttatttagatttagcagacattccttttcattaggcagctctgtctaatggctgacccaacactcattgtcatctatttgtcttcctttactaagccagcaagtttacattttctttttacttaataaaatatgcatttactagaaggaagttgaattgaatctcataaatattacatacttaaatatgaatgcttttaattttttctttcaaaaggtacactttagtgtattcattaatttatttatagtccacttgcttccaaaaaggacttatgatatcttagtttggtttcttattgaaaagaactagtaaatgctgtaactgaaacagaaatttgctggaagtcccagagactaagtgatttgaatttgcracaaactctgaatttttgtgcatttttgaaaaatgcatttttcaaaactgtcaattcacgaggaattatcagcattgtaatttgtctgggataatgtctttagtttcagaaagttttgtgtttggcatcattaccactctgttgacatataaatttcctcttgagcttaggaggcttctctgagagtcaaacatttactttgagagtgggcagatcttgctttacttggaaggatacacttacaggatagaaacacagaatacttgaacactgaagaatttgaaaatgtcaattctcagaagatcttgaacacttatctccaaatgtgacacagaaacttactgtaataacccctaaaatctgcttgaattacttagcacaagaaaaaaatgaatgcttgagctggctattttgaattgagtcaatttaagattttaaaattcatatgtagcttagaatcagtacatcttactctttggtttatggcaaatcatggtattgatgagacaggaacgaaatgttggatgtacgttaatttcccctacaccttcctcacttcctaaactggtggtgtcttttcttttttttttctcttcctccccygggtgggaaaaacaggtcttgattccccaactggcattgacttttctgatattactgccaactcttttactgtgcactggattgctcctcgagccaccatcactggctacaggatccgccatcatcccgagcacttcagtgggagacctcgagaagatcgggtgccccactctcggaattccatcaccctcaccaacctcactccaggcacagagtatgtggtcagcatcgttgctcttaatggcagagaggaaagtcccttattgattggccaacaatcaacaggtaacttttcttgtctgcaaagaaactcagaagactttcctacccagttggtagattctgtaaagtagcttgctgttgtctgtcatcagctctcaaaaaaaaaaaaaaaaaaaaaaaaatagatcattgtcatggtacatggagagggaagtgagaaaatgtggagaaacatcttccttagaatatggtaaagaagcccgggcgtggtggcagtaaagaagataatttttttcctctcaagaaatttctcacctgatttgggtatttatgcatttctaataacacaagttttgttgaaaatgtaraaaattggccggacggggtggctcacgtcagtaatctcagcactttgggaggccgaaatgggcagatcacttgaggtcagaagttcaagaccagcctggccaacatrgtgaaaccccatctctactaaatatacaaaaattagcaaggtgtggtggcatgcacctgtaatcccagctactggggaggctgaggcaggagaatctttgaacctgggaggcgaaggttgcagtgagctgagatcaggccattgcactccaacctgggtgacagagcaagaccctgtctcaaaaaaaaaaaaaaaaaaagggccaggcgcaatggctcacgcttgtaatcccagcactttgggaggccaaggcgggtggatcacgaggtcaagagatcgagaccatcctggccaacatgatgaaacctcgtctctactaaaaatacaaaaattagctgggcgtggtggcatgcacctgtagtcccagctactcaggaggctgaggcaggagaattgcttgaacccaggaggcggaggttgcagtaagccaagattgtgtcactgcactccagcctggtgacagagggagactctgtctcaaaaaaaaaaaaaaaaaaggtggaaaactgaacactgtttcaaagtacctttaaaaatataattttagggtaatagtgtcattgttcttagcagatagaggctgaagtacttacgggaacagtagcatcatgttatctgtattttagtctcaagtcgtcaagccagagacaaatacctaagggaagggtatataggtgttcattgtattacttttttttttttttttcttcctgaaatggagtcttgctctgtcacccaggctggagtgcaatggtgggatcttggctcactgcaacctctgcctcccaggctcgagcaattctcttgcctcagcctcccaagtagctgggactacaggtgcccgccaccacgcccggctaatttttgtatttttagtagagatgggattttaccatgttggccaggctggttttgaactcctgacctcaaatgatccacccgccttggcctcccaaagtgctgggattacaggcgtgagccaccacgcccggccttgtatcacttttttttttttttttttttttaacttttctgtagttttgaaatttttccaaataaaatgttgagggaaaaaaactcttccccaaatttgaaataatcattttatcacaatttgaatgggctctgtaaccccttatcttgaattcgtcataatataaaattctgctaattacacrtagtatttacatgattgtatggaagaatcattaagacaattatctggaaaatgaacaaacagtaaatctgaatattgtttgaaaattacggatgtgaaaagtttcccttttttttctagtttctgatgttccgagggacctggaagttgttgctgcgacccccaccagcctactgatcagctgggatgctcctgctgtcacagtgagatattacaggatcacttacggagaracaggtacagcagtaaaatgctattttacactctgattaaatcagattctgttgtggataacctgaaagcccaacagtgaacaaagaattaaagaaactttggcaagtccattcaacggagcccttgttttttccaagaaaatacgtaagatatagatgatataatttgttctaaaacccaaataaaaagttgtttatatactacaactagagggggaacggcagagctgaggaaataaaaggattgtaaattcacaaacatattatcagtggtggaaataagtgatttttattttttcttctctttacttttctgtattttccaaattttatttaaaaggaatgtattctgttaaaagttttaaaaaggacacaatgcatgcaatcctgggttgagggcttaccttctcccacttctaatgctactctactactcagtgacattttaaagctgaaatgttaaaacagcgctaactgtaattttctctcaatgtttatacacttaccaaggtttgctacatgcataaatacccctttctgttcaagatagcgctctttaaaagggaataagcaagaagatgtgatttacatgctgctataaatgtggtaattcaattaatcagtaatacccaagtagctctaaacccctcacactctgaactaaccctttttcatacaggaggaaatagccctgtccaggagttcactgtgcctgggagcaagtctacagctaccatcagcggccttaaacctggagttgattataccatcactgtgtatgctgtcactggccgtggagacagccccgcaagcagcaagccaatttccattaattaccgaacaggtacaaacttctactctggggtgacaccagcttttacttattcagatactgttttgcaatgttctcccaaggtatttttctaattgtagaatagattttcctttttaatgagcaacaacctgcagctagcacctgcrgcgaacagagttttgagccagataaagaaggaagcaccccaagggcaggaagttcagtcagttttgtcgatatattccgcatgtctgcaatacgacaggcatagagagtgttcagtaagtatttgtgggaaaagaatggatgagttgataaagtaggaagagacacctgcttgtggaatgtagcttctttgtgaatgaagcaaccatctcaaaaataggaaatggtattgagatgcctgccccatccctctaaaagctctctctgtattctttcgagaagaaatacctttctcatgtaagmgatcattcgaatatgtaccagacctagagaggaggacttgtccaatcttgtctccaaggactggggcttcactggtttctccctgcttttatttgtagaaattgacaaaccatcccagatgcaagtgaccgatgttcaggacaacagcattagtgtcaagtggctgccttcaagttcccctgttactggttacagagtaaccaccactcccaaaaatggaccaggaccaacaaaaactaaaactgcaggtccaggtaagaatcatctgcatctcggccaggtgcggtggctcactcctataatcccagaactttgggaggctgatgcgggcagatcacttgaggttaggagttcgagaccagcctggccaatatggcgaaaccccgtctgtactaaaaaatacaaaaaaattagctgggcatggtggcttgtgcctgtaatcccagctactcaggaggctgaggcaggagaatggcttgaagtctggaggcagaggttgcagtgagccaagatagccccactgcactccagcctgggtgacagagtgagagactccatctcagggaaaaaaaaaaaaaaagagtaatctgcatctcatatacaacaggatagatggggtaggaccacctaatattcttttttatataaatggctaccttgttgtgagtactatgtatttttttgtcctatgtcatcattgtccccattcatgagttcagggctcaagatcattatcaacccttttcacagtagaagtcttaagtgcatttctgtttttacatggatagttctatttagtgatatggacatcttaaattactagattcacccttctggttttgtttatcattcacactaagaagagataaatggcctaactgactttttcagctctttttagctatgttgtctttgtttttaaatagaatacttgtgaaattaggatcttaaggcaatttattagagtcaagttaattttcattttttctgagagcagtatcactaattgttgggggcatcatattaagttttagatcttatccttgagtgtgacttcactcccatatggtaatttgtattagcaatgaacaggtttgtccaagaggaaatcaaagtctgactctccatatttttgttacaattctgcaaataaaaattctaggccaccatatgtttactaccaaactctagacgccacttgaggactttatagtggatgacgtggatgttgcatttgcttttcactccctttgcagatcaaacagaaatgactattgaaggcttgcagcccacagtggagtatgtggttagtgtctatgctcagaatccaagcggagagagtcagcctctggttcagactgcagtaaccagtacgtaaccactkcttggtttccattttcaaagtcaaattttgttcttgggtgtctgaatgcccacgacatgtcttttgcaattacacatagggaaagtgaacttgttggttagtttatgtcttgagctgagccctttacgaacatcttttttccttctcagtgccaagcgaggaatttacagagaaagaagttgtgaaaccaccatagttagttgctgtgctttgaatttcttttgctcaaatggcctcagcgaaatcttatttgcctatagcawatctacaaaaaattttcctagaccgtcttttctacaactggatggtaaagttgattgaagtgtgcctcatgtagctttatgtttggggcatttgaagggctatggctggaccagagtgtaatataaatgcttaatagagaggggaaaagaagagtgtaagaaccattatagggctgggctcacgcctgtaatcccagcattttgggaggctgaggcaggcggatcacgaggtcaggagttcgagaccagcctgaccaacatggtgaaaccccatctctactaaaaatacaaaaattagccagtcgcggtggcacgtgcctgtaatcccagctactcaggaggctgaggcagaagaatcacttggacccaggaggcagaagttgcagtgagccaagatcatgcctctgcaccccagcctaggtgatagagtgagactccatctcaaaamaaaacaaaacaaaacaattataacaatttgaatctgacattgcaaatcagctttaccacttccaaggtatagaaaatccaggtctatgagactaacatcacattgtaaaaatcaaatcgtggtagaatayctttaaattaatataaatacatccccattgtggggacattttgcagggtatctgcttatctcacatacacctatgttttaataagtgatgcaacattgcatattttctaaaccaagaaaaattaagcaagtgtttaagtgatttttccttttgatagtgggttaattggacttcatcaaagaaaatggtatctgcaaaactgctttgcatgttataaaaatgcttatttcacaacttgcttttcacataacctcttaccattaatttgcctaacagacattgatcgccctaaaggactggcattcactgatgtggatgtcgattccatcaaaattgcttgggaaagcccacaggggcaagtttccaggtacagggtgacctactckagccctgaggatggaatccatgagctattccctgcacctgatggtgaagaagacactgcagagctgcaaggcctcagaccgggttctgagtacacagtcagtgtggttgccttgcacgatgatatggagagccagcccctgattggaacccagtccacaggtatatggttaattgcaccaccaggtgcccatgggagcagcggctttatgccctactgaatgaattatgcttcactgggctattgattcccgtgtaagggtgaaaaagaattattaggaaagatcctctttaaagaggaatrgtaagaaacaataaaacttaggtgatatttaaggaaacaagtcwgattaaaagaaattttggagtatcctggcttatacacaagaccataaagcaagacatttgaagaggatactaaagttgtggattatttcctaagctctgactccctgtgattaccctcactatgtataaagaaaagaagtttggcattacagagcttacttataaaaaggaacccaaactcgggcatttcatagcagcatgattctgagcacacgtgggtaagacctttcttctctggttagatatcatatgctggtgtataattagcttaaatgattgtgatttagacacctaggaaataatcaatagggcaattgctttccataatactttatcttcttgtgctttatttctgaagcagagtagaatgctaaagatgtatcctagtgacagcataaaccctagaggtgacagtctgtattattgcttttcgcttctcttttctgcttctgttgggagccagttttcttcttacgccgcattacagagagaacgtcaaatttagcagccatatctgccatagggtccaaataaagagacaataaaaacattattctctcttttttggatggaatactgcgtgaaatggttatccatacaaagatactttatgtagaatagaaaaaggaggccgggtgcagtggctcacacatgtaatcctagtgctttgggaggctaagccgggagcactgattgaggccaggagttcatgatcagcctgggcaatgaagtgagaccccgtctctacaaaaaaatatgaaaaaattagcgaggtgtggtgacacatgcctgtagtcccagctactcaagaggctgaggtagaggatcacttgagcctacgagttcaaggctgcagtgagctatgataactccactgcactgcygcctggatgacacagagagaccgtttctaaattaattaattaacaattttaagaaagaaaaagggccattgcttatttttccatacaaaagtaaaataaatcataatggccaataagccaatgtaacttttttttttaagggaaagcaaaacttgtaaaacctaaaatctcttagagttttggcatttacccaaatgttttcagtgattctgagaattggtggatataaaacacatttctcagcaaacactttcttcattttgcatcccttactgtactttcttgtactgaatctttgcttgaccagggaacccacctagcccaacaagaacaatccattctacttcttggaactcactttattttccttttcccccatttcctataagataacctctaaccaatgacaatctcgacagctattcctgcaccaactgacctgaagttcactcaggtcacacccacaagcctgagcgcccagtggacaccacccaatgttcagctcactggatatcgagtgcgggtgacccccaaggagaagaccggaccaatgaaagaaatcaaccttgctcctgacagctcatccgtggttgtatcaggacttatggtaagacatgaccgttgttcrttggaataaagatggagatcatctctaacacagtttctaaggtggtgaaaatataatatcataataaatctaactgttcttttcctctgcatcaaataatcttattgtaattttatatcaacggaattcctttatgttgacctaagttttccagatgactattgggacagaattttataaayagctttggattttgtgcagctcttttagatgtattgtgcttattttaaaaggttgtggggggcaatttacatatccattggttgaatgcataaatcgacttagttatgcattttctgagctctgttaccttggtaaagaatattttacagtttgtaccagtctaccttgagcctaccctcattaaaacattttaaaatccttccagacatacatgcagaaaactgctaggaacctaggggactgatgtacctcttaacataaggccaatttcaggggaaactacagaaagagggttcagagacaaaatggaacattctctttgcctctctatgataaggaaaaaattatgatttacacctgtcagatcataaaaaagaaaaatacgctaatacccacttttctcattttttttaccagcttagtttaagtatataatctatggcttacttaagcttaaccgctaagagcattttaaaattgataaatacatttatcacctgcactgtaggaatgaaattaatctaggaattttcaaggttgtgggttttgctggtttgtttattttttattttctaaccattgcatttacctaatgctgtagtgaaactccttgggtttcagttgaggacgttgctaaagctcaccatgcccttatttctctaggtggccaccaaatatgaagtgagtgtctatgctcttaaggacactttgacaagcagaccagctcagggwgttgtcaccactctggagagtaagtaacaaaatgtcttcatatggacaaaccttctgtatagacaaaaattaaagaatggtaaatcagtggggttcagtggctcatgtctaaaatccaagcactttgggaagctgaggcgggagcgtcacttgaggccaggagtttgagacctacccgggcaaatagcaaggccctgtctcttaaaaaaaataaaataaataaaataaataattttttagatttatatgttaacagtggaatgagtcctaatttgaaaatcaatttgattgcctttttgacgcatgactgtcatcttttatactccttcagaaaggggtctactgacccataaaatggaatcacttcataagcttataatgttgatattatggactatgactgacatctagtttatgctctacttgttagaatttgttttcatagagctaagcttggggagaccactggcttctgctatatcttaacaatgcatattaggccattcttgcattactataaagaaataccggagactgggtaatttctaaagaaaagaggcttaattggcccacaggccagcaggctttacaggaagcatggtgctggtatcttcttggcttctagggaggccttgggaagcttactcatggtggaaggccaagggggagcaggcacatcacatggctgtggcaaaagcaagaccgagagagagagagagttggggggggaggaccttatacatttaaatgacccagtctcttgagaactcactgtcataaagagggcaccaagccacaagggatctgcccccatgatccaaacacctctcaccaggccccacctccagcattggagattacaactcaacagagatttggacagggacaaatatccaaattatatcacagcacagtaaccattggaccaaatcaggcttagattctagtcttctgttatatcaataccttgatgtatgccttttcaaaagtcaggtaaagtgtcaaagttttatcatttataaaagagggatggcattgtacctgttgagagaaaatacaaaatacttgccgtaatattagacacacacacacacacacacacacactctcwctctctctyacacwcacatacacacacacacacaaaattgttagctggccatgttattgtaactcctaccacacatatttttacattataatacattaataattttaatatttattgaagtatttgtagatactataaagccagccctgggaaccactggtagtatctataaagcttttcagctcttcaaaataaaatgtctgagaggtagawattttcctattttctaattacagttgacctttctctctgaatrccaaaggagrtaatctacacattactagttatatatttcttgaaatggatgaatttgatatataccaaggaaacgttttaaaataccaaaactttacatrgatgagccaagcaggcactaatctctagctatgctcctgtgcagatgtcagcccaccaagaagggctcgtgtgacagatgctactgagaccaccatcaccattagctggagaaccaagactgagacgatcactggcttccaagttgatgccgttccagccaatggccagactccaatccagagaaccatcaagccagatgtcagaagctacaccatcacaggtcagggaactcattgcactaaccacatttgttaacaaatacccacaatgtaaacgggcttattaactgttctacgactgacactgataaaatttattttcagtgttatcatcataacccagttttagaacgttattttcatgctatgatcagaaatagttttgtcctttgaatgcctgattttgtgtaatatttgtcatggaaattgcgtaagtgtcaatcaacaagtttgatcttccatcattgtgccctttcttatttaaaaaattgtaacataaggtttaaaactaaaagaaataaaaaacagtgatgtatagatcttagcattaaaaagcatagttaatataaaagtaaacaataccacttaataaaggccaaaattgtaaccgaagaatattcaatatctgaggtcttttttagctttttaaaattgtgattccaaggctcaactattgaccatctgattacggtaaagagaaaacctcaataagtggctgacccccattctgcaagagggcctcttccaacatagcatttttgcattccagaatttactttaccagtgtccttgtctgtatcagtgattcactttcgagatatgtttcttgttaacagttaacatccatagcatgctctmctttactgttcaaatgtggaccactttggtagtctatataaatatgggatgatagaagaacccagaaaaattgcaggctagcttgagaattctcctagtaaaaagcaagaactgttaaaaatcatctcttctcaaatcccaggtttacaaccaggcactgactacaagatctacctgtacaccttgaatgacaatgctcggagctcccctgtggtcatcgacgcctccactggtaactataccttctactgaggaaatgccattgacttgtatgcaatcagtttcatgaactcaaaaaacaaatgtgaggcgtatatttttgtattatagattccagagaatcttgtttccggtttacagtattctcagattcttttaagtgtgtttagaacggctcgggagaaaagtgtgggagtaattttcttggttatttgccttcttagagacttaattttgttttctttcagccattgatgcaccatccaacctgcgtttcctggccaccacacccaattccttgctggtatcatggcagccgccacgtgccaggattaccggctacatcatcaagtatgagaagcctgggtctcctcccagagaagtggtccctcggccccgccctggtgtcacagaggctactattactggtattgctgcttccatgctgtcattttccttcttactacctaggacacatgaagtccttagcaaactcccacagcgtctttgatactgtgtcatgagaatgcgaaactctgttcctgataacctcaaaaagcattctctgtgtaggagtggtagagcctaatacatcccaaaaggcatgagtgaaggaaaatgcaatttcaagactgtactaatggcatgactagactcatgttttcctttcgctgcaagtttgccagatacctgtcaattcagtcctggagaaagatatttttcaaagcatactagctgattgtgattctgtcattacactcagctctctatagatatggcaatcttgcaggacttgccagtgcaccacctgccattgaccttgttgaccactatcacaggataggtcttgaggcagagcagtcccaaccacccacattggaagaatgcctggaatggggaataagagttgtctaccttggtgggaaagactataagcctctagtattatttttgcccaagagatgaaatatttaaactatctgtattagtctgttttcatactgctataaagaggtttaattgactcacagttccgcatggctggggaggcctcagaaaatgtacaatcatggtggaaggaaaagcaggcatgtcttacatggcagcaggagagagaagcacacaggaggaacttccagatacttacaaaactatcagatcttgtgagaactcactatcatgagaacagcctgggggaaccaccccatgatccaatcacctcctctcctcaatacatggggattacaattccagatgagatttggatgcagacacagagccaaaccatatcagtctgtatagagtatcacctggactttaaaattcccacagaacatacagacattagaaggagacactggctttttagaattggggggaacaggaaaatagaagcagacatgagaggaattgaactagacacttcccacagaggctgcacaaacactggccaatctctcctacccttcacttgcctttagtttcacttttcattgatctgccactgaggactgcttggttattaggcctaagtagattcatgtatataatctgcaggactctctttcaaatttatattccagtggtggtatatgatgctgatagattttcttaaattcaaaaaggcaaataagaccacgttaaaagaataccctggaaaggccaggcgcggtggctcacgcctgtaatcccagcactttgggaggccgaggcaggcagatcacaaggtcaggagatcgagaccatcctggctaacayggtgaaaccccatctctactaaaaatacaaaaacaaaattagccaggcgtggtgatgggtgcctgtagtcccagctactcgggtggctgaggcaggagaatggctgaacctgggaagcggagcttgcagtgagccgagatagcaccactgcactccagcctgggtgacagagccagactccatctcaaaaaaaaaaaaaaaaaaaaagaataccctggaaaagttagccaaaaaatgtctattcaggcgtcagatatgatagtaagataattagtttgcgaygcggactttatatgcaggatatttgggtgtttatggaggaaaagtgaagtcgattttaccttcaagaggccaacagccagctggagaggaagtgcctgctcccagtagcgtctgctggtgagaccgacttccacttgactagctgagcccattgacataatgtgatggttctattctcccttcaggcctggaaccgggaaccgaatatacaatttatgtcattgccctgaagaataatcagaagagcgagcccctgattggaaggaaaaagacaggtaagagtatcttgcaggtaacaaggagaaagataggacaaaactaataacaaatgagcaatcttgcaatatgaaaaggttctccatgttttgatgcatttcttgtgatttttttwatctaacagcatagtgtatatattgtattctttaataggagaaataatttaacatgcactgcagagtttggttttattttttttctttactacagccactcaatataaagccttgttattcaccttttaaaaattcaaacaagatgttaaaatgtaaaagaagagctatcattgctcttcttttataccttctgttgaattttaaaatgtttccttttttaaaggagggagagaaacctctcacatttatctttatttggtttctacaacttagagctaaataatgtcttacttttgcatccagtttcagttaatttcaagaaaatgtgtattcctgatataggaaaatttcaaaaatgaacatgtgtgttttatctatttttaccatttcaaaccatgaaaaactgttgagccaaacctctgtaattctcatacttatgacactgatatgattagtctggattctacttcctacaacttgcttctcaaatttaaaaaagaaagagagaaagagaaagactgcacatttcagttccattaggtctaatttgagcagaggcagcttctacggggctcagcggtttaaagctgtgtgtatgataaattcatactaacacttttttctttctaaactataaagaaacctttgagaaaaatcctaaagatttctttctggaaaaagtgttttgtgatctcagaactgctcattttctggtggcttttatcaaattgatgaacagtcattgttgcctgaatcgattattatcattgctgctacttcctggagcttaatgcgctttgcttttttggctctaacctctctcggctagacgagcttccccaactggtaacccttccacaccccaatcttcatggaccagagatcttggatgttccttccacagttcaaaagacccctttcgtcacccaccctgggtatgacactggaaatggtattcagcttcctggcacttctggtcagcaacccagtgttgggcaacaaatgatctttgaggaacatggttttaggcggaccacaccgcccacaacggccacccccataaggcataggccaagaccatacccgccgaatgtaggtgaggaaatccaaattggtcacatccccagggaagatgtagactatcacctgtacccacacggtccggkactcaatccaaatgcctctacaggacaagaagctctctctcagacaaccrtctcatgggccccattccaggacacttctgagtacatcatttcatgtcatcctgttggcactgatgaagaacccttacaggtaattaattgttctcttcacttctcatggggcagcacagaaaggaataagttaggtaactgaagtgaccagccctcgaataaaaagtggcttcatggctgggtgtgatggctcacgcctgtaatcccagcactttgggaggccgaggcaggtggatcatttgaggttaggagttcaagaccagcctggccaacatggtgaaacctcgtctcttgaaaaaaaaaaaaaaaaaaagtggctccacttttagaacctcttagaagatggcacatttaagccctgcttttttttttttttaaatcccaatatggctctactttggaggacataccagagagtcactagcttttatttcatagagaaaatgaaactatttctcttattctcacacatttgaggttcctttttgagtaagatagatgattctagaaaagaaagatattctacctgaatttccatttgtgtgcagaagtctaaaacactacctttacgatttgtccttgaagaaccccactatctacaacatatctaaagaaaaaaaaaaacaggcgaagctgtgcatagcagctgataagtgattgattctctaaaacgtatattatttaatttgtgttgacagtatccatttttttttttccccgagatggagtcttgctctatsgccctggctggagtgcagtggcgtgatctcggctcactgcaacctctgcctcccaggttcaagcaattctcctgcctcagcctcccaaatagctgggattacaggcatgtgccaccgcacccagctaatttttgtatttttagtagagacggggtttcacgatgttggccaggatggtctcgatctcctgacctcgtgatccgcccgccttggcctcccaaagtgctgggactacaagcatgagccacccactacacccggcccactgacagtatcaatttttattgtgttgttacttttagaaagtggcagaatttaaaaactgacaacactgtaggaaatttatgagcttagaaacatgagtttgaggatttgcccaactgttttaaggactccacactggggtcagatgtcacctggaggagcatgaccgtgtctcccatatagcgcagtgtccaggttttatgtgaagcaaacatggccagggcttccagagggcttatgcagacctgcgactgaagcaagatcaatggcaggccgtctctagtattgtcgagggctcctgttaactacggagcacgyaggtagattgttggcaggaaaatctggcaggaacgatggcccctatccttgttccatttctctcctcagctggttaggaccactataccctccctcttttttttttttttkttttttkttttttgtcttcctttgctttgtttaaacagtgagggttattggtaagaggagagcccgtgtcattcctcactataatgctttctctctgctttggatgtaccgataattgcagttcagggttcctggaacttctaccagtgccactctgacaggcctcaccagaggtgccacctacaacrtcatagtggaggcactgaaagaccagcagaggcataaggttcrggaagaggttgttaccgtgggcaactctggtatgtaaacacgtactatttagacacargctcccctctgctgtacaccagagatgggcttttctgttgactgtacctttgttgccattgtctttttatctttgggatttaatgcaacacatcaayatgaaataaatgagcaactttatattaaattaatctctcccccacctcctgccatatcctgttgtcttcacaaaatgcatacgtaattgacagactctcaaatggtgatatgattatagatctggaagggatttcaaatattatttagtacaacactctgagtccttacttstgagtatctgagttgatatagggcacaggtttcctgatgtcttttcccagaccctctccatytcaccatgctgctgtcctcttgagtgattaaatactgaaacgattacctataaagaaaataccccttctgcagacatggggacagttggcttttgctcctgatataaaatgctaccaacattgtgcatttctgtctgcagagaatgttattccaatgttatttccatttttttccaatgttatttccatttttttttctgactatacaggttaaaagcttctatagaggttaaaagatcattaactcttctttgtagcacctgggaaatccttttaaatcaatagcgtgccacctggctgctcaatttgcagcagctgaaaattcaccaaggcacatgagataggggataatcaaaaccgtgaatccccaatcttccaacaggagagttctctactccacaccaacagagagtgctaagtcctgtctatgccaagtgacagattttattcctaaggccagttgtttaattttagccccttccctcatctgatagaagactgtgctactttacatgtataaattcctgtgaattaagcagttgagcatttggctggagagaggttgggaggagattattttgtgtttgttgtattacatatccacagtaatgcttatctttgccttttgtggttttactagtagaatgccacgtgaacagaattttcaagagcaaaaaggtctttgtgcttttctaagtcattttttttttttttttttaaagattccatctctttaactttagttaggatggaatttgaactcctggctcttttgagtatagaaacccctagtaacaatttaagttccttccatttttcttttaaactccttattcccagcagcagtattctacattctaaccaggttctcccagctttgagacgtctcagacttaccagttctccaaaacgctattttctttaagggtgacaccttttaaaaattaggcacctcaaayatctactgcttttgagcttttgagttttgcactgtaaaaagaaaaatacacagtgggattttaagtcaaattagtttatctaatttttagggaataatttgaagcatgctttgtttgcatagatttttttaaaataagcttttccaaatcataaagagataagatcttaggtaacatgaagagactcccttacttattcctaaatmatctatattccaagggcattttcttatttggaacagttgacctcactgataaagctgtctcaccactataataacaatgtccaaaatctaggctttctgcactattatgcaaaaattacaataataaaagtgaaaattacattataatggtatattaaaatgctaagacttttgcattataagcaaaagacagcctttaataattattctttatttagtgaacattttctaagtcttggaaaagggtcaatgttttgaattcatggccttatataatcttcacaagattccccaggaggtatagatatttttattattacgctagtattgcagatgagggaagcaaggcagagtggtattaaatagctggcccaaggtcactcaggtaccaatggagaggcatcattagtctttgcatcccactaaagttctccactagcttcaattgcctcaagatctgttccatgttctatgaagtagtttcaacagaaatggcaattatcttagaagcaakggaaaaataaaagatgggcttcctgtcgggtgcctgtgacaggtgtcacatctaaccatggttttttagagcagttaatgccttgatagaacagatgaatgcctcttaatcctcctggaattcttgttttagattaagtcattgtatacagtcattcgattttcttcttatggtccaaatcgattaataagatgtctctttttgctttttcttccttttcttcatagtcaacgaaggcttgaaccaacctacggatgactcgtgctttgacccctacacagtttcccattatgccgttggagatgagtgggaacgaatgtctgaatcaggctttaaactgttgtgccagtgcttaggctttggaagtggtcatttcagatgtgattcatctagtgagtagttgctttgtccatccacttccrtgtttgtctcctcaagttccatgcatgcactcatgtgccaaggaagcatgtttggaagacacaggttcttccaaacatgaagcaaacaagagaatactgtttgactcgaagtaatattttgcatcatagaaaaatgatgggaaattttacttgttggacattgcttcatttcaagggttgtatgccaatacaactattaattacacataagattatggtgctaatttgatttttgaaattttctgtgaaaacaaatkgataaagacttttggaaccaggtctatttaagagtattagagacacagaaaaacctcaaatctcttttaatcttcagtgttgaatgagatcagaggtgaacatttagactcaaaaacagcctccttcaacataaaccaaacatgcacatatcatagtacccatgcacacacttttgcrtcacacacatagyccaggtagcttgaacgttgctagaaatatgaaagaaaaaacagataatctgcttttagatcattaaaaatcaacttgaattgataaatgtttgattttcaaattctaatacgttttaattttcaaattttttaagttaaaatgtgcctaggaaatatctattatgctttgagattaggattagaatttataaacctttcatttattctttgtgtttaggagatgtgatgattattgacaattggttcatttttataggtgttgaccgttatgcctataaataagcctcctatagacatacagaaatcatatcctgtggaattagaatataagacttggtaaaagagattttcaaagtattttacttaacttgtatacttgaaatcatttaatccagactgaagttgtaaaagccagccagtgttttcaatatagacttccatgtttgaccatctgaaaatgaaaaacactaaaaacatcacatgctgtttaggagctggaaattttaatatttgacttcaagtagatggtttttaactcctgaaatcgaactacgtttaagtttgtatgtttattacctgtttgagcacttaggtgcaattgtgggagcggggatgtcaagttcatttatgtgactctttggctcaacttacataatctttgttttgatatcacagttgtctaattattttactttgtagcttaaggcaggctgaattgttgataaaatggaaaaagtagtatattgttatataagcttctgaggtgtgttttgttgtataagccctggaggttaaaaagtcatcccttatgtatagtagttaaaggcataaaactgtgacttttagatattccacagaaccagacttatttgatgtggataataaccaatgatttagcattttgtttgcttttgttttattttatccgggttcattttttactcttcccatgtacatgaaacaggtggtggcgtgtagagatcagctgatccttgttttatggttaattgaactactttgtatccagggtttctgcaaatccaaaagtgatttttcatctaggatctattcctaacagtctactccaatcccactttagttttccacaattttaaatcttaatagtgagaattcaaatgaaagtcatttcatttgactattctgatgacatgattgtggcagaataaattgggtcttaaaatgccctagaaaatggtaaatgataaaaaataatattttaaaattcaaccaaagaaatggcccattggccaggtgtggtggctcacacctgtaatcccagcacttttggaggctgaggcgggtggatcacctgagctcacgagtttgagaccagcctacccaacatggtaaaaccccatctctacaaaaaatacaaaaaaaaaaaaaaaaaaaaaaatagcactgtggggagtgcctgtaatcccagctactcaggaggctgaggcaggataactgcatraacccaggagatggaggttacagtgagccgagattgcaccacttcactccagtctgggcgacagagaaagactttgtctcaaaaaaaaaaawaaataaaaagtaaataaataaataaaataaatggcccattataggggtttttatctttaacttgctatttttccagatcatggttctgaagaccctgtgacacgtcccagttcacctactgtcttgtgagtcagaatatacaaataactttttggtcctgactttccccacccctacaggatggtgccatgacaatggtgtgaactacaagattggagagaagtgggaccgtcagggagaaaatggccagatgatgagctgcacatgtcttgggaacggaaaaggagaattcaagtgtgaccctcgtatgtcatcasagatcatttttagtgccttattaagcattctcactttcattatcaggctgtaactctcattcacagaaatgattggagactttaggtctccttgaggagtgaacagtgggtttcttaatcttttgatttgggaargtggagacaagcttcaaaaatgagtcatgatttaatgttattacaggrcactttagcacttgtccaacctgagtattttgaccattatctgcagtaaaatgctacaaagaagctttattggtctgtagattcaacttttaaaatatgatttccatcttcccgttggaccctttccagtgtattaggtctaatttttggaagtgccaccctaagatctgtatagcagtactrctcttagggatgattcacataaatatgtggtgtttgcgctgtgatgatacaaatttaggacagaaatagaacccacccctagatcaagtctgcagtattgttctcagcttatgcgtgcatctgtcttgtgtctatatgcagatgaggcaacgtgttaygatgatgggaagacataccacgtaggagaacagtggcagaaggaatatctcggtgccatttgctcctgcacatgctttggaggccagcgggtaagactggatgtgccaggctccctacaagttagataagataaagggtgggctcctgcaaggatgtgtcgtacacacaggaggggcagagacccttcggaagtattaaaataccacatttcctgttggcatacaactgctgacatagagctctagagcagctctatgtctaccttacatgccattcattctttctattactcttagtagaaagaatgaatgaatggcatgtagagtaccaaaaacacaagtcttgagtcattcttaatagcaacacctgtcatttatatgatgttagaatcattttcctaagctccctagcatgtcagagatactatttacactgaaaaatagtgaagcagagatactattcaaattaattagtggtaaatagaatgtgtttcatttcagccggttctccccatcctgggcagcctgagaccctcccctcccctactattctcaggctgcttctatttttcagcaaagtgttaagtgcagtgtagctctaggcctccaactccattctgatggacaggtgtccccatggcaacgttgttaaatattttgaataatatctcagatgtaagaaaatgccacttcttttaacctctctcttgattcagaacagatgcttgttataggtctagcactgtgctaagtagtataggaaaaacagaggaaatgagaaatggcttggctcttaatgatatagttgaagatgttaaattagcatacatttcaaagtcaagctaattaagttctaagtgggtctgacaaatacagttctgggtaggctggaattagcaagaaagagaagcatgaactggctgaggtttacgatgactaaggtttagttgggaggggagaaagcagagagacacaccccctgggatagaaaggagctggcccaggtgggctttggtgagccaaccctctgcctgctgtcttctggtaagaaaatagatgggaagaagtggcttatggagggccttggcaacccattatttaagccagtacttctcaaccatttctaaaatatgcccagtataacaaaaaataataagcctttctctaatatgatttcaaatttcaaaatgaaattatgtgtaactcaaataaaagcaatggaatgtgacagccctttgttttcaacgaagacatgccctcccagcaactccccaaatcctggtgggtgaggggcatgcttcacactcaagggtgagactcattggttaatgccaaatgcattaaccaattacaggtatccaagatgcaaagaaacatgatggaaaatagtctttgggaaaattaatctggcagcaggggtgttcaggggcctgtcttggctccaccaggggcagcccatggaaactactatgatcttgtttcacccccagtgattacatggggagggaggtgctcccaattctgatggaggagaattggagattggaatttagattgaattcagtatctctctctgtctctctctctctctctctcccattaacacttacaacgactgtgattgtatgaccttagaactcagtcattctggtatgaaattgtgtgatggagaatgaatttgctgggaagttgattttggtctcacttcagcatcttctcattatttatgcacatgaaacctttcatgtgcgacacttattctattctcaagtgctaaatgaaacatttaagacaggagtggaaactgttcactttctcatatgaaagcaagattcagtgattctgtaaggaggtagtcactggtattgtgttaggtattaaggggcatatgtgcttaaacagagaaatatgtctaaaatatttaaattctaatataaaaaagaaagtgactgtattatttagggctgcattttagttgtaagaaaaaagtccaactcaagcaaaaatggcccacacaatggaacagtcccaggacccaccggcttcaggggctgctccagcaatggcgcccggactccctcttgctccgcgtgccttcccatgcactggcttcgtgcttcagcggggtctctgctgatggtgccattgatgactgacctccatgagcttgctttaccccctgccagcttaagaacagtagtgaaagagaacatgtgtgtcctcccatttccagtaaaaacttcaggcaggagcctcactggctcagcttggtcccgtttccatctcccatgccatctccggccaggtgacaggctaccatgtcactgcctagggaagtttaggaagagagtggcaaagtggtgcattagaaagaacatggccaggtcaccccacctcctgggcggcaggcccaactccaccagtggtccactgtgtgacttccctgctccctctaagcaagtcactcctctcctctgggtctctgtttccttacctataaaatgagaacrtttcttcatgtgatctcaagtcccttttaaaatcgctaggattctttgaaaaccttttctatcatctagtgcagagaacttgttgaggaagttgggattggaatgagcctcagcagatgggcaaggtttgaataggaagagaagagacatttcaggagaaagaaacaacatagagagmcagatgtaggtataagatatggtaataagccaaaatgtattaagagttataaatgcatgaaatcatcatcaaagcttgcttagtgattaactgcttatattttgccagtgcatatgatgtgacatttttctttaactcaaacactaaattacgatgtcctcaggttatcataaaccccatttgacttcatgcctctactctctcagggctggcgctgtgacaactgccgcagacctgggggtgaacccagtcccgaaggcactactggccagtcctacaaccagtattctcagagataccatcagagaacaaacactgtaagtgcattagcagcacaagtgtgttccctcatactagacagtctctktctacaggtatstttcttcagaatgaaccaagtgttttaattaattaaaaaaaaaaacaactcataaatgacttaagtgaaacactgtattccataatatagtttaagttataatttatgtaactcttgaacatctcctattgcccagtatgctgctaggttcttgaaactaggaagaaatattatcctatctataagcagctgtcatgagtccccacctccccgcatttttttttctgtacactttacagtatttgccactaatttttttttccttcttcctttttaacagaatgttaattgcccaattgagtgcttcatgcctttagatgtacaggctgacagagaagattcccgagagtaaatcatctttccaatccagaggaacaagcatgtctctctgccaagatccatctaaactggagtgatgttagcagacccagcttagagttcttctttctttcttaagccctttgctctggaggaagttctcyagcttcagctcaactcacagcttctccaagcatcaccctgggagtttcctgagggttttctcataaatgagggctgcacattgcctgttctgcttcgaagtattcaataccgctcagtattttaaatgaagtgattctaagatttggtttgggatcaataggaaagcatatgcagccaaccaagatgcaaatgttttgaaatgatatgaccaaaattttaagtaggaaagtcacccaaacacttctgctttcacttaagtgtctggcccgcaatactgtaggaacaagcatgatcttgttactgtgatattttaaatatccacagtactcactttttccaaatgatcctagtaattgcctagaaatatctttctcttacctgttatttatcaatttttcccagtatttttatacggaaaaarttgtattgaaaacacttagtatgcagttgataagaggaatttggtataattatggtgggtgattattttttatactgtatgtgccaaagctttactactgtggaaagacaactgttttaataaaagatttacattccacaacttgaagttcatctatttgatataagacaccttcgggggaaataattcctgtgaatattctttttcaattcagcaaacatttgaaaatctatgatgtgcaagtctaattgttgatttcagtacaagattttctaaatcagttgctacaaaaactgattggtttttgtcacttcatctcttcactaatggagatagctttacactttctgctttaatagatttaagtggaccccaatatttattaaaattgctagtttaccgttcagaagtataatagaaataatctttagttgctcttttctaaccattgtaattcttcccttcttccctccacctttccttcattgaataaacctctgttcaaagagattgcctgcaagggaaataaaaatgactaagatattaaaagtatttgaatagtataatatggaggagttttatcttagggaaaccccatggtatgataacccccatctaacatgtcttactttgggtcagctgacacttttggcatggcttgataaactcccagctaaacagtttgtttactcctgatctgtaaaggtcatttctttttcaatttaacattgaggaaacaaactttgggattaaatttgacattcaggccaggcgcagtggctcacacctctaatcccagcactttgggaggctgaggcaggtggatcacctgaggtcaggagtttgagaccagcctggccaacatggcgaaaccttgtctctattaaaaatacaaatgttaccaggcatggcagtgggcgcctttggtcccggcttctcagaaggctgaggtaggagaatggcttgaacccagaaggcggaggttgcagtgagctgagattgtgccattgaactccagcatgggggacagagcaagactccatcccaaaaaacataaataaataaatgtgacattcagaatagtaaatagtggaaatggaaataattattagtaaaaaattagtagttcataataaacaagacatgcaaagcactttttaaatatactaatgtacaatgaaagaaggtatttcaataaacacctggcaaagaatattaaaactaaatacagaaagatacttcctcatgttcatttgaaaaaaaaaaatactaactcccatttgaattgatttacagtttataaaatgctttgacatttagctatctcatttaggggaggttttagagcttaattttacagggcatgaagctcagatgaggtttccttagcgaaatacagacccagcccctggacttctatttattactgatctttaagctttatcagcccaatagtcaccaagagagctgctctgtatgttttttaaaaatcacagaaagtacaaaataaaggtgatattaaacgactgtctcacatatgtcggtcatcactgcaccctggagagagaacgtcatctcgatgccaatctacacactgtgggaagggacaaccccctgagacacatgtgctgcaaaaagtaagctgatgcttccatattcataggtgagctggtaaagcaggcccttcatctgaatcttgcttaaagccttgatatctaaaaacataaggaaagagcagctttaggttgagactgatgatgcttcaaaccacttgcctaactacaaacctaaaaatatttaccctaaaatgcagtgtaagggccgggaagggtggttcacacctgtaatcccagtactttgaggcgccgaggtgggagggttgcttgagctcgggagttcaaggccagtctgggtaacatagcgagacccctgtctctacaaaaaataaaacaattagccaggcatggtggcacatgcctgtggtccccataactcgggagactgagacaggagaatcgtttgaacccaggaggcggaggttgcagcgagtcaagattgtgctattgcactccagcatgggcgacagagtgagacttcgtctcaaaaataaaaaatttaaaaaatgcagtttaggcaaatacagttggactgtattaactaaatggatagcaagcccctttacttttatgttgaaatgtaaaaaacctcaagttccccacttaaggtcaggaaaaatgccaccttttccaaaatgtctgttggattctccaaagtgatacattaaatttatgaagtaaacgaatagcaaattaaacacatttacaaggccttttcttttagcatcacaatgcaagaatgatgaaactttcttttgtactgatcatttctcagcaaatagcatagtatagagttttgtcttggggaaaccccattgtatgataaccccaatctaatgtgtcttactttgtgtcagctgacacttttagcatggcttgataagctcccagctaaacagtttgtttactcctgatctcaaacaggagaaccaactatttccaaagatcttttgccgtttttattgattcaggttattgcttcccccgagaattgttttaagcgggcaagattgaaaaggcattactaaaagaaaaatctatatttaggcaagaaatcaacaatgcaagaaaaattaggtaaaactagtaaatgttaatcagactttaaaaagaaatatcatcgttttaaagttttacattgccttgctacacttgatttgtaataaaatgttacattttatattgttttcagctctaataatctaagtgaattatgcaaataagtctgtataataacatcactatacacctgtagggcaccctttctatggaggtgaataaagaaatgatcagggggaaattacaagtacaggaaatgacttttctatttaattatatttccattgaaacttctattccatttctagtggtatgaaactcattaaagtgattaagaaacatcacatcagcacatttaagtgctcaaattgcttcctatttagtaagttcccattactgtgatagggaatgtggcaggttacaattaaaaaatcccattttcaagggagacaattcaactcttaagaaaaaaaaaaaaagaccgctgttgggacttcccatgtttggaaacatttaaagattaccattaaggctgataaagcagaagaaacacaaagatgaccttgcagaaactaaggaagttttttcaaaatacttgaaatgcacgttgttttcattatcacatcgtctcactccatatcctcattaaaataaaagattcaacttgaattgcaaacagaaacctatataaattacaaatgaagaaaagatgtaataaaagagcaagagaaacagggcttcagccgaaagtcccaaatgggaaattccttttttaacattcctcagtagagtcaggtatgagatattaaagcatgttttacatttccttgaattcctttttacttactctttagagacatacaggttttaacaatctcaggagccaaatttatctctaaaacagctcatgtggagcccccaaaggattgaaactagcattggttgaagctgtacgaggcagccagcccagaatgatggactggggctggcgtcaagtgccctgaagctacccagcagagcaggctcccttaggcaagatacatcaaaggccaaggagtctcccattgggccctttgcaacttggtactttgtaaatggccatttcattctagaatgaagcactgcctttgccaggagactgctggacaagactttacaatgaaacatgcccatctctgtaattcagcttcagatgtaagatgctgagccaagtgctggaaagctatttttgactcaaaaatgtacggcgatggtggagcaactggaaccctcattcatcgctggtggaaatgtaaaacggtgcggctgctgtgggaaacagcctggcagctcttcaaaacgttaaacagttaccatacgacttcacagttccattcctagatatatactcgagagaacagaaaacatatgttcacacaaaaacttgcacacagatgttcatagcagcatcattcatagtagccaaacacggaaacaacccaatgtccatcgactaatgaatggatcaacagaatgtggtatatccatataatgaaatatctgaccataaaaggaatgtacatgctgcaatataaacctttaaaatattatgctaagttgaagccagacacgaaagagcacatattatgtgatccaatttaggcaaaatgtccagaatgggcaaatccatagaaacaaaaggtagatttatggttgccaggggctggggcgaaggggaaatggacagtgatggctaagagttaacttttggggtgatgaaaattttatggaactagataatggtgattgttgcacaattgtgtgaatatactgaaaactgctgaacaatacgctttaaaatggttaagatggtgaattttacgttacataaattttatcttaaaaaatgccacttcagttatagaaaatctaatttttgctccttcatgaggaagagatgtggggtaagagtagatgaaggctgaaggaactcagaaactttgtggctaccaatttggaacctgaaacaaaattatccataaatagacatcatttttcatagtaatttccataggttatcttccactagttcctatgcttccatatacacaaaagcattatgaaaagaataatcagcatctttttgaaacagtatttatcgtgactcaggtggtattttaagtgcccgcaatattttgtctcatttgctcttcagagcaactctaagacgtcagtattgttctcatctcattctacaaattgaaagtgcgggaaaggcaatgtgaatcactaaacatcacatagcttgtaagtaggagaactgggactcgaacctgatagactagcaccagaatatgtgctttcagccagaagctattcagccttttggaggagtgaatccatccccattttacagaagaatcaaactccaagagggttaagctatgtgcccaagattgcccacctactgactggcaaaacaaggtactgattatcctaagaggcacaaagacaatttcctcgagggaaagatggagccgtaatcaagcacaggaatgtgggggccttctagcaaaatctccttcttgacctggttggtggtgacacaggtgtttgcataaaaattatactttaaatggtaaaagtttcatgcacttttctatatgcctacttcattacaatttcttttaaagataaatttgtgcctggcacagtgtttggcaaaaataaggtataaaaatgtccatgaatggaaagcactgcgagcttaaagacctgcagggttctgtgctctgaggaagggacataggctgggctttagaaaggtggcctggagagaagcaggtgtcaaagggcaaggcaacgggaggaagaatggaggatccctttcatggactgttttctccctgtgcccaggggatcccccaatagaaatacactcagtattggtcaggacgttgttacattatggatcttctgtccttctgctggaaacaacagacataagatcattatgcatttcacttaaacaccagtgaaactccactcttgacgtttcgaatgattgaattatactagacatatatatgttaatggggttccagtgccagaccctcccaaagtgctcaacttccttggttactggctacctccaccaagattaacttgagtacatataaaggaaaacaccacctcacagagcaaaatatgaggaacccaggagtaagcttgcatgtgaggggtggcactttggcttaaggcaggacaccgctttttttggcataacacagggaagtgagacagtaaaatgagaaaggagctgttgacagccctaaactgagtcgttttccagagtgaagaatggttgctcttattgcttgggtgctcctccccggggttcattcaatcctgtccttcatgaaccccttggggctggcgaggagtgcatcagctgggctgtctcaagcacacgctgctgggtagccaatgttagtcagggaaaatgagctcacaggccaacataccacaacacttgagtaaagagactttaaaagaatagtaacatactagattacagatcctaacagaagtagaaatagtaaaacaaagctagaaagatgataccaacaattggaaaagaaaaccagaaatatttgaagggaaaaataaaactcctgaaataaag

SEQ ID NO: 8723 - DNA, 21747 bp, Homo sapiens
tggaggagatatttagcacaaaagaacataagatttatttttacaatcaaaaagcagtcccaaatggaataattagtctcaggaggcagattattttctttatttatttattttgagacagggttttgctctgttgcccaggctggagtgcagtagcatgctcacggctcactgcagccttgacctcccaggctcaagtgattctcccgccttggcctcctgaagagctgggactacaggtatgcaccaccatgcctggctaatttgtgtgtgtgtgtgtgtgtgtgtgtgtgtgtgtgcacatgttttttttttttttttttttgagacagtctccctctgtcactcaggctgaagtgcagtagcatgattttcactcactgcaacctcacctcccaggttcatgtgattcttgtgtctcagcttcccgagtagctgggactaccagcacaagccatcatgcctggctaatttttgtactttcagtagagatggggttttatcattttggccaggctggtctccaactcctgacttcaagtgatccacccaccttggcctcccaaagggatgggattataggcgtgagccaccatgcctggccagatttatttttttaaacaaatttatacaaagattctactgcagaccaggtcttgtgatagattccaggaggaggtgggtgggtggaaaaacagaagagaataacattgataccctttgcttgtcttcaagatcaggggttggcgaactctagaccatggcctggtcttgcatggccagtgagctaagaagggtttcacataaaaattgttaaaaataagcaagcaagcaaacaaaaaagaaagaagaatatgcaacaaagacttatgtggccataaagtctattgtatttgttatctggtcctttacagaaaaaaggttgctgatgcttgtccaagatgagcaaatgaggaaattagacatataaggaaataactagctctgaactatatattaaaaagggttattattattattataattttttttttgggacgragtcttgctctgtcactcaggctggagtgcagtggtgtaatcttggctcactgcaacctctgcctcccaggttcaagcaattctcctgcttcagcctctgagtagctgggactacaggcgtgtgccaccactcctggataatttttatattttttgtagagatggggttttgccatattgcccaggctggtcttgaactcctgaactcaagtgaatctactcaccttggcctcccaaagtgctgggattacaggtgtgagccaccacgcctggcctggtctttgatttttaaagttagtctgaaataaatatacaaggaagaataaaaaataaactttttttttttctgtggcccaggctggagtttggtggcacaatcattactcactgccacctaaaccttctgggctcaagtgatcttcctgcctcagtctcttgagtagttgggcctacaggtgcaaatctccacacctggctaattttttttttttttagagacagggtttcactatgctgcccaggctgttctggaactcctgggctcaagtcatcctcctacctcagcttctcaaagtgctgggattacagttgtgagccactgcgcctggcccaaagaaacacttaataaggttttgcatttgataaacaactattttatatgtacgtgtaaatgtaggcattagccttcttggaatcacaatatgttgttaagctgtaataatttaaacgacatagtactcgtacaaaaatagatgaatcgaccctaagtaagaactcatttaatgcctactaaaggcactaattgtgatgaaaggcggggtggagtggctcatccctgtaatcccagcactttgggaggctgaggtgggtgggtcacctgaggtcaggagtttgaggtcagcctgaccaaaatagtgaaaccctgtctctactaaaaatacaaaattagccaggcgtggtggcacatacctgtaatcccagctacttgggaggctgaggcaggagaatcgcttgaacctgggaagcagaggttgcagtgagcggagatcgttacattgcactctagtgcgggcaaccagagcgaaactccatctcaaaaaaaaaaaaaattatgatggaaaacaatccataaacaatgttgggaaaaaaaaatttgcaagatgaagaaagatcaatttagatgttcacctcagatttacatgaaaattaatgccagaggtattaaaaatgaaatttaaaatatccagaattggccgggcttggtggctcatgcctgtaatgccagcactttgggaggctgaggcaggtggatcatgaggtcaggagttcaagaccagcctggccaacatagtgaaaccccgtctctactaaaaatacaaaaattagctgggcatggtggtgcgtgcctgtagtcctagctactcaggaggctgaggcaggagaatcgtttgaactcgggaggtggaggtagcagtaagccaagatcatgccactgcactccagcttgggcaacagagtgagactttgtcttaaaaaaaaaatccagaatttacaaagaaaggtactaagtggataataaacatttatgaatatgtaatggaagcctcaggtcccctttcttccagctacgttttcattgccattcccagtagttctggtactgcgggaaaaatctactgtagaaaattacccaattcaactgaagagtgccaaggagacctatttttctcctgtgtgtttctgcatttcagccagttcctgggctctcatctattccttatcatccatctgtttggggmtgccattgtttttgtctggtttcctttgtcctgttgttctttcccaaacaggacaccacatctcttccttttttcctccaaagcattggtaaacaccaagctgttgcatgcattctaacttttattgagtatttgatggtggaaacatggcttagagtaattacaacaaaggggagaaaactgtaaaattttgcattggccattttcattcctaaaatttttttggattggaggaagcgttcatgtgtgttttttagtaccacctggagtcaatttctttcattcaactaatgcatattgaaggcccactgtgtgccaggcattgtgcataggcctggacatctggtggacaaccacagacatagattctgtctctataaagaaggagacaggtattaagcaaatacctatataaatactcaaataaaaaaattcaaaagtttcaggagaaggagcttacaaaatctttccaataatagtatcttagtattcagagacaaaggtccatcagagtagtatgacatcttccaggtttgtcctctatcctcgtctccttagattcctgtctgagtccaagagagagacagactgcaagagacactgaaagaacagtgtcactgaggtcactgagacacctggagacatgtcctggtctggtgcccatcatgggagcagtgaggcgtttcccttctccagcaccctatgaggtggatgacttccatgccttgaatagcaagagatgtgccggaggcctgggagtgagaggaagcagtgccttaaacaccagcagcttgtcccgacaccagatccagcatcagaggcagcagggatgccaaatcatacggttggtgttcagctgtggtgtgtgcctactgtggtttcagtaggcagtgctgaaagaagtcagggtgggctgggagtatgtgtggaatggagaaatgtttgttagcacacacaagatgccccttgggattatggacttaaaaggggaccagaagtctccttacaatgggagggcatgaaagccagagaaattcctgtctcattaatgctaactcaccatgacccctgggctgatgatactctagggaagtatcagttatgttaaaaagagttaacaggctggctcggtggttcacgcccgtaatcctagcacttgggcaagctgaggcaggaggatcaaggtcaggagttctggagtagcctgggtaacatggggagaccccgtttctacagaaaagagttttttttgttttttgttttttttgagatggagtttcactcttgttgcccaggctggagtgcaatggtgtgatctcggctcactgcaacctccgcctcctggattcaggtgattctcctgcctcagcctcctgagtagctgggattacaggcatgcaccaccacgaccggctaattttgtatttttagtagagaccgggtttctccatgttggtcaggctggtctcgatcttttgacctcagatgatccacccacctcggcctcccaaagtgctgggattacaggcgtgagccactgcgcccagcccaaaaaaagagtttttaataatatgatgttgataattgtactgtggttatacatgacatattcctattattagaaaacacacagttggccaggcatggtggcttacacctataatcccagcacttgggaggccgaggcaggtggatcacgaggtcacgagttcaagaccagcctggccaagatggcaaaaccccgtatctactaaaaatacaaaaattagctgggcgtggtggtgggtgcctgtaatcccagttactcgggaggctgagacaggagaatcacttgaacctgggaggcgggggttgcagtaagctgagaccatgccattgcactccaacctgggtgacagagtgaggctctgtgtcaaaaaacaaaacaaaataaaaaaaaacccatacacatttatttaaaggtaaaagcccatgatgtatgtaccttaccttcaaatggttcagaaaaaaattttgtgtgtgtgggtgtattttatatacatatatctatatatatatagagagagagagagaacacgaaagataaagcaaatggggtgaaatattaacaatagttgaatctaggtaaagggcatatatgtggctttatattattgttatttttgcaacatttaataaatttcaaattgtttctaaacagagttaataaaacaataaaattacagcaggatacatgcaataattagtgtttggacagtgtatagtgggacaaaggaaggatccatcagctttgtctggtgatgggggtgtcagggaaggcctcatagagaaattggaggaaagattggaaggatgatgtcttcttttcccatttatttattattattattattattattattttgaggtgaagtcttgctctgttgcccaggctggagtgcagtggagcagtcttggctcactgcaacctccacctcctgggttcaagcagttctcctgtctcagcctccagagtagctgggattacgggtgcaygccactgcacccagctaaatttttgtatttttagtagagacagggttgcaccatgttggctggtcttgaactcctgacctcaggtaatccgcccacctcggcctcccaaagcgctatgattataggtgtgagccactgtgcctggccaattattattcttaattaattaatttatttttcatgaggtgtcacctcagtctaaaaggatgatttcttgacagagttgtgtctagggggccagggcatctgggggaggtgggagagggagaacgcaggggaggattgtgacctatccacgaatctgattagatactgctacattgtatggcctgccttggcaaagcaggatgcccctcctcagatggcgacagtcacctgtgtggccaggaacacagctccctgctcctccagccagtcgcacgtcctttctcatttccacggtcccaggctcaggtaccctcagagggaagggcttcagagggaggggctagcagcctaggctgctcagggttgggctgggcagggctcaggtggtttggctctccacagctctccacataaagggaccagcacttcacccttcatcaggatcctctgcaggggagctccgagtgtccacaggaagggaactatcagctcctggcatctgtaaggatgctgtccatgctggtgagaaaaatgtttttgatccatgtgtgtgggagcaatgatgccagctcaggtctcagttttagagatttagagtttcagggaaatgagyccatggccccttgggtatttgtagtgttggacagccgtggggcatattccaggaggttttagaatgctcatgagcccatcactttccatttgaggattcctgactcagaaaggttaggaagtaagaacgagaggatgacaaaggaagggccagccagtgaccttgtgcatcttgtttttccttagaggacaatgaccagactctgcttcctgttattcttctctgtggccaccagtgggtgcagtgcaggtaaatggcttctgagagtaggagctgcagtttcctgggctcccctctgctgtgcagggcctggagggagtagagctgggcagggctctgaagtcaagggtcaaaggggaagttctggagaggcagggaacccaggctaggcagccaacttgaggtgtggactgggtgctgatttctggcctctcctggggtctggtctgaagcagtcagggtgttagctcaggtatttcctagggcttgattctctgcttctgtggctgtgaggggttcatggggtgagagagtaagaactgtgtccctgctcagctgctcttgtggccttggccttgggatctccagaggcagctgggtgatcagtgctgtgtccagggtacaccctcctctagtcgcagaggaggatattgtgagaatagaatcctcacaattctattcttccagtaggcacaatagtgatattttttcattgatactgggtttattgtttatttcaatccatcagttaaaaaaagcacatttacatatgtcatctcatttgatctccatgcgtataaagaagttattaatgacatcttaaagatgaagaaaaaggatcagagatgttaagtgtctgctcaaggaggcactgtcatcagggtttgtctggattttaccttgagtcctgtaatttttttttttttagacggagtcttgctctgttgcccaggttggagtgcggtggcgtgatgtcggctcactgcaacctccgtctcctgggttaaagagcttctcctgcctcagcctccccagtagctgggattacaggtgtgcaccaccacaccccagctaatttttgtatttttagtagagatggggtttcaccatattgaccaggctgttcttgaactcctgatcttgtgatccaccctcctcggcctccgaaagtgctgggattaccggcatgagccactgtgcctggcctgagtcctgtaattttacactttttcccgctctgccaggcttttggaatgatttctaggcttttagacttatatacatggcccttcatccactggcctctgttaatttttcagctttggtttccagacttctttgtattacaacatatgttccagccacaataagcgactgacctgtagtttttggcaggctgggctgggctgggctctgttattgcttcaggccatctcatgtgctttcttctcttcctggggtgtactctcccctttccttcctgtcctgtagccagctcccattctcccatcaaaatcagcctgctctgagttacagctggtcycttccccagcagttcccaggcctcacccccgttagtgggtttgccctcccatctcagttgggtccctttccatgtgctccttccttgtagaatgtagtctcttgaagaaatgtgtcaaattgtctttgtccrgygtctaggtagttcacacagtaggtatttaattaaaattagtcgagtggaagattccaggtgtttaacctataccagctgttggatcagaccgtcttagcatagggaatccctgacctcctgggacttcagagcagagtgatragttgatacargggcagagattggccaggaaagatggcctcagtggtcagacttctaatgagactcattctcacattttctagcagcagcctcttctcttgagatgctctcgagggaattcgaaacctgtgccttctccttttcttccctgcctagaagctgcaaagaaatcaaggaacgctgccatagtgcaggtggtgagtaatgaaccaactcagcattctctctttgaagccactttttagctcaacagagcccagtcatggaaatcaggagggacatatccatatggagcctgttctgcccccagctcctactcaaggaggtttctagtgggaattttgaggcttttgtgtcccattccagtcacaaagtcttctgaacacagagagaatgcagtgttcctggtgaygcttatggtggtggcaagaactgtgatgcgtctgagatttgcccctacttgccccaggtttatagatgctggcagaaaacctgaaactcccgagccagagacaaagagctttattaatcacagaaatagcagtagccagagcatcagcattttcttgtactgggccaggtgacatctgcccaagtagtgggtttgtcaagctggctgacaaatgtggctggcaaggaaacaacaaaccctttttagagccagagagtttattactcacatagctagcaagttcaagatcggcaaaagtgtcagcttttcccatcccttgccccacaagacagcacagaaaagagggcgagtgacaacacaacatgggcagtggctgaggagccagtccatgctgccatagctgtttcatagcctgtgtaccctacggggtgggggtgagtgaggcaaaaagcctcatacctcttcagaacccaggagatgatgacacagttatgacagctgtctcatgacagcctccacgaaagatgggaaggggggtgagaagtgaccttgttgcagctcctcacaaggttcccatctttccatgtttggggaagaccacaggctttctgccaagacttaggtcagctgtccctatgtggcctatgcgcaaatgtgcaaggtcaccaggatgccaccgtggagccagtctcctgcaagcttgtgaacaggaggggaactctgagcttagggaagctgaatcttatgaagtgggcacaacctttgctctgagctgcacagaggccctatcctgctgtagaatcagatgtggcgtgtgctgatttctggcctctcstggccacagggtggcactgtcgagagggagataccatctctgtctcttctaagactatttgctctacaaactctttgaaaagatagtgtgaagccaagacagtcagtgcctctgctcataggtgagcagmacacaagatgcrtggagcatcrtcttccagcaagtatgtgttgragtcttctgagtgtgcttttgacttcctagggcttttctattcacggagctgagatgaaccctgagctctcagacagggaggctctgggctggttctctctacagatggcctgtattttctccgcaccaagaatggtgttgtctaccagaccttctgtgacatgacttctgggggtggcggctggaccctggtggccagcgtgcacgagaatgacatgcrtgggaagtgcacggtgggtgatcgctggtccagtcagcagggcaacaaagcagactacccagagggggatggcaactgggccaactacaacacctttggatctgcagaggcggccacgagcgatgactacaaggttggtgccacttctctccyactygggtgagggtgaggtgtggagtgtggctggccaccagcctgcaggagggagggctggaaggtggggatatggggaagggctggagaagaagagagaaatacaggacttgaatcacaacttcctctcaacaaggctgttagggccctgggtggtggtgggatcatcagctgggagtggggtgtctgagcgtggctggccatctgcctactgatcccagagctctcagcccagctgaggctgcacatgtggaccttctgcctcctggtacctcctggcccagtcaggctcagtgtctgttgctttccagaaccctggctactacgacatccaggccaaggacctgggcatctggcatgtgcccaacaagtcccccatgcagcattggagaaacagcgccctgctgaggtaccgcaccaacactggcttcctccagagactgggacataatctgtttggcatctaccaggtacacagggctgctggctggggggcactttctttggtgaacagagatcgaagtgtctagggtagggggcagatctgtcctgtggttccacatcactactgagtggttggctgtttctccttcctttgattcactgtgaactcatgtctggyctctcagaaactctaagccrgcaaggaagaggcctgtgggacaggaaagcatggggagaaagagacagggacaaggggtttggggctgttggggagacacagctatggggaaaagcagtcactattatgaggattggttttgggtaatggcagttaatttgaaacccctcctccccccacactgtggcagcatctctactgtcctcacaaaacctttcttctgggtctctgcagaaatacccagtgaaatacagatcagggaaatgttggaatgacaatggcccagccatacctgtggtctatgactttggtgatgctaagaagactgcatcttattactcaccgtatggtcaacgtgagtgtttgctccctaagtccagtcataaatattttcttgtactcttggagaatggtggcaaataacaacaattaataattgctagtatttactgagcacttaaaatgcaccagactcttgtcttggaacttaacatgattttgtgtcatttaattaccatgagaaaactatgaagttagaattgctgttatccccatttcacagcacgtaatcccaggtttcttcatcaccaccttgtatactcttataattgtggggaaaagaaaaagagatcagactgttactgtgtctatgtagaaagaagtagacataagagactccattttggtctgtgctragaaaaattcttctgccttgagatgctgttaatctgtaaccctacccccaaccctgtgctcacagagacatgtgctgtgttgactcacggtttaatggatttagggctgtgcaggatgtgctttgttaaacaagtgcttgaaggcagcatrcttgttaaaggtcatcaccactctctaatctcaagtacccagggacacaatacactgcggaaggccgcagggacctctgtctaggaaagccaggtattgtccaaggtttctccccatgtgatagcctgagatatggcctcgtgggaagggaaagacctgactgtcccccagccygacacccacaaagggtctgtgctgaggaggattagtaaaagaggaaggcctctttgcagttgagataagaggaaggcatctgtcttctgcttatccctgggcaatggaatgttttggtgtaaaacccgattgtatgttctatttactgagataggagaaaaccaccttagggctggaggtgagacatgctggcggcaatactgctttttaatgcaccgagatgtttatgtatgtgcacgtcaaaagcacagcaccttttcttaaccttgtttatgacacagacatttgttcacatgttttcctgctgaccctctccccactattaccctattgtcctgccacgtccccctctctgagatggtagagataatgatcaataaatactgagggaactcagagactggtgctggtgcgggtcctccttatgctgagcgccagtcccctgggcccacttttctttctctatactttgtcgctgtgtctctttcttttctcagtctctcgttccacccaacgaggaacacccacaggtgtggaggggcaggccaccccttcaataatagttaagaaaaggtgcatacaaaacattagctgggcatgatggcgcatgcctgtaatcccagytcctcgggaggctgaggcaggagaatcgcttgaacctgggaggcggaggttgcggtgagctgagttcacaccactgcactccagcctgggcaacaagagcgaaaccctgtcaaaaaaaaaaaaaaaaaagtgcacactgaggttcacaggaaagaaccactagcagagtggtgagagagatttacttttgttatgaaggataactttaattatcttacaaaagacagttttcagtataataagagcacagaagttaagttgtggataaaaaaatcaaagacatcactgtttgcctttgatattttgatgaaagcaggtgatggtcagggaaactaacccatggtaattggatgagaagtgtgtaaacagcaataggcagccacatctgatcattgcttattcctgctgggccttctcagatctttttggtaatctttttgtagagtctagtttctcctgtaagctgtaagcagacctgggtccttttgtgagtcccagcctttgtcctcttgccccctatgaacagaggtttccttggggacaagtttaggactgacgtgcaccagccactggccataaaggtactgggctgcacccctacagcctggggtgtttggctgtagcctcagcttttggcttagggartccctggactggccaatgggatgctgcttctagttcatcctttgactacttggctgtttcttcacctcttctttttcaggggaatttgttgcaggattcgttcagttccgggtgtttaataacgagagagcagccaacgccctttgtgctgggataaaagttactggctgtaacactgagcatgtgagtttttggggagatcaatggcccacgtgtggggaaaagaaagagagatcagattgttactgtgtctatgtagaaaaggaagacataagaaactccattttaatctgtactaagaaaaattgtttctgctttgagatgctgttaacctgtaactttagccccaactctgtgctcacagaaacatgtgctgtaatgaatcaaagtttaatggatttagggctgtgcaggatgtgccttgttaacaatatgtttgcaggcagtatgcttggtaaaagtcatcgccattctccattcttgataaaccagggacacaatgcactgcggaaagccgcagggacctctgcccaagaaagcctgggtattgtccaaggttttcccccactgagacagcctgagatatggcctcatgggaraggaaagaccttaccatcccccagcctgacacccgtaaagggtctgtgctgaggaggagtagtgaaagaggaaggcttctttgcagttgaggtaagaggaaggcttctgtctcctgctcatccctgggaatggaatgtctgggtgtaaagctgaccactcccattcattctattctgagataggagaaaaccgccctgtggctggaggcgagatatgctggcagcaatactgctctgatactctttgctacactgagatgtttgggtaaagagaaacataaatctagcctatgtgcacatccgggcacagtacctttccttgaacttattcatgatacagattcctttgctcacatgtttccctgctgaccttctccttacctgttgccctgctacactcccctcactaagatagtaaaaataatgatcaataaatactgagggaactcagaggctggcaccggagcaggtcctccgtatactgagtgctggtcccctggtcccactgttctttctctatactttgtctctgtgtcttatttcttttctcagtctctcatcccacctgacgagaaatacccacagatgtggaggggctggcccccttcaccatgtgtgtgcatgggtatgcacatgtgtgtacctgtgtggggtgtatcaatgtgtgtctctgtggttactcgcttactctcattctgtttactctcattactctcctgatgatgtcttatgaatataatttattttttatttctttttttttctttgaagagtccttttctttctttttttttttctttgagacagagtctcgctctgtcaccmaggctggagtgcagtggcgcgatctcagcttactgcaagctccacctcccgggttcatgccattctcctgcctcagcctcccgagttgctgggactacaggggcccaccaccacgccccactaattttttttgtatttttagtagagacggggtttcactatgttagccaggatggtcttgatctcctgacctcgtgatccgcccgtctcggcctcccaaagtgctgggattactggcgtgagccaccacgcccagcctgaagagtccatatttttaataaaaattaagtggtacaaagtttggagtagtagatgccagaagttgagtataatttatttgtcttttaaatcttatgtatttatttatttattttttgagagggagtttcactcttgttgcctgggctagagtgcaatggcaggatctctgctcactgcaacctctgcctcccgggttcaagtgtttctcctgcctcagcctcctgagtagctgggattacaggaatgcaytgccacacccggctaatttttttgtatttttagtagagatgggtttagtagagatgggtttctccatgttctcaaactcctgacctcaggcaatctgcccactttggcatcccaaagtgctgggattacaggcatgagtcaccgtgcccggctgagtataatttattttaatggaattcagtttatcaaacttttcatttatggttagtacttttaatgttttctttaagatgtacctccttacaccgaggtcgtgaaaatattctccaatattaatcttaacttttagaagctttatatttttattgtttttccagtcttgtaggagacagcaccacagttgtagtggtgggagattgtatttgagggacatcctgtgcctaggggttggaggaagagagcgtcagagccatcaagaacaagggcattcacttagggcccccttccctccccaactgacagtctgaactcacggttccatcttccctgccccagctttcagctttttcattttccagctaagatgaggcagctattctctcatggagggactcgcagattagaattcggaggatgacgaccacgtgggcagtgggggtggactagagtatatgtctttatgcccttttccttgacaagtttctctactggctctgtgctcctcagactgtccattagtgcrtgtttgtgtatgttcctgcatgcattactactttaaaatacatgcakagggccaggtgtggtagctcacacctgtaatcctagcactttgggaggccgaggcaggcggataacttgaggtctggagttcgagaccagccttgcgctcactggtgtcagcagcaaatcaaattcctcacagtgtttcttctttctgtttcccagcactgcatcggtggaggagggttcttcccacagggcaaaccccgtcagtgtggggacttctccgcctttgactgggatggatatggaactcacgttaagagcagctgcagtcgggagataacggaggcggctgtactcttgttctatagatgagacagagctctgcggtgtcagggcgagaacccatcttccaaccccggctatttggagacggaaaaactggaattctaacaaggaggagaggagactaaatcacatcaatttgcaactctatgtttctttgaattctttttataaattggctgatgtgttgagggatattttaaaagaatacctatggttctggtgaattccacctcacatattctgggcttgcacagtggctaggaagaacccattgaataaaaataaatgttcacttcagcaacacatatactaaaattggaacaatacagagaagattagcaaaaagatataaaaaaattgaaaaataaaaagacattctgggccagggatggtggctcatgcctgtaatcccagcactttgggaggccgaggcaggtggattgcctgaggtcaggagtttgagaccagcttgggcaacatggcaaaacttcatctttacaagaagtacaaaaattagctaggaagtaatgcgtgcctgtagtcccagctcctcaggaggctgaggtggaaggttggcttgagccagggaggcagaggttgcagtgagccaagatctcgccattgcactccaccctgggtgacagagcaaaactttacccaaaaaaaaaaaaaaaaaaagaaaagaaaagaaaaataaagacaaagacattctgggtttggaatttcaagtctcatctgtcccagaacacaagtatgttcctgtttttaggagatccctgaactggatttaaggacaagagaaaatatttcatgttagttcttcctaatgcacctttattagctaattaaattaagccttcaatataaacatattaaagaagagaaacaggagatagcacaatcacccatttcttttattcttccagctttagcagacagggtagtctctccagaggtgcatgtgcctggccacatctggaatcccaactctagttgcttactaaaaaggagagatggccaggtgtggtggctcacacctgtaatcccagcactttgggaggccgaggcaggcgaatcacaaggtcaggagtttgagaccagactagccaatatggtgaaactccatctctactacaaatacaaaaattagccaggtgtggtggtgtgcacctgtagtcccaggtactcaggaggctgaggcaggagaatcgcttgaacccagtaggtgggggttgcagtgagccaagattgcaccactgcactccagcctgggtgacagagcgagactacatctcaaaaaaaaaaaaaaaaaaaaagagagccaggcattccaatcaggtctcaaacaggatgttgactacagcagtcctggctggtgaagagggcttggacgtcttatagtttttttgctccaggctgggtgcggtggctcatgcctgtaatcccagcactttgggaggtcgaggcgggtggatcacgaggtcaagagatcgagaacatcctggccaacatggtgaaaccccgtctgtactaaaaatacaaaaattagctgggtgtggtggtgggtgcctgtcatcccagctactcgggaggctgaggtaggagaatcacttgaaccccagaggcggaggttgcagtgagctgagatcatgccactgcactccagcctgggcaacagagtgagactgcgtctcaaacaaaacaacacaacacaaaacaaacaaacaaaaagtgctttgctccaaatgcaaatctaatcataacatttcccaaacccattaccacactttttctccattgctccctgtggactagagcattggttttcaaatgggatgggaggtaggagatgtagtggtgattttacctctcagatagggtttttcacctctcagatagggttgccagatttagcaaataaagatatggaaggccaacttaaatttgcatttcagataaacaatcgataatatttttagtatgtttgtcccatgcaatattttacctggcaaccctacatctagggaacatttggcaatgtctggagacaccgcaatgagtggtggtggaaggcctggcaggagcgctactgacatctagtgaatagaggctggagatgctgtgaaacaccttacactgcacaggacatccctgctccatgacaaagaatggtctgatctcaaatgccagctgtgctgccattgagaaacagaggattttgtttaaattctatagaatggaagtcatgaagccctgacagctgaaggcaataaagaactttttttttttttttttgagatggagtcttgctctgtcgctcaggctggagtacagtggcaagatcttggctcactgcaacctctgcctcccaggttcatgccattcccctgcctcagcctcccaagtagctgggactacaggcacccacgaccatgcccggctaattttttgtatttttggtagagacagggtttcactgtgttagccaggatggtcttgatctcctgacctcgtgatttgcctgcctcagcctcccaaagtgctgggattacagggctgagccaccgtgccaagcccaagagcatttaaaaaaagagatttaaggccaggcatggtggctcacgcctgtaatcccagtactttgggaggccaaggggagcggatcacctgaggtcaggagttcgagaccagcctggccaactggtgaaaccccatctctactaaaaatattaaaaattagctgggtgtgatggcaggtgcctgtaattccagctactggggaggctgagacaggagaattgcttgaacctgagaggcggaggttgcagtgagctgagattgtgccactgcactccagccagggcaacaaatagtgaaattccatctcgaaaaaaaaaaagatttgaacaaatgtacccaatggctttttttgtgtgttttgtttttatagttttcataagggtctattttattattggtgggtaacacatttaatatttaagcccgtttaaataatgtatagacgactgcatgcaacatgcaccatggctgtaactggatagagaaccaagtcaactgaagaccagctaacaagaaactaaatatttaaaatactaaatattgggaagggttccaagatggccaaataggaacagctctggtctgcagttcccaacgtgatcaatgcagaagacggatgatttctgcatttccaactgaggtacctggttcatcacattgggactggttggacagtgggtgcagcccacggagggtgagctgaagcagggtggggcatcacctcacctggaaagcacaaggggttgggggatttccctttcctagccaagggaagctgtgacagactgtagctggaaaatcaggacactgtcacccaaatactgtgcttttccaatggtcttagcaaatggcacaccaggagattatatcctgcacctggctcagtgggtctcacgcccacagagccttgctcactgctagcacagcagtacaagattgagctgcgaggtggcagcctggctgggggaggggacgtctgccattgctgaggcttgagtaggtaaacaaagtggcctggaagcttgaactgggtggagcccaccgcagctcaaggaggcctgcctgcctctgtagactccacctctaggggcagggcataactgaacaaaaggcagcagaaacttctgcagacttaaacatccctgtctgacagctctgaagagagcagtggttctcccagcacagtgtttgagctctgagaatggacagactgccccctcaagtgggtccctgacccctatgtagtctaactgggagacatctcccagtaggggccaactgacacctcatacagctgggtgcccctctgagacgaagcttccagaggaaggatcaggcagcaatgtttgctgttctgcgatatttgctattctgcagcctctgctggcgatacccaggcaaacaggtctagagtggacctccagcaaactccaacagacctgcagctgagggacttgactgttaggaggaaaactaacaaacagaaaggaatagcatcaacatcaacaaaaaggacatccatgccaaaaccctatctgtacttcaccatcatcaaagaccaaaggtagataaaaccacaaagatggggagaaatcagagcagaaaagctgaaaattctaaaaaccagacagcctgttctcctccaaaggattgcagttcctcgccagcaatggaacaaagctggatgtagaatgattttgacaagttgacagaagtaggcttcagaaggtcataataacaaacttctctgagctaaaggaggatgttcaaacatatcgcaaggaagctaaaaaccttgaaaaaggattaggcgaatggcaaactagaatcaacagtgtagagaagaccttaaatcacccgatggagctgaaaaccatggcacgagaactatgtgacgcatgtacaagtttcagtacaagcttcagtagccaattcaatcaagcagaagaaagggtatcagtgattgaagatcaaattaatgaaatgaactgagaagagaagtttagagaaaaaagagtaaaaagaaatgaacaacacctccgagaaatatgggactatgtgaaaagaccaaatctacgtttgattggtgtatctgaaagtgatggggagaatggaaccaagttggaaaacatgcttcaggatattatccaggagaacttccccaacctagcaaggcaggccaacattcaaattcaggaaacatagagaacaccacaaagatactcctcgagaagagtagtatcttggtgaatctgacacataattgtcaaattcaccaaagttgaaatgaaggaaaaaatattaagggcagccagagagagaggtcaggttacccacaaagggaagctcatcagactaacagcatatctctcagaagaaactctataagccagaagagagtgggggccaatattcaacattcttaaagaaaagaattttcaacccagaatttcatatccagccaaactaagcttcataagtgaaggagaaataaaatcctttacagacaagcaaatgctgagagattttgtcaccaccaggcctgccttacaagagttcctgaaggaagcactaaacatggacaggaacaaccggtaccaggcactgcaaaaacatgccaaattgtaaagaccagcgatgctaggaagaaactgcatcaactaacaagcaaaataaccaactaacatcataatgacaggatcaaattcacacataattaaacttaaatgtaaatattaacaatattaaccttaaatttaaatgggctaaatgctccaattaaaagacacagactggcaaattggataaagagtcaagacccatcagtgtgctgtattcaggagacccatctcacatgcagagatgcacataggctcaaaataaagggatggaggaagatctaccaagcaaaaaaaagcaggggttgctatcctagtctctgataaaacagactttaaaccaacaaagatcaaaagagacaaagaaggccattacataaaggtaaagggatcaattcaacaagaagagctaactatcctaaatatacatgcacccaatacaggagcacccaaattcacagagcaagtcctcagagacctacaaagagacttagactcccacacaataataatgggagactttaacaccccactgtcaatattagacagatcaacgagacagaaggttaacaaggatatctgggacttgaagtcagctctgcaccaagctgacttaatagacatctacagaactctccacctcaaatcaacagaatatacattcttctcagttccacattgcacttattccaaaattgaccacatagttggaagtaaagcactcctcagcaaatgtaaaagaacagaaatcataacaaactgtctctcagaccacagtgcaatcaaattagaactcaggactaagaaactcactgaaaactgcacaactacatggaaactgaataacctgctcctgaaagactactgggtacacaacgaaggcagaaataaagatgttctttgaaaccaatgagaacaaagacacaacataccagaatctctggg

SEQ ID NO: 8724 - DNA, 222094 bp, Homo sapiens
gcatgagccacaatgcccagctgtaattttccttcgtcttttcatgccttgatagctcatttgtttttagcactgaataatattccattgttatgtatccattcacctactgagggacatcttggctgcttccaagttttggcgatagtgagtaaagctgttataaacttcatgtgcgtgcagggttttgtatggacagaagttttcaactcttttgggcaaatcctaagaagaattttctggattatatggtaagagcgtgtttgtttttgtttctgtttgtttgtttgtttttgtttttttattgagacggagtttcacttttgtcgcccaggctagagtgcaatggcatgatcttggctcactgcaacctctgcctctcaggttcaagcgattctcccacctcagcctcctgagtagctgggattacaggcgcccgccaccatgcctggctaatttttgtgcttttagtacagatggggtttcaccatgttggccaggctggtctcgaactcctgacctcaggagatccacctgcctcagcctcccaaagtgctgggattacaggcgtgagcaaccgtgccctgtgtgtttcatttttaaaaaactgtagaactacttttattgagagttttaggacccttcctgatagacatagagaatctatcaggaatgtcatgaaccaaatcgtgacatcagaattggaaactgatgatgaaggaaagagcattgcaggttactatgcaatgcagtctagtatcgggagaagtgtgaggtccatcatgggggccaccatgagtgaaacaaaagtgcttttgtgcaagagttggagcatggccctgcttgtggtcaggaacgatgttcctttattcacagatcttgggccagatctacctgactctatatgagtcaagtagatcaaggctgataacactttaaaattattaaatcttcttttttttttttttgagatggagcctctctctctagcctaggctagagtgcaatggtgtgatcttggctcactgcaacctccacctcccaggttcaagggattctcctgtctcagcctcccaagtagctgggactacaggcgtgcacaaccacacccgactagtttttgtatttttagtagtgatagggttttaccatgttggccaggctggtctcgaactcctgacctcaagtgttccctccaccttggcctcccaaagtgctgggattacaggtgtgagccactgtgcccggccaaaaaatattaaatcttgaggcacatgcaggagtaagccatgctcagacccaatcttcgatgttactaaaaattggaggggatcacacttcatggttttgttttgttttgtttttttgagacagggtcttgctctgttgcccaggctggagtgcactggtacgatcacagttcactgcagcctcaaactctggggctcaaacaatcctcctacttcactctctagttgggactacaggcacacactgctgtgctcgactaattattattattattattattattattattattattattattattattttgtagagacagggatcttgctatgttacctaggctgttcttgaactcctgggctcaagcgatccttccgctgcagcctctcaaagtgctaggattacaggcatgcccagccactttggggcttttttaagccaacagcaaaaaaagactataagagagaaatttccccttggctgtcttgtttcatggattcgtggaaactcccattaaacagccggtcacagaaaaagatatgccaaggaaaattacttgacagcactcagtcaaagtgacattttaaaaagagactattgcctcctccatcttaaaagaactgaccttttgagccatgagaaatgaaacagaggcatctgatcgaatgataacaatgcacttctgaagattcaaacatcggaacttcatgcattggacacatatctattgaatgactcttaagtgaacatactgtccctgcctgcttccagagggtactagagaggtcggagatggttcataaaggccttcacatgtgctgtcatatttaacaatcagaaaggtacttgaggcaaagaatctgatcatctttgtttttccttgagaaaatgcgctcagagaggtttactgacaatcccaaaggtgcttggttggtgcttaagagatctgggtttaaaacctcagactgctgtctactatggcctgtgtcagaaagactggggttggaattcctgttccaccactgctgtgttatttaacccctccaaacctagattctcaacaataaaatgggggtagggagggaattaaagtatgtaccttattttttagagacaacatcttgctctgtcgcccaggctagagtgcagtggtgcaatcatagttcactgtagtctcaaccttccaagctcaagagatcctcctacctcagcctccctagtagctggaacttcaggctacactacgcccagctgctatttattatttatttatttattgagattgcatctcaccatgttgcccaggctggctacttaaaaaaaattttttttttcaagacagggtctcactctgccacccaggctggagtacagtgacagagtctcagctcactgcaacctctgcctcccaggctcaagtgatcttcccacctcagcctcccaaggagctgggattacaggtacccaccaccacacatggctaactttttattttttgtagagacagggtcttgctatgttgcccaggctggtctcaaactcctgagctcaagcaatcctcctgctttggcctcccaaagtgctaggattacagttgtgagccaccatgcctggccttggccactttagttttgctttttttttttttttttgagttggagtcttgctctgtcatccaggctcccaggctggagtgcagtgacacaatctcagctcactgcaacctctgcctcctgggttcaagcaattatcctgcctcagcctcccaagtagctgggaccacaggtgtgcaccaccatgcccagctaatttttatatttttagtagaaatgggggtttcaccatgttggctaggctggtcttgaacttctgacttcaagtgatccgcctactttggcctcccaaagtgctgggattacaggcaagagccaccgtgcccggctgcctactttaatttttaataaagggttgttatataaggggtaggtgagagaatgaagtaaaattgagtgttacagtctccagttgttaatcacattataattattctcttttaaaagttaccaacaagttatttaaagaatcgaatggaaccctttggaaatacagtgttcatgcctctagtattaatgccagtttttacttcgaggccagcaagctagattccgatggccttccctttccaggatgggaagcggatgattgacttcaattttcccccttccgttacttctctgctccacatcatttctgtgctgatgcagggacgatttccactccttttacagcgtagatgttaaaagcctgtgcggagcagctcattcatcattttccgcagagctttacccctcacttccccagccagctaaatgcaggctgttcttgactctctgatctaggcccattgcagggtgagggccaggctcaggagtttccagggtgaaaaccaggtaagcttgatgttggaaggatgaagaaggacccaaaagggtctgagatgcagagctctccagatgggcctgggagcctgcaggggaagaggcctctctttatatcccggaggcctggtgcaactctagttggtttcatgtttgttgcgagtaacagcagctcacatgaagcggtgcaccatgttcattttacatggatcatctcaaggactgcttacaaaaaggccaggaagtagctgatgttcttcccatcttacaggtagggaaattgaggcatggagaggcaaagttacttgcccatggtcatataggtagaaagcagcactggcagattcaaagccagacatctactctcagatacacgccctgggcctcaaggccagtttgcctgggcatttccctttaatgtctcctctctggaagtgaatggtgtcatcagaaaggttccagtgccagcaccaatcaatgactgtcccagtgagagcttggtcaaatccctttacccctgcagggactcaattttctcacctgcaaaatgggggtattaataaagccaccccccgcacccccggcccccagcccctccacctggttgcaagaggagtggttgtagactaagggcctgcgtcaagtacagaacccaggaggggtctgcccaactttaaccctctctccaaatcctctagcctgaagcagcagaaacccacgtgggactgggggctgcccccttccgggccttccccaagcagaggggtccccatctagccccgcggggcaacggcggccggtggctgcgtgaagggccccctcccccgacgccggggagcaggaaggccactcggcaccatatttagtcagggggagccggcagcccagagctggtatgcggcgctgggaattcctgcaggaaggagtccgcgcctgccctttttgggttgtctcccgcccgccgctcccgccgctcccggggagggggaccggcccggcccggcccggcccgggaacctcggaggagctggtgccgcgcggggagcggagcgcccgggctgcccgcgggtccccggcctggcgcggggccagcccaccgcctcgacttccttttatggcctgtgtgtgcgtgcgtggacaggagcggggagggagggacggggagaagacggagagcctggggaagagagagagagaaagcgcagagataggagtgagacacgcgggagagatggagagcaagagacacagagaccagagacaaagtgagacaggagggagagacagatacatcgacagatctagagaagcgagagggacagagacaaaagatagagcgagagacagcaatgatcagagtgacagacatgcagagacagtggcagagacagagcgagagagcctgtgatggagagagacagggaatgcaattttaggcgaggaatccttggggaagggaagttgttgaagggaactcgcagactctgggggcacacccactttctccttggatcttgacacttgcatcttgtaaataacgtaattatcaccgccaccgccttcccccattttgtagctatggacaccaagtctcagagaagtgaagtgacttgcccaaggtcacgcagctggcgagtggcgcacaggggagggggacagctgaaataatcacagtgggcttatttttaatttttatttgtattttggtcgtggtgatgtgggtggaggtggagatggcaagttgggaaaagtaaaaacttccccttcctgcacggttcccagcaagggtgggggcctcctgtcttgcactttgcaaagttcaagaaatcccctttccctacccttcacgctgcacagccggccctctttccagacagtgcgatgccaataaaatgggaagtggggtgggagatgtcaagtcagatccaccacagccccgacacggggaggaagaggttaaagcctttgcggccggaaccgactcagggaagacgttctcaagcatcccgcacagacactgcctgctcgaccccctttctctagggatccggagcgtctgcgaccgcctggggccggggctgagactcccgtccctgtgcgcacctgttccgtgcgcccttgtgcggtgcgcacctgttccgtgcacccttgtcccgagcgccccagctccttgcgctcccgccgggggtgcgccctgcagggggcgcggcgagggggccgcgagggaccctccccaactccaccccttcggcctcctcccctttcccagccgcgggcagctccgggtctataaagagaggcgtccgaggacgcgcagggagatttggacgctccggcctgggaggtgcgtcagatccgagctcgccatccagtttcctctccactagtccccccagttggagatctgtaagtagtagttgtcattctgggggcagattgcagggsaggggggtgttaaaagtcctatagggtattctataggggctggggtgcacttaggggtccctgttgtcaacctcgtaagggccatggtgggggcagagttgtgatttggatytctctctgccttatcgtcttagattatcctagactttccccaaacagcatttctyaagattgccagtgagaagtaccattttgggggtgcttattaacgatatcaatgcctggacccaactccatttcccaactctagaatccccagaaaaactgccttaaaaaaaaaaaaattagtcccgagtgattcttgttaagaggctaatccaggagatatgctcccttggaaatctcagaggtccggtgcagacaatcaaggcatctcacttttattctaggcaccaaaaaatttacagctgaacttcactgaaaagtcacttgctatcacacagaagggcaaagtgaggctccttgtggatttgaccgtattgcacagttgtgttgataatgcattaaatcagttaaaaacacatgggcataggcttagcagaaaggagtgttgttgttttttttttttaatcagtttaggggaggttcttctatgttgagaacccctgggagataaggctggttgtgatctagtttgttacagcccactttttcctcttctccaaattaaaaaaaaaaaaaacaactcacccaggttgaccccaaagggcccccagatacccaggtgggctccaaagtctccatttgcttccacgatctgcaggtgcgttaggtaagattacactagaatttcccgcagagccacctgtgtcaatgccactctcgtgcccaaccaaatgggtaaaacgagagaaagtgtggctactgcctgttgtaagttttcttccagcacagggtctggtagggattttgccacttgagaaaaggtaccatccaaagccatgcttgtcaagaagtaaaagaaaatatttagaaacccaaggygggagtgtttagttgcagtatgaagaactgagagattaaatggtgaactgtccgtccggggtttggcaaaaagaatgcaggctattaataaactgctttgcatagttttttgtttctttgatttactyaacgatactattttagaattgttcagagacggaacttgacgctgaactgaaagtcattaggtggcagggtgtgaaataagatagrgaattttgtttgaaggaaattgatgttttccctttgagatagctaccgttgatggaacacttcagtgccacatgctgttgcaacatttaacttaatttatctcatttaatctttgcaacaacttcataagaaaggctttatgatgcctgtttagtatacaaggcagctgaggctcagagaggtaaagtgtcacacagccagcaagtggtagaacccattcccgggtcagtttgagtccaagttcatacccttgaccccactatctttcttctttaccatggacacaaacttgttggggtcaggtttctggtgggactaaatgcttccaacaaagtaaatgtttatcaccgtgtcctttgaagaaaacataaactgactttttgcacatttaaaataaaaggcactgtttgtcccctgattgagggggtgacctagctgaaaccagtgaccctaggtgggctgccatgccgagagtccagaacgtgaactagctgggtcttttccgagaagccgccaggcttgccttgtaaacaccatgtttttttattatcatgtccgaaatagatgtgttattccgtacaaggtatctgttatggatttgttatcattacttttccgtgggagggcagagattgaggcaaacatgcccatttatggaagygttttccatgaggccatccccggccccctcgtcagttacccagccttgcaccgcagcccggttggtcctggccctggggatttgtctaccatgtccctcacccattgaagaactagtggagaaaccctaaggmgaagagatttgggaggaaagtgggattcttttttcctaccccctcttattcagaggtttgatttttttgggtggggggtgggagggaattgtctcctttccacaggtcttgaatccaaacaggtgggtcttccacrttaggcacaagcgtgtaattccaagagcagatatatagtagatttttcttgaaaaccaagttcaatwttcaatccagtagaatcatagaaggycataagcaaatttaaaaatcatctcccgcacctccccaaacctcactttctcatccgggaaatggggctaatgagaataactcatgttttttgggcacttttgcctggcgagatgctaaacgctttgtggacattatcttacgtcttcataacaaccctttagagtagatactgttattctaactggctttattttacacatatggagtctgaataacttgcttaagatagctcagctaaccagtaaggaaaagaagattctacaaatctaggtctttctaactccagagtttcacagattaccctcatgggaggatttgatgagctaatgtgtatgaagggtttagcacagtgcctggcccctggtaagcttcagtgatggttatttatagcaaacacaaccagagagttcaagatgtttgctcagtatggcatggctcatctttggcagaaccgggaagcctaaactatgtggccgttaaaggagaagcttctcttaattttcttccctttgatctcataaacctcgtttctatttgggctgaaagtggtgattagaatctttaatatattaagctaccattccttacctggattgggaatgttacaaattccarttacatttgtttagggttttgtttgtttgtttttgagacagagtcttgctctgtcgcccaggctggagtgcagtggtgcratcttggctcactgcaacctccgcctcctaggttcaggcacttctccagcctcagcctcctgagtagagagtagctgggtttataggcgcccaccaccatgcctggctaattttttgtatttttagtagagatggggtttcaccatattggccaggctggtctcgaacygctgacctcaagtgattcgcctggcttggtctcccaaagtgctcagattacaggcgtgagccaccgcgcctggcttatttagggtcttgatggcatactttaagggatggcctttttgctctctaggtcttctccttccactcctgacctttcaacttttaaccctggccacacaatggaggaaagactgaatttagagaaaggcaggcaagaatttgaaagaaaccttgtatgtgatccaaggacagaggaagaagctgctcacagtggctgaaaggggaggtcggacatctgtgacttgtatcagggtttcaggggctaaggaggaacaacctcatcaaagttgctaggaaagggccatagaggccaggtatggcaggtcatacctgtaatcccagcaatttgggaggctgaggtggggggatggcttgaagtcaggagtttgagaccagagtgggcaacatagcgaggcaccatctctacaaaaaaatttttaaaatgagctgggcatggtggcatgcatctgtagtcctagttattcaggaggttgagtgaggcaggaggattgcttgagcccaggagttcaaggctgccgtgggccctgattgcatcactgttctctagcctgggcaacagagtgagactctgtctcaaaaaaaaggtgaggggcatagaactttactgtaccaggctgaaaaatacaaggcccagagagggcaagtgacttgcctagcatcacccagcgagttttgggcagagctgagacttgtaactcgaagacctaaggatcttccacaggctaatgaatagcttgtttgtgctcaagggatgaagcagtgagttgttaggacaggactgtgaatagggctgacatattcagatgtgtcaaacatcrctaatgccatctctgagtaaattaggcttcaaacagatcgggattctaatcctggytccccaacttttgcaagggagggccttgcatttacctttcaagaccccgataggcttagcaggaaaatgggaataatagataatgccactctttcatccttggactttttgtctaattatatgaatttatctgtaggataaattcccagaaatgcgcttgctgagttaaagggcatgcgtatctaaaattaatagatattgcaaatgactggctaaagacattgcagaccaggtgcagtggctcacgcctgtaatcccagcactttgggaggccgcagcaggtgggtcacctgaggtcaggagttcaagaccagcctggccaacatggtctctgctaaaccctatctctactaaaaatacaaaaattatctgggcatggtcgtgggcacctgtaatcccagctactcgggaggctgwggcacgagaatcgcttgagcctcagaggcagaggttgcattgagccgagatcacaccactgcactccagcctgggcaaagagtgagactyggtctcaaaaaaaaaaaaaaaaaaggcattgcaaattgcaacttgttgcagtcacatatgacagcagtccccatcctcttggcaccagagactggtttcgtggaagacaatattttccagggtggagtggggaggatggttttgggatgaaactgtcccacctcatcatcaggcattggttagattctcataaggaacgtacaacctagatcccttgcaggtggagttggcaatagggtttgtgcttctgtgaaaatctaatgctgcttatctgacaggaggcggagcttaggcagtgatggtcactcacccaccgtcccctcctgctatgtggcctggttcctaacaggccattgactgatactgcagcacaagggttggggacccctgacataggagactatacatttattttaagctgtggtatgccagaattgtaaaatataaaacacagtggggcttttagggccagaaataatcagttcttgctcgcttccagaagcatccttcacaggggctaccgtaactcttgccaaccaagttctcttggttgggaggaaaaaatagtgttatgcattaagagaacttctttctggagttacttgaaaccattggtattcagatgattaggcagatgtcacaaggcaataagaatgtgacaggttcaccattcactttttttcctgtaaaagtgaagtagggctttcttgggaacaagcccttgggaggtggggggatgtgaatggtgaggggagggtagaaatggtggagtagggtcaggggcaagaaagggactttctgctaagaattaatcgggtgtccatttactcttagcagaaaactaggattagattctggattgtactcctgactccaaattttacaagtgggggtcttgcatttaccttccaggacctcggtcatcttagcaggaaaatagcaatagcaggtgatgccaccttacagagcgcttaggagacagtgagatggtctatataggaagctgtctggcctgatacctgatgaatacaaggggcccaataaatacagtggctgttatgaataatagatctaaactgcctttttggtactactggggacctgccaagcaggtgcatttagagtgcccagtgcctctccctgcgacacatttgatgcctccctacacctggaccaggccttgagcraggatttccactgcagaggtccttccagctggcgaattgtgttgcagatcaggttcagagaacttctgttttgcctgtgtggcattcattcattcgtttatttgaaatagagatgggatctcactgtgctgcccaggctagtctagagctcctaattcaagcaatcctcttggcttggcctcccatagttcttggattacaggtgtgaaccactgtatccagccctttatgacatttagaatatgagcaatttttcttttttcttttttttctttttgagatggagtctcactctgtcacccaggctagagtgcagtggcatgatcttggctcactgcaacctctacctcccaggctcaagcgatcttcccacctcagcctcccgagtagctgggactaccggcatgtgctgccatgcctggctaatttttgtattttctgtagagatggggtttcaccatgttgcgcaggctggtgtcaaactcctaagctcaagcgaactgcctgccttggcctcccagtgttgggattacagacgtgagccacagtgctgaaccctgcatggtatttagaatataagcaatactctaacatctggtctgggtcactctgtattacttacctgatctccaaaaacatttgggtttttgtctctggtccaaaatctttagccaatggcttggcagtaaaatcctragggaagctgttgaccaggtgaggtgatgtgcaaatcctatactctctgggctctgggatatttaatttactatttatttatttattttcaagacagagttttgctcttgtcgcccaggctggagtgcagtgatgggatctcagctcactgcaccctccacctcctgggttcaagcgattctccttcctcagcctcctgagtagctggtattacaggcgcccaccaccacacctggctattttttgtatttttagtagagacggggtttcaccatgttggccaggctggtcttgaactactgacctcaggttatccgcctgcctcggcctcccgaagtactgggattacaggcatcagccaccatgcccggcctaatttactttttattaatgctgaagcagagagggcaagatcttttgcccctgagttcttctgggaaaaatgaaactgatggtaaaacaaactaaagcaacctgacattctcagttggtccagtttcagccctttgactgggagtcacagacgggtcccataaaatggtagagctgggccagcctaccattgatttattttccctaaatgaaaaatacaaggcccagagagggcaagtgacttgtccagagtcacccagcaggtttggggcaaagctgagactcgttacttgacatcctaaggtcttccagaggctaatgattagcttgtttgtgctcaaaaaatgaagcagcctgggcgcggtggctcatgcttgtaatcctagcactttgggaggctgaggcaggcagatcgcttgagctcaggagtttgagaccagcctgggccacaaagtgagacccctgtctctacaaaaaaatgcaagaattaaaaaattagctgggtgttctggtgcgtgcctgtgatcccagctacttgggaggctgaggtgggagaatggcttgagcctgggaggcagagtttgcagaaagcagagatcgcgccacttcactctagcctgggcaacagagccagaccctgtctcaaaaaaaaagaatgaagcagttgttggtcaggacaggactgtaaacaaggctgacacactcagatgtgtcaaacatcgctaatgccaaaggtgacagagtcatttgttttcatccaaacattcgagaaagttggacgaggtgactcacgcctgtcatcctagagctttgggaagccaaggcaggaggatcatttgagatcaggagtttgagaccagcctaggcaaaatagcaagacccccatctctacaaaaaataagccgggcatagtggcccacacctgaggtgsgaggatcccttgagcccatgagtttgagcctgcagtaagctatgattgcaccactgcactccaccctgggcatatagtgagacccttcccccaaccaaaaacattgagagcagctcttgatgagtgaactgtacttcgtggtcagcagttctgggtagtaatttcagagatgtcctttcagcccttggagctgatgcaggaccttaaacatgagcgatggtggaggagggagggttgggaaggtgcatcaaggtagatgaagagtgtccctggggttgggccaactggcggtccgtctctggtccagtgtgttcaccttgcccccgtctgatcttctgcagttggtattccgagttgagtttgactaagtgagagctgctctcagctttaactgcctttcccaagacagcccttgtttttattctaaagctgtggttctcaactggaagcagttttgccaccccaggggacatctagcagtgtctggagacatttttgattgtcatgagtggaggaaggggtgctactggcatcaggtgggcagagaccagggatgctgcggaacatcccacaatgcacggaagagctcccctcacgacacagaatgacgcagcccaagagtcacagtgcagagtttgtggccagctgcggtggctcacgcctgtaatcccagcactttggggggccaaggtgggaggattgcttgaggcctggagttcaagaccagcctggccaatatggtgaaacctcatctctactaaaaatacaaaaattagccaggcatggtagcgcatgcctgtagtcccagctacttgggaggctgaggcacgagaatcacttgaacccagaaacgtggaggttgcagtgagctgagattgcrtcactgcactccagcctgggtaacagagcgagactctgtgtcaaaaaaaaaaaaaaaaaaagacttagcaactattattactagtattagtattattaatttgtcaggctcactgaattttctcaaaaatttggcaaatttttaggaaaacattctcaaaacatttggcaaatctgtggctaaatgttgttttggggacccaaggctcgtaggagcaaaacagctttcaggtttccggatctgccagagactcaagtgtcctgttgtgtgttttgtgtctcaatgagggaaaggggaatatgtagcaccttccagatggatttgaccttgactgcgccactgtttgaagagcttctcaacctccgcagctccaccccagcccagatatttcagggaattagggttccaaggggcatgctatggaaaacaccattctagcatgagtcgaagcttctcatcccccatcttgctgtcttttgaccaaagcagattttgcacgtcgtaactgtcagagacatcaaagccagagggaatccagcctgctccaagctctccttttttgkacagagactgaatctttgcacttgatcttgtttgtgtttttaagtctgaggttagacagggtcccaggcaatggaggcgtgcgtgtccttttatttttctgttgtagcttttgctattttttctgacttttaaggcaactcatccacatggcaattaggaagagcccacttagggctgggcrcagcggctcatgcctgtaatcccagcactttgggagaccgaggcaggcagatcacttgaggtcaggagttcaagacctcagcctggrcaacatggtgaaaccccrtctctacmaagaatacaggaaaatagctgggcatggtggcaggtgcctgtggtcccaactatttgggaggctggggtgggaggatcacttgagcctgggaggcggaggttgccgtgagctgaggtcatgccactgcactccagcctgggcgacagagcaagaccctgtctcagaaaaaaaaaaaaaaaaaaaagaagtccactttacttgtcatagtgcttagaacaaatgaaacactctcctagccctcttgggatgtaattggctaccayctgcacaaactcttcattattgcacaagaatatcaatatacttaatgctactgaactgtgtttaagtggccgaggtggtgaatgttagctgtattttaccacaattaaagataagagggaaggaaaatgaagtgtactttacaaccaaaaaagtacgcttgatgtgcaaaaaagtgtgcagcttgatgaattttcaagaggatatattttttatagatgggggtctcactctgtcacccaggctgcagtgcagtggcatgatcatggctcactgcatccccgacctcctgagcttaartgatcctcccacctcagcctcctgagtagctgggactgcaggtgcacactatcacaaccggttaatttttgtatgtttgctagagacaaggtttcaccatgttgaccaggccggtctcagcctcctgggctcaggttatcctcctacctcagtcttccacacaggtaattaaaaaacattttttcttagagatgggtcttgctgtgttggccaggctggtctcaaactcctgggctcaagtggtcctcccatcttggcttctcaaagtgctgggattacaggcgtgagccatgtcacctggcccaacagtttgatgaattttcagaaagtgaacactcatagggctggcattcagatgaagatctagaggtcaaccctcacaagcccccctcacgttctgtccttgcaatcattgcacaccsgagactcattcattccttatctgagttctatcaccgtagattaattctgcctggttttggacctcagttcaatagtcacagaacctgtgctttttgtgaccaccttcttttgctcaaggatgtgttgtgagatgtccttttttgtggtgtggagctgtagtttacttcacctgattcgagtcctattttgggtgtttgtaatgtgtcaggtactgtgccaggtgccttacaggattgattcctttatgggcatctgacaagcccacccaccttatgtgaaaggcagaaccaaatagactccagaatgagacccaggtttgggtcccagctctgacacttctttttttttgagatggaggctgactctgtygccaaggctggagtgtagtggtatgatgtcggcttacggcaacctccacctcccgggttcaagtgattctcctgactcagcctcccaagtagctggggctacaggcacgtaccaccaatcctggctaatttttaatttttgtatttttagtagagacagggtttcacaatgttggccaagctggtctcaaactcctgacctcaagttatcctcccacctcagcctcccaaagttctgggattataggcatgagccatcacactcggcctacttgtgatcaatcttacttcatcttcacaccctcccatttctcttacgcatcctccagtttctctctctctctctccttctttttctctctctctctctcacacacacacacacgatctgctgcgacaccttaagaaacaagagattatcagggaatgattgaatattttgccgcatttcctattttgctgcctgtttaaactaaccttggttatactattaaaagaagacgcgtcgtatcaagccacttctgtgactatggctgtccagaaataaacataattaaaacatccaacagtagtaaatgctattggttaggaatgagcgaagtggcttagagtcaccggaagtgagaaagggtatagaaacagaaggtacttggtgtagatcaggggtgtcctatcttttggcttccctgggccaccccagaaaaagaagaattgtcttgggccacacgtaaaatacactagcactaatgatagctgatgagctaaaaaaaaaaaaaaaaaatcgcgaaaaaatatcatactgttttaagaaagtttatgaatttgtatcgggccacattcaaagccgtcctgggccccatgcagcctgtgggctgcaggttagacaagcttggtgtagagagtttcatctaaacttcatggcagctctgcagggcacccgttaggtccccagtattaatatacagtaaatctgagtctcagatctacgtaagtcacccagaagcacgcattctgcagtggcagagtcacgtttgaattagcatctgattgcaaagtctgggtgtctttacatgactacaggttatcttacctctcaagaggaggcaaccaatcaaatgttgccagcaccaatgaacttgtactttatttaggctcagaaagatcttttaggctaatgaaaatgccctatatttatgaaatgttctcgttctctgtggctttctcttttttgagacagggtctcaccctgacacccaggctggagtgcagtgatgtaatcatagctcactgcagcctcaaactcctgggctcaagcaaccctcctgcctcagcctcctagtagctgggactacaagcacgcatcatcatgcctggctgatattttttttaagggatggggtcttgctataatgcccagtctggtctcgaactcctgggctcaagcaatcctcctgccttggcctcccaaaatatgggattatacatgtgggctactgccagcctcttttctttcaattattttttaatctatgggttcccctcctttttgtttgtattttatttgttaaagaaagagagtactggccgagcgtggtggctcacacctgtaatgtcagcactttgagaggccaaggccggtagatcacctgaggtcaggagtttgagaccagcctggacaatatggtgaaaccccgtctctactaaaaatacaaaaatcagccaggcgtggtggcatgcacctgtaatcctagctcctcgggaggctgaggcaggagaatcacttgaacctaggaggtggaggttgcagtgagccaagatcccgccattgcactctagctgggcgacagagcatagtctctcacctttgggagtttactgcattgtttagcatgctctcctgtgccttgcattttccatagacaggcgtcagatctggaggcttcatcaccttcatcccccatctccatccccttttcttttgagcaagaatatgtcattagtggtaacggcacttcctgtagtggcccatctgcaggcatgtaatgtttataatgtctagtcagctctctctttttgtgatgttagggttaattagtagatttaggtgatggcaggcggacccatcccttaaaaattccacaagagctcttcatctgatatagtcagtcttgtggtggggaccctagaccagcatcatcatcatcacccggaagctggttaggaatgcatattcttgggccccatcccagtcctactgactcagaagctaatgcaccaggaaatgtgagccccattggcctaatggttttagcaattactggtagaacttgccaacttgccaagaccctttctttcttcctttctttctttttttttttttgagacggagtctcactctgtcgyccaggctggagtgcagcggcgcatctccactcacccactcactgcaagctccgcctcccaggttcacaccattctcctgcctcagcctccagagtagctgggactacacgcggccgccaccacgcccggctaatttttttttttttttttagtagagacagggttttgccgtgttagccaggatggtctcgatctcttgacttcgtgatctgcccgcctcagcctcccaaagtgctgggattacaggtgtgagccactgtgcccggcctcttccttcctttcttctttctttccttccttccttccttggcaaagtcttgctctgttgtccaggctggagtacagtggcatgatctcggctcattgcaacctccacctttggagttcaagtaattctcctgcctcagcctcctgagtagctggaattacaggcacatgccactatgcccagctaatttttgtattttttagtagagacagggttttcccatgttgaccaggctggcctcaaactcttgacctcaggtggtccgcccacctgggcctctcaaagtgctgggattacaggtgtgaaccaccgtgcccagcttgagacccactattagctttataaacagttacatcctagttttattgttctgcatgtattcgctggaattcttccatgtagaagggagtcttttttaagatagggtaactggagtcaggggcaggacactgttggtcttactatgagctaagccaaattcaataacaattttaaaatgcagaaaggaggattgttaaacttaggacaatacatgttgtctaccagatctttatttctctttctggatatctgaagtgattattcagatttagatgggatttcctcatttctctgcccttttttttttttttttttttttttttttggatgaagtcttgctctgttgcctgggccagagtgcagtggcaccatctcagctcactgcaacctctgcttcctgggttcaagcaattctcgtgcctcagcctcccgagtagctaggattacaggtgcctgccaccaagcccagctaatatttttgtgtttttagtagagatcaggtttcgccacgttggccagctggtcttgaactccggacctcaagcaatcctcctacctcagccccaacaaagtgctaggattacaggtgtgagccaccgcacctagccgccacttttttttcatcagctacgatatcaggtctcccagcagaaaatctctgagcaaatcaacttccaggtttgtttttcgtttttttgagactgagtttcgctcttactgcccaggctggagtgcggtgagaggcacaatcttggctcactgcaacctccacctcccgggttcaagtgattctcctgcctcagcctcccgagtagctgggattgtaggcgcatgctaccacgcccagcaacttttcgtatttttagtagagatggggtttcacatgttggccaggctggtctcgaactcctgacctcaggtgttccaccggccttggcctcccaaagtgctgggattacaggcatgagccactgcacccagcagcaggttcttaaaattagttttttaattattattttcagccctgaaaggaaaaaaataggtattggaatatctgccactcccattctgtcttgcaaaatctgcatcacccaaaaggttgggtttcaggagttggctgctcagctctagggatccaggagtgggacatgggtctttattctgtcgctgtgggatttggggcccaagcgtggggattatcagtgaattcaaaggagttgtgaattccctgctgaaggagggatgtcaaccacgcatagatcctggtggccatatgtcctcacttagccagcaactcagttctttggagcccagcagcaagaggtagaagggrctgtaagccagtgtttccaggacagcccctgcagctatggtcagagagtcaggaacggggggccggacaggcctatagagtgtgttgtctctgtccctctcctcataaacacatctggataacgacagataacgtgaatctaccatccatgggcttcccatgtagacaggacatttaatgacctaatcttccatcaagagagacttccccttcttaatttagttaccctaaggaacaatttgtatagaaaacgcagaatcaagattttcacatttccaccccactttctgtacccatttaaaaaatmatgcatttggggctgggcacagtggctcatgcctgtaatcccwtcactttgagagcccgaggctggtggatcacttgaggtcaggagtttgagaccagcctggccaacttggcgaagccccgtctctactaaaaatacaaaaattagctgggtgtgatggtgcaygcctgtaatcctagttactcgggaagctaaggcaggagaatcgcttgaacccagaggcagaggttgcagtgagccaagattgcaccactgcmctccagcatagacaacagagcaagactccatctcaaacaacaacaacaaaaatcattttgaacaaatgcatttaaatatatttgtctttccaccctttttggggtgttagggtgatggacatataattatttttcttattgatattcacactgtctcgtatttgaccagatagaaccctagtataatattttggtatgcagttttctagacttttagaaatgtacacacaaacatataaaatgaagacaaatactttatgacaaatattttaatcagctttattgaggtataatctatataaagtaaaactcaccgatttaaaacaaattcaagtttttttaagtgtacagcttgagtgagttttttcaacttaaaaaatttatttcttaattgacaaataatcatacatgttcatggggtccataatgatttttttagttgtttggttggatggttttgagacagggtctcgctctgtggcccaggctggagtgcagtggcatgattacaactcactgcagccttgacctcctgggctctagccatcttcccgtcttagcctcctgagtagctggaaccgtaggcatgcaccaccgtgccaggctaatttttaatttttttacagagacaggggcttcttatgttgcccaggttggtcttgaactcctggcctcaagggatcctcctgtctcagcttcccacagtgctgggattacaggtgtgagccactgagtccagctcttagtaatgttttgatattaatacatataatgtgtggggagataagatcaggataattagcatatccatcatctcaagcatttgccattacttttattttgctacttcctatataatgacatttatcatctctttgtgytgggaacattcaatgtccttcttctagctcttggaaacgatgtaatattttattgttcactttactcatcctatagtggatagaacattcttaatgagttttgacaaatgtatacagtcttgtaagcaccaccatgaccacagggaatacttttatcaccccgaaaggtggtgcctcttacctcttatgtacctcttctgtgcctcttactaatccattcctttccttgccactggcaactcttttttttaatttttttgagacagcgtctcactctgtcactcaggctggagtgcaatggtgcagtctcggctcactgcagcctctgcctcccaggttcaagtgattctcctgcctcagctttttgagtaactgggattacaggtgtgcaccaccatgcccggctaatttttgtatttttagtagagatggggttttaccacattgggcaggctggtttcaaactcctgacctcaagtgatcccccctgccttggcctcccaaagtgctgggattacaggtgtgagccaccgtgcatggcctcctctggcaactcttgattgcctgtcaccatagatatgccttttctattttgccattactttttttttttttckagacagagtctcgctctgtcgccgaggctggagtgcagtggcgcgatctcagctcactgcaacctccgcctcctgggttcaagcaatcctcttgcctcagcctcctgagtagctgggactacaggtgtgtgccaccacactccattaatatttgtatttttagtagagacaggggtctcaccatgttgcccaggctggtcttgaactcctgacctcaggtgatccactcacctcagcctcccaaggtgctgagattacaggcgtgagccaccgcrcccggccgccattaccttctatctcaataaccacacttacgtttgcaccagcctaatagtttttcgtattgaaggagtaatagagcgtgtggcctttctgrtttgtttcactgagcatgatgcttttgagactcatttattttattgcataatttctttccttttactgagtttccagttatataccttgggttgtttgtttgtttttaaggcagagtctcactctgtcacccaggctggagtgcagtggcttgatcttggctcactgcaatcttgacctcccaggctcaggtgattctcccacctcagcctcccaagtagctgagactacaggtgtgcgctaccatgcctggctaattttttgtattttttgtagagacaaggttttgccatgttgcttaggctggtctccaactcctgggctcaaggaatctgggtaattctatgtttaatcgtatgaggactcttattttgcagcgcacagttagacttgaccatcttcccatattagcacgtgtacacttacttccggcttcttcttctttttttttttttttttttgagatggagtctggctctgtcacccaggctggagtgcagtggcactatcttggctcactgcaacctctgcctccygggtttgagcaattctgcctgagcctcccaagtggctgggattacaggtgcacaccaycacacctggctaatttttgtattttcagtagagacggggtttcaccatgttggccaggctggtcttgaactcctggcctcaagtgwtttgcccacctcggcctcccacagtgttgggtttacaggtgtgagccaccttgtccagccctacttcctgcctcctgagcactgggtagtatttcacagtgtggaaatagcatggcttatrtatccagctgtatgttggtggacatttgggttgtctgacttttggtattttaggcgatgacacacatccctttctgaagggcctttgggtggtctctgttctttgaccacatacacaatactgcaggtctttgtacttggtgggatgtctctgcagaccgagttcctagacagggcaaggtgagtggttggtctgtcttccgggcttggttgtggtctgattctgaccctgttaccttattccacaggggaccaacaaggcaccatggcgcagaagggccaactcagtgacgatgagaagttcctctttgtggacaaaaacttcatcaacagcccagtggcccaggctgactgggccgccaagagactcgtctgggtcccctcggagaagcagggcttygaggcagccagcattaaggaggagaagggggatgaggtggttgtggagctggtggagaatggcaagaaggtcacggttgggaaagatgacatccagaagatgaacccacccaagttctccaaggtggaggacatggcggagctgacgtgcctcaacgaagcctccgtgctacacaacctgagggagcggtacttctcagggctaatatatgtgagtattgcaggcagccaggtacctactcctggcctcataaggaaagtaggcattagaaatgtgttgggagggctgggcacagtggctcatgcctgtactcccagcactttgggaggccgaggtgggcagatcacctgaggtcagaagttcragaccacgctggccaacatgatgaaatgccgtctctactaaaaatacaaaaagtagccaagggtggtggtgcgcatctgtaatcccagctactggggaggctggggcagaggaattgcttgaatccaggaggtggaggtgcagtgagccaagactgtaccactgcactccagcctgggtgacagaataagactctgtctcaaaaaaaaaaaaaaaaaggaaatgggaggctgaaggtttgatmgagggagattgcaagatgaggtggaatcattccaaggtgggttcacatctcagcccttgaagaggttatttcctctctcgaagccttggttttcctatccgtaaaatgggaataatcaccctcattacagacaggaggtgtgacaatcccatgtcatcacatgtgccaagtgccaagacgtatgataaactctcaacagatttcattggcatcgttctctgtccttccttcctcttgaaagtaaagaagagctcataaccactttggaaaggctggtttgtcttggcagccaggtgggtaggagacatgaggatgtggctaggttttagggaggccttccttgtcacagaggggaatgttcaggttggtcgtaggactattttaggtagacttgcagaacagagtggactagagatggcacaatatggtagccactggccactcgtggctaactaaatttagatttaaattaattaaaagaaacattagaccaggtttggcgactcatgcctgtaatcccagcacgctgggaggccaaggcgggtagatcacttgaggtcaggagtttgagaccagcctggccaacgtgatgaaaccctgtctctactaaaaatgccaaaattagccaggcatggtagtgcacatctgtaatcccagctacttgagaggctgaggcaggagaattgcttgaacccgggaggcagaggttgcagtgagccgagatggtgccgttgcactccagcctgggcaataagagcgaaactccatctcaaaaaaaaaaaaaaaaaaaaaagaaacattaaaaaatttattagctgggtgcgtgggctcacacctgtaatyccagcactttgggaggccaaggtgggtggatcacctgaggtcaggagttctagacaagcctggccaacatggtaaaaccccrtctctactaaaaatacaaaaattagctgggcatgatggtgtgcgcctgtaatcccagctacttgggaggccgaggcaggagaatcgcttgaacctgggagatggaggttgcagtgagccaaaatcgcgttattgtactccagcttgggcaataagagcaaaacttcatctctaaataaatacataagtaaaagakaataaaaaataacaaatttatttcttttgttgtgttggccctaggtcaagtagtcaatagccacctgtggctagtggctggtgtactgggtagcataagtgcagaatgttcccattatcatagaaagttctgttggactgcttggactagatgattggggcttggagtgtgatgttgtggggcacgggtcgccagactgatgygcagaggtcacccaacccggcctatgtctatgtcttctctctgaaaggccttgctcaccctcgagcaggttacctcatgcctctgaagctttgtttccttttctgtaaaatggatgcaagaatagtgccagcctcttgggagccgggcatagtggctcatgcctgtaatcccagcactttgagaaactgaggcaggtggctcacttgagcccaggagtttgagaccagcctgggcaacacaacgagaccccatctctgcaaaaataaattagccaggtgcagtggtgcgtactcataatcccagctactcagggaggctgaggcaggaggatcacttgagcccaggagttcaaggctgcagtgagctatgattgtgccactgcactctagcctgggtgacagagcaagaccttgtctgtttcaaaaaaaaaaaaaaaaaaaaatagtaccagcttcatggagtgggttactctaaatagaaagcacttaatacacttcctgctacatgttaagtgcaggcactgaaaatgttaagtgttactagattggtttttgctgtggtcatgatcacttttgattttactagtaagatgttcttcttccatcacttggcatccttgtgtctctttggttctggtctgtacattttgccaaatgaaaattacaaaaagccccttgtcatctctaaaaatgtcctgcacatttttttcctaattaggaaactaagacacgttcactatggaacacttggagagttcagaaagcatagtgaacacaaaacagaaaaattagtccttaaccagagatgcggtgcattctttgtctctttgtgagcatggtatctgtttacatatttaaaagcctattgggcacacagtttagtgacttgctcttttttccatttggaaatgctcagtgttgacttgtgtaatatatctcaggaagccccaaagataccccttgtaaggggtagtatagaatctgtcatggggataggccatttttccactgttcttatagatatttcagaaggagttagagtggctttttaaagagccaaatggtaagagtgagcaacttagcaactcataacttttttttttttttttgagatgggggcttactctgtctttgaggctggagtgcagtggttctatcgtagctcagtacagcttccaagtcctggattcaarcgatcctctcacctcagcctcctgagtagctgtggaccacaggtgtgcaccaccacacctggctaattaaaaaaaaaaaaaaaaacttctgtagagactgggatctcactatattgcccaggctggtctcaaactcctggcctcaagccatctcctgccttgacttttcacggcgctgggattacgggtgtgagccactgtgcctggccrtaactattaaatatgtcctccaatccaagtgctgtacattgacacattgtattttatttaacacagcatcccctgagttaaaaatgtttgccccttttagggaaggaagctgaggtgcagtgttgcaaaatgtatctttactttcttaagtaggggaagtctcttgtctgtggcactgtttgtatggaaaaattattgatctggggctgtttgtatggtggacattttctttttctttctttcttcttttttttttttttgagatggaatttcacttttgttgctcaggctggagtgaagtggagcgatcttggctcattgcaacctccacctcccrggttgaagtgattctcctgcttcagcctcccgagtagctgggattgcagggatgtgccaccatgcctggctgatttttgtatttttagtagagacgggtttcaccatgttggctaggctggtctccaactcctgacctcaggtgatccacttgcctcggcctcccaaagtgctrggatcacaggcctgaaccaccacgcccagccagtatgttggatatttctaaagaggcccgtctgtagggagctagagggaaaattggactctttggggcccaggtcttycatctaagacgtatcatcaccatctagggagtttcaggacagkcctgtgtattcatctcacctgctgtcctcaaatagaaatcagaaaaaaaaagggcatatgaaggtcctgagacccaaaatatcttctgacagcagattaaaaataaatgaatcaaagcttcaaattcctgctatgcttctctggacagattagattaaaatcctttcagccttgtgatgatggtcccgctcttctcttgttcctttctggtcagtttaattgcttaatagaaaccgtcgtccatgacggagaagataaagaaggaaaggggttggggtgggggagcacagtaacttactctcccagcccataatagcagcatgcatgagtcttgttaataggcgggtagtgaggtgataccaggtccgtggtctggcatgcatgactttkccctctgtgatgaagataaactttctcctccgttctgcaaggctcgcctcaaacgatgtgcccttgagaaggttctggcagacctcttgtgctcttggatctagaagagtctatagaagccagaggagctttcctcctaatcttagagatgcaggttctgggctcagcaatgtccagcagtctacctaaactgctgaagaccgtttgtggcatacctggcggggagcatggctttgacgcctggtcctaagggtcccttggtcttctgaatgctgtcttttggctgagttcgtctgcctcgagttagttagttcgttcctcccttccttccttccttccttccttcctccctccctccctccctctctctttcttcctttctttctctgtctttctgtcttcttttttctttcttcttttttctttttctttcttttgagatggggtcttactctgttgcccaggctggagtacagtggcatgatctcagctcactgcaacctctgcctcctggaactcaagggatcctatctcagtctccttagtagctgggactacaggcatgtagcacgatgcccrgctaatttttttgtgtttttggtagaggtggggtcacaccgtattgcccaaacagatctcgaactcctgagctcaagcaatcttcaccacttcggcctcccaaagtgttaggattacaggcatgatattgtgccactgcactccagcctgggtgacagagtgagactacatctcaaaaaaaaaaaaaaaaaaaaaaaaaaaagatgaggttgctgaagctcagatgtgcttagtcccaccactggaaggtgggcagagctgggattcagacaaggtctgtgtgagtccagggccagggtgactacctrtgattagtagcaaagggctcttggggtaataggcttagagcaggaggtgatggtcgtgggctggagcaggaggggacagtgccagaggccttgttagctttgaggtagacaagctttaagtgcagagcaagaaggaattgaaccttttattatgattccttgagcacctaactaggtgctagactaatgattacaacctgctaacacagaggagtgatttttgtttttaaattgagttaacttaatatatcaaaaaaagaaatctgtttctggcattgctcgaaaaagcagaggacctgacactgcagaatgcagagtgcgagtagcagtccctgtgagatgggctttttgctctgcttttccgcagacctcaccactccctgtcgtctcccaggccatggtaaccattgaccgtggcacctcttttgttcactcacacacgccctgcttcactcatgccttacctgctttgtctctgtagacagtgggaccctccaccctataccaaacctctggggttgggaaaatcatgatccagagccaaggtggatgggcccccctgctcattggaactccaagcccaagtcccygaaccatgaaccccaaaggacatttttccagttctggttctgcttctggaatgcccagggggtcaggagaagccctccttccaaactttagcaggtgacaatttttccgccttagagacctggcccagcaatcttagcctactctggaagcagtgtccacccggggacacaaggaacaagcagattgtgaacagaggcctcctgggtgccagccactgcactggtccctagagggtagaaagacactgtaactggaagctgccctttgtcaagccccaagcattagcccttctgatctttttttttttttaacatggagtctcgctctgtcacgcaggctggagagcagtggtgtgatcctggctcactgcaacctccatttcctgagttcaagcgattcttgtgcctcagcctcccagtagctgggattacaggcacatgccaccacgcccagctaatttttgtatttttagtagagaagtggtttcaccatgttggccaggttggtcttgaactcctgaactcagatgatcctcccacctccgcctcccaacgtgctgggattacaggcatgagccactgcacccagccttctgatctttcaagtcattattgcttcaaagaacctcctccagtaatacaaggataatctatgcaaagacctcaggagaatatttaaaaataagtatgtatcacaaaaagcagccctcttccctggaggcaaacatgattcacaggttcaygtatgtacacacacacacacacacacacacacacacacacaccccaaacatamgaaaaagtcactccttgtatgttttgcagtatgattttttttccacttaaccctaccttatagttttttctgtctgttcataactatctagtcagacttmaaatatgtttttgaataggtaagacatgcaaatatgaaataaaatagtgtataagggaatatagaacttcccccttcgttcctatttctcgcccttccagttccccttcttagagacactgtggttgctggttacatatgtagccctccagtcatgttatttatttatttatattatttttcgagatggagtctcactctctcacccagactggagtgaagtggcatgatcttggctcactgcaacagccccctcccaggttcaagcaattctcctccctcagcctcccaagtagctgagactacaggcgtgtactaccacacccagctgatttttgtatttttagtagagagggggttttgccatgttggccaggctggtctcgatctcctgacctcaggtgatccacctgcctcggcctgccaaggtgctgggattacaggcttaagccactgtgcccagcctattgctttttttgtgataaagtctcactctgtcacccaggctggagtgcaatggtgcgatctcggctcctgcaacctatgccttctggattcaagcgatcatcccgccccagcctcctgagtagctgggattacaggtgtgcatcaccacacccagataatttttgtattttttgtaaagatgggtttttgccatgttagccaggctggtcttgaactcctgacctcaagtgatccacccacctcagcctcccaaagtgctacaattacaggtgtgagctgctccatccagcctccagtgatgttttatacacatgcagccacatagagagcccctcctgcacccctccaaaatggcagcacaggccccggctgttgtgcgtctcaatctttgcatctaactgtgtattttggccattcatccatggtagtagagagagggccactgcacagtcttctgctatagggatgaaccataatgattaagcctgtctgctattgacaggtatttaggttgtttctagtctttttgctcttaaaagcaaggctgcagcaaaagcacgtgcttggtggaccacgtctgtctctaggttgggtatttagaaagccgtgatattgcactgcagcttcataaagaagccgtgattatccatcactttactgaggaagctcaggggtaggtctgtatgcacaagtcaggcaggtgataaggcaaagccaacactctgcccaggcctgtgtgtcttttttttttttgagaccaagtctcgctgtatcacccaggctggagtggagtggcacaatctcagctcactgcaacctctgccacctgagttcaagcagttctcctgcctcagcttcccgagtagctgggattacaggcrcgcgccaccacaccttgctaatttttgtatttttagtagagatgaggtttcactgtgttggccgggctggtctcgaactcttgacctcaggtgatccacccaccttggcctcccaaagtgccgggattacaggtgtgagccactgcycccggccatccctgtgtgtctgaaagccagtgttccttccacttccctcccttccctccctgttcctcatttctgctgcaggccccgggagcaccccctgctcagggctctgtggctgaccatataaagcgtcagagaaaaactggagctgcttcctaatacggtcacaagagggaaatcctgggcctgcagctgggacttgctggtggcacagggcccatgagatgccggctgggacacaggaggctgggatgttgaaacctctgaatttaaccagctggagaggggctcgtggggccagagaggcagaaacacagccaactatggttgggctgggtcgaggtgaaggagaagtggctgaataatgtgggaggaagagccmgatgctgaagccccacgaccctgccgtgagatgtgcggctgcctgcaccagtcttaccttcactccatcgtcataccctggcttgcttagaaagcttttacagaactsagcagagattcagatctacctggaagtatggattaagtgcttgttgtgtgcacggcactgggagagatgtcccaaacaaagaggatggaagtcatattcctctttcagaagctagtgatggagttgaaaaggcagtgtggtccttccttctttttaaaaattcattttattctttttttttttttctttgagacagtctcactttgtcacccaggctggagtgtggtggcatgatctcggctcacataacctctgcctccttggttcaggtgactctcctgcctcagactcctgagtagctgggattacaggcatgcgccaccacacccagctaatttttgtatttttagtaaagacggggttttgccatgttagccaggctgttctcaaactcctgacctcaagtgatctgacctcctcgatttcccaaagtgctggcattaaaggtgtgagccaccatgcccggcctcttccttctttttaaaaattccttttattcttttcttttctctatctctcatctctctttcttcctttctttcttactttccttccttccttccttcttttttttttttttttagagtctcactctgttgcccaggctggagtgcagcaccatgatctcagctcactataacctccacctcctgggttcaagtgattctcctacctcggcctcccgactagctgggattacaggcgcctgccatcatgcctggctaatttttgtatttttagtagagacggggttttgccatgttggccaggctggtctcgaactcctgacctcaagtgatctgacctccttggccacccgaagtgctgggattacagctgactgagtgtctaccctgtccctggcactgtgcggggtgcaggagatacagtagtgtgtgggtcacagtccaggaggtaacatttaggcagagctctaaaagaggagagggaaccagctgtgggaagatgaggggaaaagtgttccaagtggagagaacagcatattgaaggctctaaggtggcaagacttccctctcgtgaaatgaagggagcatagtaagagtcactaaataacattgattgagcacctactacataccagccgccatgctaaatgcttttcgagcattatctcgcagcacatctatgaagggcttgttcgtatgcctccctgttttgtagatgaggataagtgagactcagagaggttaagggacttgcccagggtcacacagcgaagaagtagcaaagtgaaggttcaaattcaaktaccccatacccagttctgagcccttagccactgccctttactgcctccaggtcaagggcttgagtgaggacaggttgggctgtaaatgatacctacattcaaaaggggcgtggcagtggacatggccccagaggagctggagatggagtcgaggcctgaaggagggtggggcttgattgacctttgttcaggtgaccacagactgggctcttctctttgggaggcttgtcctggggacaggggacactgattgaacaggaaatagcccctggcctggctcartgtagtccwctgagtacctactgccgccgtgcaaggcccccaggtcacggaggtgaagtcaggctgtccctgctcccaggaagctgtatcattaatttattcccctggcatgcatttagcaagcatttagttagcacctattctataccaaggcctgtgctgggactgaagaggagaaagggggttccccggactcaaggcacttgcagctggtgtttgcaggatgggtgggagggtcctgggtgatggaatggggaagaggggtgtccaggcaggcagccccccactcccagccccaccaggctggatgttgctcctgggccccgcttacctctaacccttgctttgcttctccatttcggtccgatggagccgcttataccaagctgcttatagttcacccccacggaccccgtgtcctgtttttctgcccatgtccctgctttgtcttgagctggttaacaccttgttgtcctttaagactcagtgcagggaatacctccccacctggaggtttccctgaccacccccaatgtgggttagggccttcccttccttgttcctatcattctctgttcttacgacgtgttttaatgtacttgtctccccctctgatttaagttctttaagggcaggagctatcattgatttctttatctccagcctctgacacagatgtggtatatagtaggtgctcagtaaatggttgatggctatttagacaggcatatgttgactcattcattctccttttaggggatggtgagaacctccgtctccatcaatcctgtttccttttttttttttttttttttgagatgggttctccctctgtcacccaggctggagtgcaatggcaccaccttggctcactacaacctccctccacctcccaggttcaagtgattctcctgcctcagcctgccgagtagctgggactacaggcatgtgccaccatgccctgctaattttttgtatttttggtagaaacagggtctcactgtgttgcctaggttggtcttgaactcctgagtgtgagcaatctgccctccttggtctcccaaagtrctgggatcataggtgtgaaccactgcgcccaacaatcctgtaccttcaaagaatattcctctgcagcacccccagacattacataccattgtccctgagtggactgagccctggaaggaccttcccactctctctttttctttctttttttttctttttcttttttgagacaaggtctcaccgtgtcacacaggctggagtgcatggcacaatcacggcttactgcaacctcaacctcccaggcttaagcaaacctcccacctcagcctcccaagtggctgggactacaggtgaatgccaccatgcccagctaatttttaaatttcttatagagatgggggtctcactgtgctgcccaagctggtctcagacttctgggctcaagcaatcttcctgccttgacctcccaaagtgctgggattacagttgtgagccaccacacccagccagactttcccactctctaattggctccagcccttgactaaaaggcccttgagggctgggatcctgtgtttttttaatgttctaatgtagtcccagcaccttttgcatggcatctgggacgtacagaatgaatgaatgaatgaatgaatgaatgaatgaaygaacgaacgatcagtagtttctgtttctgttggatgggcctaggctggatagcataatggaccatgctcatacctgggggcgggccaggctgggcttggtgctgccaggatcttctttggtgacctcggtcaagtcacttaaccctctgttgcttggttcaccctagctgtaactgagagatggatctgtggttctccctaagtcacttgcagggaagaggatacgctttatggccatcagagtcttgggcagtactgatgtttatcgtttggggaaagcagttcctgtgagacgggttggagcctgtctcctgaactgtgacctcaaccatgggaaaatctagtatccagtaaggaaaaatcatgacaatagtgccttaccacrtacagcatggcgggactcgccttgtgccttgactcctccgtccctgatctgattattttcagatgctcctattcacccagtagragaggactgctattttttaaatggtaaagtgcatatgacataaaatttaccattttaaacattttaaagaaaacagtgccattaagtgcattcacaatgttgtacagctatcaatttcaagacagggtcttgctctgtcacccaggggctagagtgcaatggtacaatcatagctcactatwaccttgagctcctgggatcaagcaatcctcctgactcagcctcccaagtagctgggactacaggtgatcaccaccatggccagctattttttttttttttttttttttgtagagagggggtcyggctgttgttgcctgagctggtctcaaacacttagcctgaagcaatcctcccaccttggcctcccaaagtgctgggattacaggcatgagccactacacttggccccagagcatttttatagcctcaaaaggaaaccttatacccatgagcagttcctcctcatttcccacctctttccagcctctgggaaccacaagtctgttttctgtctccatggctttgcctactctagacacttcacataaatgagatgatagagtacgtgacytttcgtgcctggcttctttcactaggcatattttcaagcttcatccacattggagagctcatgtcagtgttggtctctgttttgcagatggggaaggtattaatgatcaggagcaggcgctgtggggtaaacaggagttctagttcccaacttccctccagctgtgtaacctggtgacaacctcaccatgcctcactttgccctcctgtcaaacaggcggtggggaaatcactgttactgagtagttgtgaagatgccaygmggagatgcctctgccatcttctagagactgagtcactggggtttcttcttagatatggacattgggaggtcccagaaagagatcagagggtggtgggaggagagagagcttggaggattattaccttttcctccctccctcctggaccacagttttggcagctgtgtttctgtatgactgcggatccctctggacagcccctttttaggggtgtgtggctttctatgcctccaatgttcagttaacgacattccctctctggctgagtgcggtggttcccacctgtaatcccagcactttgggaggctgagactggcgcatcacctcagctcaggagttcgagaccagcctgggcaatatggtgaaaccctgtctctacaaaaaacaaaataaaaattacctgggcatggttgtgcacacctgtggtaccacctacttgggaggctgaggcgagaggatcacttaagcccagaaactcaaggttgtagtgagccaagatcaccccactacactgcagcctgggygacagagcaagaccctgtctcaaaaaaaaaaaaaagtaaacaacattctcttctgttcttgctcttcagacttaactrcycccgtcactggttgggtttctttaattctgcacacatatctgtaaacactttctttattaaatgttcctgagttaatatcttaagcacactgttcattttctgtgccacctgttaaatgatgagcatttaatatgattgtcagcatccaaaaaagatcctgcgtagtgcttagttcggtgcccaacacatagtaagtgctcaatgaacggtggctgttatttaagccagtgaggtccggggaggtaaagtggcagstcggaggagtggagctgagatttgaacccagagctcttcaaaactccacagtttggccaggtgcaatggctcacaactataatcccagtgctttgggaggctgaaatgagagaaytgcttgagcccaggaatttgagaccagcctgagcaacacagtgaaacccatgtctctacagaaaatataaacatcagccaggcctggtggcgcccgcctgtagtcctggctactcaggaggctgaggtaggaggatcacctgagtccagaaaggtcaaggtttcagtgagtcaygttcacaccaccgcactccagcctaggtgacagagtgagaccccatctcaaaacaaacacaaaaccccccacagttgcaaaataaaacataggcagcttggaaacccactctcgccctttctcctcttcccacgtacctggaatatcagtgaggcccagggtttccactaagactccaagctccagtttccccatctctaacatgagaatattgagtgcttctgtgcratctgtctaccctggaggaggtctggaagtaagctgggttctctgtctgcagacgtactctggcctcttctgcgtggtggtcaacccctataaacacctgcccatctactcggagaagatcgtygacatgtacaagggcaagaagaggcacgagatgccrcctcacatctacgccatcgcagacacggcctaccggagcatgcttcaaggtgagtgaactcagggctgcacggggccagctccagggagcccctcctgtcctgcttgtctgcagttcttgccaggaatgtggagtttggcaggcactgygagggaccaggagttactgtggctgaaaaagggaaaaagcaaaaggaacatctgtgtttgcagcctgggagggtgagggagagccaagagcttgggcaaatacgggcatgggcccgctccagctccagctccggggctcgctgcccaaggkccccgtcgggccagctgtctgcaaaggatggaaagagggtggggaacagccctggggctgagccattgtggtctgtgttgacacctacctgtccctcaacccctgtgggactgtgggtaaatatcttttcctcttcagcctcagtttcctcatttgtcaaaaggggtgatagtctctatcttgtagcttcttgtgaagattgttaatgctggtttttccaaacttaagacttgtgcctattactttcatgtttatacgttattatttttactattgttttattatttttgagacagggtctcactttctcgcccaggctgaagtgcagtggtgccatctcggctccctgcaacctccgcctcctgggctcaagcaattctcctgcctcagcctcccaagtagctgggactataggtgtggactgtcatgtcaagctaattttaaaaaggtgggtttttttgttctgtttttgttttgttttgttttgtttttggaagtgacaggatcttgctatactggttggtctcaaactcttggcctcaggcgatcctcccactttggcctcccaaagttctgggattataggcatgagccactgcacccaggccttctcaccttctatttagaacactttggagcccctgaaatagccacccccaagtcaaacagagggactaggcagttaatgcaaacaagtgtaccaggtcaggcgaagagtacaagaaactcgaaaactcacaccccctctgaaagggcaccaacaggtgggaacccagggatctgagttgggagttgagaggagcccaattctggaagttyttgaggcmggaatccaggtgtgcctgagagatgccacgaccccgcccccaagrtagagggactcaggtataagtgccccaactttctgacagtkagccagactccacaggtaggaccagaatcttggcccttctaggcagggcctgccattacctccaaagaccagcaggtggagccttgcaaaggcaatcttggagctgtaatctcaggttgtaaagtgayggctcctggagtcaggtatctgtctttttttttttttgagacggagtctcgctctgtcgcccaggccggactgcggactgcagtggcgcaatctcggctcactgcaagctccgcttcccgggttcacgccattctcctgcctcagcctcccgagtagctgggactacaggcgcccgccaccgcgcccggctaattttttgtatttttagtagagacggggtttcaccttgttagccaggatggtctcgatctcctgacctcatgatccacccgcctcggcctcccaaagtgctgggattacaggcataagccaccatacccagcaattcctggttcttttctggagctgaggtcccactaagcacattttaatctaaataccaaaaagaaagaaaattctgttagcaaaggagaaggagggggagcgacagatgggtaagcatttctacagtgctctgaaaaaatttatttgtaacttgaaaaagtctttaatattgtatattcattctagaaaaacttaaacatatatttaagtaaaagagaacttgctggcacctatgattctatcatccaaaactcatcaccattaacattttgttacgtgacctttcattacactaactgaactaaatggcatgaaatgaaggaaatttttactatctgaagataattcgttccagaaaaagatcacttaaaacagagaccaaagtttcactgtagatagtatgtgtgtggaggagggaaagagagtgggcaaaatatttgactgagcttgaaaaatgacattgcaggccaggcacagtggctcacgcctgtaattctggcactttgggaagcccagatgggtggattgctcgaggtcatgagttcgagaccagcctgggcaatatggcgaaaccctgtctctacaaaaaatacaaaaattactttggtgtggtagcacatacctgtagtcccacttcttgggaggctgaggtgggaggatcgcttgagaccaggaagtggaggttgcagtgagccgagatcacgccactgcattccagcctgggtgagagagccagaccttgtctcaaaagaaaagaaaagaaaaccaacattgcaaattataaaaataggttaatttcagcttacatgtaataagaattttattttaattacaagtaggtgctaatttgtagattcagtataaaatgaattaagagtgggtgtggggtttttttctgtaactttttctgggctgagggatgaaatcatgtgagcataaaacgacatcttcatgtcatgcttgacttctgcagcccgagctaaaaaggatcattcttacagatttatttgatgggtcaccagttttcctaagggcttcttttacttctttagtgtttaagtctctcaaagcccctgtggtcttagcgttcattcagctgtgaattgccctgaatctttttctttcttttgtctttctttctttctttttttttttttttttccggatggagtttccctcttggtgcccaggttggagtgcaatggtgtgatctcagctcactgcaacctccacctcctgggttcaagcgattctactgcctcagcctcccaagtaactgggattataggcatgtgccaccacacccggctaattttgtatttttagtagagatggggtttcaccatgttacccaggatggtctcgatctcctgacattgtgatctgcccgcctcagcctcccatagtgctgggattacaggcatgcaccatcacaccaggctaattttgtatttttagtagagatggggctttaccatgttggtcagactggtcttgaactcctggcctcaggtgatcctcccacctcggcctcccaaagtggtgggattacaggtgtgcaccaccacacttggcccctgaatcttttttttggcctttccaaggccactgactttgccagtcactgcaccttgttttccagaactgccactttgttttgtgttcatatcatgatggtggctattgatacccaataattggcaaggtgaagccactgaatcgtcggagaaggaggtttcggtggagtttgatcgctcttgtagtcattgaaraatacttttgtgttgtggggacttttgctttcctagaccagcagtccccaacctttttgacaccagggaccagtttcatagaagtcagtttttccatggaccgcaggggagagatggttcgggatgattcgagcgcattacatttattgtgcactttatttctatgattacattgtcatatataatgaaatcattatacaactcaccatcatgtagaatcagtgggagccctgagcttgttttcctgcaactagacggtcccatctgggggtgatgggagacagtgacagatcatcaggcattagattctcataaggagcacacagcctggatccctcttatgtgcagttcacagtagggttggtggttctataagagtctaatgccgcctctgatctgagaggaagcagagctcaggcagtaattggagtgatagggagtggctgtaaatacagatgaagcccactactcacctcctgctgtgcagtaccagtcggtggtttgagatgcctgygctagaccacctcttaactgtgaggcaatgttgtaattgacaaggacaccctgtgttcatatatttgattcctcatggtctctaggttttaacacaaaattgcatagtcagctctcttgaaactacttagaaatgctcacttgacacatagtaagctccaataggaaatgactatcatgattgagcacagcagcatgtcttcagtcctagcactttgggaggccraggcaggaggatcacttgaggccaggagttagagaccagcctggccaacatagtgagctcttgtctctacaaaaaaataattagctggccacagtgygtgagtctgtagtcctagctactctggaggctgaggcaggaggatggcttgagcccaggacttcaagaatgyagtgtgctatgatcgtgctatggtactccagccttggcaacagagtaagaccctgtcacgaaagaaagaaagaaaatgaaaaccgtgaatatgcacatccataaaagataaactctttacttaatttaaatgttaaccaacacctgctatgccctcgtctattttggcatgacctggtgctttctggcaaatcattgatggcggactccaaaaataaaaagaatcgggcacggtggctaacgcctgtaatcccagcactttgggaggccgaggtggggggatcatgagatcaggagatcgagaccatcctggctaacgtggtgaatctccgtctctactaaaaatacaaaaaaaactagccaggcacagtggcaggcgcctgtagtcccagctactcagggggtgctgaggcaggagaatggtgtgaacccaagaggcggagcttgcagtgagccgagatcacgccactgcactctagcctgggcaacaaagcgagactccatctcaaaataaataaataaataaaaaataaaaagaatgtcaaaaataatggagaaaaatttaagcttgggaagaattccgttcacctgcttaattttttctccattcccaagtaggaaattggtttttgtgaagaaacacgtaggcccagtgtgttgactccattgataaatggcacgatctcattctgttaagtcactgggctgcgatccacactaagcttaccatgaaggtggagagagaaagctagcacatgtggcttcttccttgagttcttcatggaaaagatggggtgtgaaaaggcgggattgaggagggatgggtaacacacatgcactgaatataagatgaagcattgcagttgtgtcacatagacagtaagttcctgaggacctataaactccatccttcttgcatgtgcatcattgtatctccagcacattttctggtgmctggcacatagtagctgctcagtatttgttgaatcaatgaattattagagttatttatagaaaagaacctaccagggtcaggatggatggggtgggttatttgagagaggtggggctttataagcctcgaagaatggtttgctaaggtgagagaagggggcagggatggctttctagccaagaataataaaagcataaatgtaggggtgagaatgggtatgatgagtgtggcaggagctggtttagaggggttgactagtatactgtggcagggagctcagagccagagctcagccctttgctgcctcacaggagttgggaaaatgggagggactttctaagagatacttcacaacatggcaccctcccaagtggaagccaagccccttgagggtatgggaagagaagctgatatttaaaatatgtatcttatatctgcatatgcataaattatgtcatgtttattttttaaattctccccccctttttttttgaggcagagtctcgccctgccacccaggctggagtgcagcagcacgatctcagctcagtggtatgatttctgctcactgcaacctctgtctcctgggttcaagcaattcttgtgcctcagcctcctgagtagctgggactacaggcacacaccaccatgcctggctaatttttgtatttttagtagagatggggttttgccatgttggccaggctggtttcaaactcctgacctcaggtgatctgcccgcctcaacctcccaaagtgctgagattacaggcatgagccactgcgcccggccgtggtttgtttttggaaagatgttacatacaaattcaaaaggtgaacttctcccttcaacccttgtgcattagacccttagcttccctcccaagagacaattatggtttctagtgtatgaggttttctcctagagatatttttgcaagtataagcaaataggtatctattttcttccctaagatttccctacaaatactagcattccatatatatacagtcctatattttgccagaggatgttacatatcagtgcatgtaggaattccttgttcccttttttaaaaaattggtttttatttttgttaaaagtattcatgcagayggcttagagtcaagtaatttttgaaggcttattaagaaaaatagccatcctctgctacttctcaactcctttaattgattttttttttttttggtatttaccaccatatctctgaaaacaacacttgatcattgtgctgctatcttaattttgttttcaattttaggtatcatctattgactttcctccatgaaagatgaaatktagctcattcacccyctggatttgmccctatttcctcgttccaacacacatgcctcatatcagartcccagtataattttatcttagttttgacaaactcagtgttcagagtttccattattatgactatgtaatgctatctagagtttacattattatgattatgtagatgttattcaaagctgagctttgcactgctttgtgactatttttcttctttctgtatgacttttctttttcctggagttagcaattgccttttttttccccaatcttgttttccatgtatttaaccaccaattctgccccaaaatctctttctaaatgtgttaatctccttttaatatgtccagacatgtattggatatcatattgatatcatctccttgaatgtgatctctactatagccttctgatctgccctggctttctctatagctagtaactgtcatataggatctttttcaccatccttgaaattccccttagtgctttcatagtggattccttgtttcccagttttcatgtcttcctctttcttgctttactctcctgcttaaatcaagcactttgtccagtagcttcccaagaaagaatgtacgtgatcttgaggcattgagaacttccatatctgagaggcttgatgcttctctaacacttaaaggatagtttagttgggtttaaaatttcaggcaagaaagttgttttcagaaagttataaataactttttttgcctgagctttttaaggcatttgtgttgttgccttctagtttcagttttgagaagatgaaacccaatctgattcgtatgtgtgtatgtttgtgagtgtgtgtgtgtgtgattatattcaccttcctggctgggaatattcttgatcctttgtacatgaccagtttttgtttttcctccttctctagaagcttttagactgtctttgtacccctattcaggatgatgggacttgctatgagtccatttttatttgttatcctggacacttagtggcccaattaatctataaacktgtgtccacaaattctgggaaatgttgcaaattatttcattgatgctgtctttctccctgtgttctctgtttctttttcttagaagtctttttatttccataatggaattcctagaccaatcctataatttaaatctctttcttttgtcattttcatcactttaatgtttttaatggtattttctgggcacttacctcaacttttttccctaacccttccattgcgttttaaatttctggtatatattttattaaattccaaaaattctattttatttttaaatgtttctttcatatgacattctttttctgtggttgcaatatcctgtttctcagaggatatttaatgcagagtctatttcctccaagatacatattttcctaattgttttaacttctgtctgtcatattagtggatttcttcagatgtcttgggattcttggctatccattcatcttggatgctttagtacacaggataccaaattgttgatggaagctcagtgcttataggatgggcttgctgatgtgcttggctataatatgaaagcactgggctaccccattaggacacttctgtttcgtctttcagtcttttgttcatgggctaatctgattcttcagagaaggtttgtagaaaaatcttctgcctggaggttaaagatttgtctagcatcattttgagggtctagttgaaaagaagctgagggtttcaaaatgtgcagtgaaatttgtacattataccttccttctttcagtatggttcctggtgtccccccaggacggagaccctctgtttaaccctcaccagagactaaacccaccaccttctgtggggtgtgagaagggcagtcacttggcttcagggagtgtagaagatatgggaggggtctaacagtgccttatatttgacccagtccttatgtttttgtctcctccttgatcttttcttccagaggcccctggcattgccagtttctgaggtttggggcagaaatggggaattcggtgttgaaattaggtcgtttctcacctttcctcactgctcacctagacttttttcttggtacctttttttttttttttttttttttttgagatggagtttcactctcgttgtccaggctggagtgcaatggcatgatcttggctcactgcaacctccacctcccgggttcaagtgattctcctgcctcagcctcccaagtagctgggattacaggcatccgccaccacacccggctaatttttgtattttaaatagagatggggttcaaccatgttggtcaggctggtcttgaactcccgaccttaggtgatccacccaactcggcctcccaaagtgctgggattacaggcgtgagccacggtgtctggactttttcttggtacttttcaacgcttatcccattttctgtcttccaagatggctttgctgttctcccctctctagttctttttaaactgcctcatgtatttttacactttttggtttgtttgtttttttttgggggatggagtttccctcttgtcgcgcaagctggagtgcaygatctctgctcactgcagcctccacctcccaggatcaagcgattctgcagcctcagcctcctgagtagctgggattacaggtgcatgccaccatgcccagctaatttctgtatttttagtagagacgggttggccaggctcgtctcgagctcctgacctcaggtgatccactcacctcagcctcccaaagtgctgggattacaggcgtgaaccaccacgcccggcctttttacacttttttttttttgccttttccyccytcttttgtgtggagaatggggtcttgttatattttccaggcaggtcttgaactcctgggctccagctttcctcatgcctgtgccttcctaagagctgggattccaggcatgagccaccatgcccggctaaactggttcatgtatttttggaaagtcttttacagttattttagtaaggtttaggaaggaagagagctaaatgcatgcactcagcctaccatcttctcatgggaattctctcatgccttcttttacaaagaagtgataataataatcatggatttttattatatgcttcctataaagctcagggctttacagaaatattctcagttaatctttaccacaaacctacaaggtggacaggaccagattaggaattttaaaattaagccctgaaactattaaggtgcaggcatatgtcataaaaaaaaattaaattataaagtaaagaaggctgacaaaattgtttttgtttttgctttttttagagacagggtcttgctctgttgcccaggctggagtgtaatggtgcgattgtaactcactgcagcctcaaactcctgggttcagcaatcctgcctcagcttcccaagtagctgagactacagagatgtaccamcatgctcagctaattaaaaaaaaacaactgttttttgtttgtttgttttgagacagagtttcacccctgtcacccaggctggagtgcaatggcaygatctcagctcactgcaacctccacctcctgggttcaagtgattctcctgcctcagcctcctgagtagctgggattacaggcacatgccaccatgcccagctaatttttgtacttttagtagagatggtgtttcaccgtgttgaccagactggtcttgaactcctgacctcaggtgatccacccaccttggccttccaaagtgctgggattacaggcatgagccaccgtgcccagtcttttttatttttgagacaggttctcactttgtcacccaggctagagtgcagtggcacaaacacggctcactgcaggcttgacctcctaggctccagtgatcttctcacctcagctccccaagtagctgggactgcagccatgcaccaccacacccggctaatttttgtattttttgtggagacgggatttcaccatgttgcccaggctggtcttgaactcctgagctcaagtgatccacctgcctaggcttctcaaagtgctgggattacaggtgtgagcccactgtgcctagtgaaaaaacttttttttttttttttttttttttttagagataagatcttactgtgttgcccaggctggtctctcattcctggcctcaagtgatcctcctgccttgacctcccaaagtgctgggattatgggtatgagccaccgtgcccagcctaaagttgctatttttcccatgatgtttatcttcgtggtgcttatgaaatggcaactatggcattcttccttctcgtgcatgcctgtgtgggtgtgccctcagcatatgcttacaaggtttattgggtgatccaacgctagccgcaagagctattattagcycccttttacagctgggaaaacagactcagaggagtggagaacttgctgcagatttgttaagtgtcagagccaaatatacacttggattatcctgactccaaagccggagccctgctggtcagtcggtgacaccgggcaaccacagggatccccctcaatcccacggaaggctgtctactgtcttcatctcagagtgttgacagctcaaagcttaggaggctggagctaagttcaataaatgaacgtgatgaataggagaaaagcgccattaaagccctccagacaagaaccactttggagcccctccatgggtccctggggtgtaggaggggcaggaaagcagataagattccattctgagcctctgcacttgccctatgcaagatagccacaagtaatgttttgtcctcacctcattagcaacaaatggccacactcaggggattaaaaaaagaaataacagccagcctttatcagcttggggctcttggctaattcctctttaagcttaagacaactctgcgggtggagtgatccaaacgactttctccactttgcaagttcccacactcggctgtatccttctgcttgagattggcagccccctggggatggttcctgctcacccaactcccctgaggctgctccccagtagaggcagagagaggaagggcactgatgtcctcagggcccctgcaataggtcaggacctgggttcactgctccatcaatcccacattgctcggccctcactagcaccacacagggtgggtggcagcctccccatttgatcratggggaaaactcagcacacctacttggccccagaactgagagtcaaacctggggacccagcttcgctgccctcagaatgttactcttccctcctgggtagcrtggtatagatagtgtagtattcttgtccccatataacggaagaggaaactgaggcccccagaaggctaagggactagcataggccttgtgtcttagcctgttaaggctgctatatcraaataccatagactgggtggcttttaaacagatatttgtttctcgtggttctggaggctgggaagtccaagatcaagcttggtatctggtgagggcctagtgctgccttctcgctgtgtctcacatggtggaagggacctgctagctctctgggtctctcccccaatgaggattgaacccccatgatctcatcacctcccaaaggccccacctcctaatatcatcactttaggggtaaggattccagcatatgaatttgagggagacatgagcattcagaccatgacaccttgtaatcagaaaggggttaaatatctttggttgaatatcctgtcctgccgattcagaatcactgctgtctataacctcttccctagatcactrttttagatgatgatgataaagatgatattaacggcaattaccaagctcttaaatgtgctgtgggtaaaacaattttaagctctttctgaatccagtctctttcaatcatcttcatgcccttgaaaggtctggatttttgtcgatttccctggtgaggaaacgggccctgggggcagaggtgatagggtggagccaagaagtaattcccagctgtttctctgcagaggcagtgctgctacaaacacatctccaggaaggggtacagccaaatgcttctctgtctcttgtgggttttgcagtggctgtcagctatgtgtctggcccggttgggaatgatgggggactgtgtgtgggaatgaatggctctgtctggctggctcagtctttacagaggtgctaggagtgtctgtttggtgctctgactaatcatgaaaagttcacgtttttatctttattttatttttatttttggtacccatggtgcattacagggaagggagacagcgaaggagaattatttgttataaaatagtaaatattggccaggcacagtggttcacacctgtaatctcagcactttgggaggcagaggcaggcagatcatctgaggtcaggagttcgagaccagcctggccaatgtagtgaaaccccatctctactaaaaatacaaaaaattagccaggcatggtggtgggcgactataatcccagctactcgggaggctgaggcaggagaatcgcttgaacctgggaggtagaggttgcagtgagccgagattgccccactgcactccagcctgggcaacaagagcaaaactccgtctcaaaaaaaaacaaaaacaaaaacaaaaaccgtaaatattaaattgaaaaagggacatacttaagggagtgaacctgaaaagccccagctgacacttggcaacaccttccttgtttgttttgggcttttttgagacagagtctcactctgttgcccaggctggagtgtagtggtgtgatctcggctcacctgagcctcagcctctccaggctcaggtgatcctcccacctcagcctccagagtagctgcatacaggcatgcaccagtacaactggctaatttttgtattttttgtagagatgaggttttgctatgttgttcaggctggccttgaactcctgagcccaagcaatccacctacctcggcctcccaaagtgctgggattataggygtgacccacagtgcctggccagcaccttccttgttaaattgcatgtgtcagccacctccctcggtgtcctcccagcctctgggcagtctggctccccattcctttctttatccaacagcatttttttgtgagacaaggccttgccctgttgcccaggctggagtggagtggcacactcatagctcactccagcctccaactcctgggctcaagtgatcctcccctctcagcctcccaagtagctgggaccacaggcrcagatcatcacgcctggctaattttttgattttttgtagagatgaggtctcattatgttgcccaggctggtctcgaactcctggcctcaagcaatcctcccgcctcggtctcccaaagtgctggaattacagatgtgatccaccacgcccggtcattctaacaatattgattattagatgttgccctagacacagcctactgtgcgtatgtgtaaatacgaattgaatcatcccacaagtagctgctaagtagaggaggtccagagagtggggaagtgtagccctggggaccttgggaggacaggggaggcttccttggaaggtgaagtgtaggcttggctagggaacttgatataggttctatgaggctgctggggctggagcagagagaagggggagaatgtaggaggtaggagtggaggcccaagagggagagcgttggttttcctgtctcctacaccccttcactggccagttctgctttcatgtttttatttattatatattttttgagacagagtttcactctttcacccaagctagagygcagtggcacaataatagctccctgtaacctcgaactcctaggctcaagcaattttcctgcctcagccttccaaatagctggggctacaggcacacacctctgtccacagctaattaaaaaaaawttttttttcatagagataggggtctcgctttgagtctcaaactcctcgcctcaagcaatccttctgcctcagcctcccaaagcactgggattacaggcatgagctcctatgcccagcccagttctgcttttacaataccagggcttcctgtaggtttggaaaacacctgttgggttgcagcaaaggctctcaaagtatctcttcttactcagcatgtcatcctaaccaactctgccgggagagtagagtggggagatgaaggctggagaaagagaagggccctcacttacagaatggcttaggtcatgggctctggagctgggttcacctcccagctctgccccggctattactttgtgcctcagtttcctcacttgtcccgtgaggatgatgactgtgcttactccagttgttacaagggtgattcggtcagtgtgtagggacacggtgcatggacaggacaagttcaacaggcattagcagtcagctgccgaggacccaccgtcaagggccatgcagtggccacmttcacartcacaccacagaagatccagaacctctggcatctgcctccgtgcggggcattaggtagagagccacttttctgcaggcaatggaggctgagacytttcttctttactagcccaggggtattgatggccctgcagagaygggttttgattacctctcactggatcccccagcagcctgttaccagaaagaagggcagacgcagggagcctgggtctgtgctcagtccccgctgggttttctccttttatggtcagcctacmgtgctctggcttcccagmcagaatccaccagcttgtgtttgggcttgggccgaaatagctggtctgtggggagctgggtacctcctgggagtcctcaggcccacagcgggggaggaaccgctgaagccctttatcttctcaggaaacgtgcctggggccttacacatccgaggctgggtggggagtctggggaggaggaagggagagaggcaygtttaaggatggggtgtgaggtgacatgagccccagggatctgggctgggaagctcagccccaggcgggtcctgatgatggccggccgcccccagctccagccttcccagactccacggaggctcggtactgtgtccccgcccactttggagcttctgtcccaggccctctgcttgggatgctctgcctcgacctctccccaggagattctttcacatttttcttaatgctgttcagtggtcacctctgccgtgaaggcttcctgtcttgctcaggtcagtgtgaaaaaacaaacaaacaaaaaacctgacgtctatagcacttgggttcacatccatcgtagcactgctcatctcttacggtcatttctttgcccatctgactcccaccctgggtcatgaacttctcaaaagcaaggataagcaagtcatgaagctcggtgcattggcttgagcctgtgatttcagttacttgggaggccaaggcgggaggatcacttgaggccaggagtttgggaccagcctgggtaatattactaagttaccttactaggccctgtctctacaaaaaaaatgaaaacaaaaaacaaaaaaaccattagccaggcrtagtggcatgcacctgtagtcccagctgctcaggaggctgagatggaaggatctgttagcccaggagttccagactgcagttagctatgatcgtgctactgcacttcagcctgggcatcagagtgacacctcatctcttaaaaaagaaaagaaaaaaaaaagcagatcttattgacttttgtgctttcggtacctggctcaggactcgtttgttgaatgaatatgtgaacacgtgaatatgcattttccattgcttctaccttggttgcctctctgagccagagagcaattcaaaataacaagcatttcctgagcacctactgtgtgtcaggcattgttccttgtacccgggatcaggcacagcccttgaccttcaggagctcattggttcaggggaaaagcattgaaaaygaacaattttgtaattgttggaaacctaatagagctgcatgaagtggaagaagtcagatttataatcattcagaggtggtataaaatgaacatcatttttaaaaaaggtttatgcggtataatttaaataaattcattttaaggatacagttcacacctaaaattgcagctatgtctgcataactgtctaaattcactcataatttacatggttatgcagccattgctgcaatataattttatatttctatcatcccccaaagaaatcttgtgcacatttttttgtcactccatattcctacccgcagctcctggcagccacgaattcacaaatctactttctgtctctatggatttgcctattctggacatttcatataaatggaatcatatgtgaccttttgtggctggcttcttttttttttttttttttttttttttttttttttttgagacagagtgtctcactgcactcgcccgggctggagtgcagtgatgtggtctcggctcaccacaaactctgcctcctgggttcaagtgattctcctgcctcagcctcccgagtagctgggactataggcacgtgccaccacacctggctaatttttgtatttttagtagagacggggtttcactgtattggccaggctggtcttgaactcctgacctcgtgatctgcccacctcagcctcccaaagtgctgggattacaggtgtgagccaccgtgcccagccggctagcttctttcacttagtataatgttgtcaaggttcatccacgttgtatcatggattcatactatttatatattttttaagacagggtctgtctctgtcaccccagctggagtaccgtggtgcagtcgtggcttactacaacctccacctcctgggctcaagccattgtcccacctcagcctcttgagtagctgagaccacagggattgtgccactatgcccagctaatgtttgcrtttttttttgtagagatagggtttcaccatgttgcccaggctggtttcggactcccgggctcaagcaatccacctgcctcagcttcccaaagtgctggaatttcaggcatgagccatggccgccggccataacatcctttcttttcatggctgaatactatcccactgtctgggtagaccacattttgtttatccatctacccattgatgaacatttggttgtttctattttttggatattatgaataaagtccataatttttaccaatatggaaaagaaaaacaagaaaaactctgaatgccatatcatggatagatggcctattatcattccatatcatctgtacctttttccgccagaatgttttgagacatttattaagtaaggatcacaatgatgataattactaaaatggagagaacctgtggaccatgggaaccactaggccatgtgacactcatgtttatattagagaaaggcaccgttttctcaaagcacttttcctccatctgctgaaagattattacaataaatacacaatgcaatacaataaatgaccaatgcaaatagtttctccatagagttatgcagtgtacaacatgcaccacggtccayggccatcctgcaggtaggaggtcaagtggaaaggtctccaactcagctctagaaaagtgcagagttagagaaggtatcatagaagagttgactcccaagacgatgtttcagatacagattagggtatgtacccgaagaattgaaaaggtactcaaactaaaacttgtacaggaatgttcatagcagcactatgcagaatagccaaaaggtggaaataacccaaatgtccgtcaactgttgaatggataaacaaaatatgatccatccgtacaatgtgatatgactcagccacaaataggcataaagtctgggacctgctacaacatggatgaacttcagccacatgctgagtgaaagaagtcagacatgaaaggccgcacatgttataattccatttatgcaaaaatatctagaataggtaagaccatagagacagaaagcaaattggcggttgcaagggcttatgggggagtggctgcttaacgggtagagggtttcatttgggggtgacagaatattttagaactagataaaggtggtagttacgtaacattgtgaatgtactaaatgctcctgaattatgcactttagttatttttttatctttattactattttttgagatggagtctccctstgtcacccaggctggagtgcagtggcgcgatctcagctcactgcaaactccacctccctggttcacgcgattctcctgcctcagcctcctgagtagctgggattacaggtgtgcaccaccgcgcccagctaatttttgtatttttggtagagacggggttttgccgtgttggtctcaaactcccgactttaggagatccagctgtgtcggcctcccaaagtgctgggattacaggcataagccaccgcacctggcttgaattattcactttaaaatggttctttttatgtagtgtaaattttacctcaatggaaggaaaaaagagagagagagagagaatggattaggccagagaagaagtggtggtgggtgcactgggcagaagaaatcacttgtgcaaagcaaggagggagtgaaactgctttgtacggtggagaacactgcttttgagtccaacacaagctcaggcttggggaaggaatcagataaaaatttccaggatctcagagttccctgtgctccacacgggttggcagacagcacccacatggagtccttctgctcgtaaccagcaccctgcaagcttcccacgcctggaagtggtgtgtttttgatgggaacgtcaggccagaggtctcccagcagcccccagctcggagccgcgctggcagctcccaggccttctcctggagcccgctccctctcctgggggccctgtgagcatctgagcctataaatctctcctgctctgggcctaggattcacaaggctgccaggaaagcctgcctctctccctgaagtagtggatcaacacagcccatctgtctgtccatctcaaaatctttccttaagatagtggaggttgtctgggccggtcccaggaggttctctctgtctgggttctaatcacagggtacctggttcttctatccttcaccctcttttaaaaaatcactttttagtactttgggaggctgaggcgggcggatcacctgaggtcaggagttcgagaccagcctggccaacatggtgaaaccccgtctctacaaaaaatagaaaaattagccaggcgtggtggcacgcacctgtagtcccagctactcggggggccgaggtggaagaattgcttgaaaccaggaggcagaggttgcagtgagccaagatcgagccactgcactccagcctgggtgacagagcgagactccatttcagaaaaaaaaaaaaaattaaactggtttcccattttgctctgtcctcgagtgaatttctccccctgggtggaagctaaaggcacgggtatctgtctgtctccagagtataatggagagattaaagtttgattgcttttttcctgctttttttttctttgagatggggtcttgctctgttgcccaggctggagtgcagtggcaaaatctcaactcactgcaacctccacctcctgggttcaagtgattctcctgccttagcctcccgagtagctgggactacaggtgcctgccgccatgcctggctaattttttgtatttttagtagagatgggtttcaccatgttgcccaggctggtctcgaactcctgacctcaggtgatccacccacgtgctgggattacaggtgtgagccaccacgcccggcctcctttctcttataaatagggacaccattgatttaggtctcactccaagccaggatgacctcatctcaacatccttcccttaattacatctgcaagacccttattctaaataaaatcacaggtgggatacagtggctcacgcctgtaatcccagcactttgggaggctgaggcaggtgggtcacttgagcccaagagtgtgaaaccagcctgggcaacatagcaagacccaatctctacaaaaaatacaaaaattagccgggcatgctggcatgtgcctatagtcccagctacaggggaggccgaagagggaggattgcttgagcctgggaggttgaggttgcagtgagctgagatcacgccactgtacacccacctgggcgacaaagtgagaccccatctcaatcaattggttagtcaataacatcgcagtctgaggttctgagtgaacatagcttttgggagtcacagttcaacccaccctagtgaccttgggcaagttgcctcacttctgaacctcactctccttatttgtaaaatggaggcaatgccagtgcccaccccaggagctgctgagagaattcagtgggtcacttcaacacagaagttcagcatacgcctgcagtgcagtgagtgctcgggagatcggagctgttagtgggatcctaatgcggtggctctttcttttctgtctttttttagctttgtggtcatgatggtttcataaagaacaataccgactctttttctattgaccatttttggtgggatgaggaaaagattgtatgtgttcatagcacaaacataaccaggatagaagtagaatgggtgaaagtaggtcttcctcctgtcccttttctcaatacttcaggctcaggcctgtttgttggttttttttgtttgttttgttttgtttttggagtctcgctctgttgcccaggctggagtgtagtggcatgatctcacctcactgcaacctccacctcctgggttgaagtgattctcctgcctcagcctccggagtaccttggattacaggtgcatgctaccatgcccagctaatttttgtatttttagtagagacagcgtttcaccatgttggccaggctggtcttgaactcctgacctcaagtgatctgcccgcctcagccttccgaagtgctgggattacaagtgtgagccaccgcacccatcccaggtctgtttttagagatagggtctcactccattgcccaggctggagtgcagtggtgtaatcacagctcactgcaaccttgaactccttggctcaagggatcctactgtctcagcctcccaagtagctgggacaaggggtatgtctatcacacatagctaattaaaaaaaaatttttttttgtagagactgggtcttgctatgttgtccaggctggtctggaactcctggcctcaagtgatcctcccatctcagcctcccaaagtgttgagattacaggcatgaaccactgcatcctacctatatatctgtctttttaaaacacaaaaggtataacactatgctacctcatcttttatttttagcttaatatattttggatatttttctgtgtccatccacaaagctctgcctggttcttttcaatggctgcctattttatttatgtatttatwtcttatttgtttttgaaacagagtcttgctctgttgcccagcctggcatgcagtggcacgatctcggctcactgcaacgtccgcctcctgagttcaagcaattttcctgcctcagccttctgagtagctgggattacaagcgtgtgccatgacacccaactaatttttgtatttttagtggagatggggtttcaccatgttagccaggctggtctggaactcctgaactcaagtgatccaccctccttggcctcccaaagtggtgagattacaggcatgagccactgcgcccggcctgcctatttttaaatgtgccattatataaacacaccagaattgaaaccccagagctgactagtctttaggccttttgtcttgaggatttcgttcaaccaggccacccaaacatccatctataatccgagggaagagagagagaactgattggagttgggcatagaatctgaggaacgtgcccacatccaatcagttctctcttaagattacagatggaagaaagagtcatctctttcaccttgccttcttcagtcccatccatcctcccattcatattcccatccatccatccatccatccatccatccatccatccatccatccaactcatttaccggcctatacactctgtcctccctcccattcacccacccatccactctctcatccactcactcatccttccctcctccgtccaaccatccgtccaaccagctatatacccacccatctacccatctacacacccttccctcctttcttctttctttcttcctatctatccatccatccttccttctttccatccatctattcgtccacctacccacccacccactcatccatttgtcttcctgtctctctacctgtccatctatccatccttccatccagccatctgtctgcctattcacccagcctcccatccatttatcctcccgtccatttacctatccatccattcttccatccacccatcctttcttccttccttctttcctttcttccttccttccactcacttgcccatccacctcttcttccatcctcccatccatctactcatctatccatccattttcccacccatctgcccatccacccacccacctactcacctactcatctgcttatccaccctcccgtccatctgtctattcatccayccacccacccatccatctacctacccatctacccacccttccattcacccatctacccttccttcctttcttccttccttccgtccactcatcttcccatccatctactcatccatccctcaatccatccatctaacaagcataattcagcacctaccatctatgtgccagtactagagatacaatgtaaaaccaagcctaggagatttttgatgaaatgaagcttgtgagagctgagcactgaactagtaggactgaagccagggagtggatttaagaaatgcttgccactgtggcattgtctaccagcagatatgatgctgggatttctacattgttaggtgaccattgaacgtattggtaactgttctcagatctctctttgggaaggaaatgggtcttcagagcctggctccacctcagaggcctctttaagagtagaaggtgatggrtaatgtctgcttaatcacatctagttctttgatgacctctgtatcttttgggtttctctggtggtaaacaagagagactgactctgtcatctagtagaggaaagggatttgtaggggagtatggaggagctcacagttgcagtgggaacactaggaatcaggctaggtaaatgacagaaactgggctgcttgggcccaggggcagaaaggaagtctgcctcagggctctgtccacctgctgtgcttccctgtccttgactgagcttggagttttaggccagagagtctgaccaatgcagcctggaacacattcttacctctttgttgaaggtacttatgaggcagtcccactaagactgtacatgacggtaggggtgatgggggaaacctcaaggaccacaggatgcttctggaagaagaggaaatggatgctggatttacaaaaaaacacaaatgtgcacaatactatattacagatgaaggaactgaggcatggagtttaagaatatttgcccaaggccacagagcggagaagtggctaagggggaccccaatctgtatagatccaacatctgcgtttggtccctaacctaatctgggtggggtgggcctcccgggacacctccagagctgatgtggctggatgctaatgactcctggatcagtcaggctccagcatctttctggggctgcctctgggactttggggctgcccttttggctttggtcgtggcccctgtagcctgggcaatgagcccagctgacctgttgtcacttccaatgaggccagcatggagaagctttagaatgggagggccctgggaggagccaagtccagacccttagctcagagctcattttaattcatggctcttttttcttctttctgtttgcagatcgggaggaccagtccattctatgcacgtaagtggaactgctttttcttctgttttttttttgkttttttttttttttaatctgtagtcgagatccaacctatgaaagaaaagatccatgagtgcagagatctttgatttgttcatggttccaagtgcctctctttatacctggcaccatgtagatgctcactaaacatttgtgatatatggtcttctgcggaggcaggcaaacttaaactcttaatgacacctgctatcatttggttccatacctctcctccttctaaaaaactagcatttattgaacatgtactctgtgccaggacttgaactaaagattttatatgcagaatcttatctaattgcataacagccatctgtgttgatagggaagatgttaaactgtcactttagtatttcacatttatcaagccacaaacacatcagtgccatatttggtgattggtatcactgtttctttgaagacctaggtacataggcagaagatagtaactcaattttagaatcattgagagagttttcactattgtatttatatgcaagtaacatatattaatatatattgttgattcattgacattgaactcacagccagcagctctgtggctgatgcctggatgaagtttatctgatgtgtatttattacataatgggtatcacaactttattgtgcttggaaacatgagccaacacttgagcactatgctggggacatttttgtatgtgtgctgccgaagggagcacatctgaggggacattttaaactgcaaaataactaacaaaaagccacaaaaatacaaaaaaaggtggcactaaatacactacagaaaggacacttgtttacagtatgagagttgaaactagaaggtagagcattcccctgttcaacctgagctgggaacgtgtgcattgggggaatcgaattttccttactctgcacatgttcacaaatgactacaaaagtgccatgaatattgattttggggttacaaataactttcagcaggtcggtgaatttgaaaatatagaatatataaataatgaggatagactgtgcatatatatatttacataatatataatatgtattatatttaatatatttatatttatatatatatatatttgaaggtctggaagcaactaaagctataatcaacagaggttatttaaataaaatatagcatttccaggtagccactacaaagagtgaggctgatctatttatgctgagagagaacgctctttatagataataccgttgagtggaaaacacaggggcaaaccagcatatgcataatgtaaccgtgtgtgtctttaaaaagagcaggattgcatggacgtgcatatgtttcctatttgcatgaaattatctggaaggacaattaaaaactagtaattagaatttcagatggtgatggatggtaggatggcaatgaactgtattgagagaagattgaaacaattaataagtttggggttgatatagatagaaaacctggaaacaataaaacaaaggcaattataaactccaggaaaaaacaaaagttgggatggaaggagaagtaatcacattggactaaggagcccagctgtgcaagtttggagtatttatctaaccagaataactmcctgtgatggacttggctctgtggggaaagggaagaggattagatgggaactgaattctcatattccatggtaggatgtacacatttgatgtttgacaatgaatagtctggatctagagatataatgctacctagctatgaggatataaatgctaaaacaacctgccgacttggtttcctagttttctggcttctaggggtcacctgcattccttggctcatggtctcttcctccatctttaaatcctgcagcatggtatcttcaaatctctttctctggtccccctacctctctcttataaggcccagtacctttgtggttatattagccccacctagatgatccaagacagtctcctcatctcaagcaaacatattcacagattctgaggataggccatggacattcttgtgggggctgtttttcagctagccacagaggcatttgatcccctaggagccaaacccatgtgtgagccacatgtcatctccccaggaaccaaaatagtgtagctcaactgccctctgttgagtgaatgaattaagtgtggtaacagagaggtgcaggaaagagtaggactttcagatggcttcctagctatgtagctatgcacgggtcacttgacctctctgagctgagcttatggagaggctgtgaagatgaagaagaggccaccctgctctcatttccagcacccatgccatcagcaggtgctgtttcatctaaaacggtgctatccaaaagaactttgtgatgagcacaaagttcacttaaaagttcacttaattgagctcttaaaaagtggcaagtatattgcagaactgaatttttaagattttagttaatttagatagcggttcctgccttggacrgtatgatgctgaaatatttctcatctctgtccattcctctgactccaccgcctcttcctagttcagggtcccgtcacctctcaccagggcctctgtagcagtctcttaagctccctgctcccattgcttgcttgcttccttcctttaataaatatacattataagaatattcactcattattcattgaataaatattcattagcatgctgtcataaagtgtggattccagaacctaaccccttgggtttgaattctggccccatcatcgtctagttagttgtatgctccaggaaataagtcagttcacttctctgagcctcagtttccccatctgtaaaatgggaacaataagcaccccattgggttgttggaaggatgaaatgagtcactacatgtgaagaactgagaaacaggccactgccccatggtgagcactttgtaaggatcagctgctattgtagtgaaagtgctcactattttttaaaaatccttcctgcaatccagtatccatcttgcagtttgtttgtttgtttgtttgtttgtttttgagatggagttttgctctcattgcccaggctagagtgcaatggcgtgatcttggctcacagcaacctccacctcccaggttcaagtgattctcctgcctcagcctcccgagtagctgggataacaggcatgtaccaccatgcctggctaattttgtatttttagtagagacagggttttgtcatgttggtcaggctggtctcgaactcctgacctcaggtgacccggggagcctcggcctcccaagtgctgggattacaggcatgagccgctgagcctggcccatcctgcagtttgttgttgttgttgatttttttgttgagacagagtctcactctgttgcccaggctggagtgcagtggtgcgatcttggctcactgcaacccccgcctcctgggttcaagcaattctcctgcctcagcttcccgagtattatgccatcatgcccagctaatttttgtattgttaatagagatgggttttctccatgttggccagcctggtctcaaactcctgatctcaggtgatccacccacctcagtcagcctcccaaagtgctgggattacaggcatgagccacttcgcccagcccatcctgcagttctgattctccccacactggttctaaagtcccgttcccctcgtgaaatggtttcctgcacccatgagaataaaactcagattccttactgtgacttggaagactgagtgtgatctgctcttccctcttcacttcctgctgtcctcctctgttgtggccctccagccatgctgggagccattctgtctcatacctgggcccagcatttccctcccttggacctctgtccatactgtttgccctgcctggcccacccttccctccatccttcccacagggctctcttgtaactttcaaggctcagcaactccctggcttccccatccacagcctcccctctcctcccttcccctcgatcttctcagtcacatcacccagatgtagcaatgatatctccaccacgaactatcttgattatttgtttacttggctattgtgtatctccatctcctggaatgcagcgttagcaaggacttggcacactgcccacacacagccagtgctggagaaggaggccttagccattgttaggraggaaatcccaaaacgatcmgacttttatttgcaaatgcatccagtcagcccagaaccaccaacatcttcagtctctgtattcaattttattttgcttgttgtgaaattcagccaaagtgacttgaaggacctacaagttgacagcagggctgagcttttacgcgtagttggtgcttaagagaagccaggctggagccaactgtttggttatgcagttaagaaactgaaaattggccgcgcactgtggctcaggcctgtaatcccagcactttgggaggccgaggcgggcggatcacgaggtcaggagttcgagaccatcctggctaacacggtgaaaccccatctctactaaaaaaatacaaaaaaattagctgggcatggtggcgggtgcctgtagtcccagctattcaggaggctgaggcaggagaatggtgtgaacctggggggcggggcttgcagttagcagagatcgcaccactgcactccagcctgggtgacagagcgagactctgtctcaaaaaaaaaaaaaaaagaaaagaaaagaaactgaaaattggccacgcaccgtggctcacgcctgtaatcccagcactttgggaggccgaggcgggtggatcacgaggtcaggagttcgagaccatcctggctaacacggtgaaaccccatctctactaaaaaaaatacaaaaaaattagccgggcatggtggcgggtgcctgtagtcccagctattcaggaggctgaggcaggagaatggcgtgaacctggggggcggagcttgcagtgagctgagatcacgccagtgcactccagcctgggtgacagagcgagactctgtctcaaaaaaaaaaaaaaaaaaaaaagaaaagaaaagaaactgaaaattggctgggtgtggtggcttatgcctggaaactcagggccttgagaggccgaggcgggagggtggctggaagccagaagtttgagaccaaactgaggaacacagtaagaccccattactacaaaaaatttaaaaattagctaggtgggatggtgcatgcctgtagtcccagctactcaggaggttggggagggaggatcacttgagcttgggagttagaggctaagtgagctatgatggcaccactgcacctcagcctgggcaacagagcaagacccagagacaggaaggaaggaaaggaagggaaggaagacaagaaaggaaggaaactgaaagctgaataaatgtaatttttaggcctgagttgtattttgtctagcatgtaatccatccagtataatcagtttaattagaggccatgggcctggctggagatagagctgtgtgatcagggggctaaagtaagaggaggagggtggtttcacataaaattagagagaggtargggggtgcttccaggccctggggaggagtttaaactttcgtctaaaatggatgacaggctgggcatggtggctcatgcctgtaatcctagcacttcgggaggccaaggcaggctgatcgcttgagctcaggagttcaagaccagcctggccaacatggccaaaccccctctctacaaaaacaaaaattagctgagcgtgatggcatgtgcctgtagtcccagctacttaggaggatgaggcaggaggatctcggttcactgagcctgggaggcagaaagttggcactgagccaagactgcaccactgcacttcagcctgggtgacacagtgagaccccatctcaaaaaatatatataacaataaaataaataaatgaaatggatgagaacgtgctaagggactcaagccaaggaaggacaaagtttaaccagtgggtcaaatcaggcccttgtctgtctgttccagataaagttttattgaaacacagccgcacccacttgtttacgtatttgcttttgtgctgcagtggagagctgagcagatgtgacaaagaatgcgtgaccctcaaagtctaaaatatttactgtctgaccttttacaaaaagagtttgctaactcctagcttaaacagtgggaaaatgtgaatattatttatattgtaatgataggatgaatgctgaaaatcattatacaaacaatatatracttctgtggaagcagtggttataaaagtaataataggtgggcacagtggctcacacctgtaatcccaacactttagggggccgaggcaggaggattgcctgaggcctggagttcaagactatcctgggcaacttagcgagaccccacaaaatcaaaaaattagctaggtgtagtggcacatgcctgtcatcccagctactcaggaggctgaggtgggagggtcacttgaacccaggagttcgagattgcagtgagtcaagattgtgccactgcactcyggcctgagcaagaagcaaaactctgtctcaaaaaacaaaagtaataataactaacattttggcataccaggcattgttctaagcattttatataaatgttcactcatttaatcctcataagaatcatataaaaggtcaggcatggtggctcatgcctgtagtcccagcactttgggaggctgaggctagagatcacttgagaccaggagttcgagaccagcttgagcaacatagcgagacccctgtctctacagaaaatttaaaaatcagccagctgtggtggtgtgcacctgtagtcccagctacctgggagattggggcaggagtatcacttgagcctaggaattctcagctgcagtgagctatgattgcatcactgcactccagcctgggccacagagtgagatcttgtctcaaaaaaaaaaaaaaaaaaatcatacaaggtaagtgtttttattatacccattttataatggggtaaagaaactgaggtatggagaggctaaatgacttgcctaaggtcacccaggtaactggcagaggagggatttgaacttgagcaacctggtcctggagcccattatgctattctgccaattgatgctayaggggagagaggcgttgcttctgcctggggttttgcaggacgtgtaggagttgtacagtacaaaatgccagggtgctttgccagtcacataaagaccagggactgaatagctgtgaggttcatcagagacaatttggctttcctaccagtggcaaaccacaggctgcaatggacttggcaatattcgaccctgggagccaggaccagctgcagaatttgtagaattttgcaaaatgaaaatgctggctgagtgcagtgactcacacctggaatcccagcactttgggaggctgaggcgggcagatcacatgaggtcaggagttcgaggccagcctcgccaacatggtgaaatcccatctctactaaaaatataaaaattacccaggcatagtggcgggcacctgtagttccagctacttgggaggttgaggcaggagaatcacttgaacctgggaggtagaggttgcagtgagccgccatcacacactgcactccagcctgggcaatagagcaagagtcagtctcaaaaaaaaaaaaaaaaaaagaaaagaaaaaaaatgcagagcgtttataaagaattaggaagaatttccagatggcaacattagagtatgaagcacagggtggtccctgtgagacggtacaggtcacactcatgaagccagcctggctgggggattaagtggccattgggtggttcttcccagctgctggggctggactgattaaaaggacttggcactggggtagttacaaggccaggaggccataacgtggtcatgagtctggtccttctccgggaagagggagctcagtaccaaattccccaagaaataagaaaggagtttagggtgctcagaccaggaaggcatcttcacccctagaggtcaggggtcagaaaagccaagctatgaatgtttctagaaccagctctaagcacatcaaccttcagacgcccacgagcctggagcttgggatgttttctttggcagaacctcccagggcaatttatttttctcaacagaacttggaaacagtggagcccagcagcaacatgggaaggggtagatgcccagagtttatgtcccactccccatcccaggcaaagtgggagaccatagccacggatagggcacattgatgtctttgtttttttttttgtctgtctgtttgtttgtttgtttgtttgttttttgagatggagtctcattctattgcccaggctggagtgcagtggcacgagctcagctcactgtaatctccgcctcctgggttcaagggattctcctgcctcagctccccaagtagctgggactacaggcacccaccaccatgcccagctactttttgtatttttagtagagacagggtttcaccatgttggccaggctggtcttgaactcctgacctcaagtgatccacccgcctcagcctcccaaagtaccgggatgacaggcgtgagccaccacacccggtgatgtctttgttgtaaaagggaggaggtgagagaggttcaaggccagggtggaaaggaaggaactattgtgggaaaggagaagtgagcagcagcagtctaggagcactggtttgtcagcatgaagagtgtgatccacacatgttgtttgtgcacactgctgtcctgattcttgtcttggatctgaataggttcatgaccacctacgcaagtggtttcctacatccaaaaatttctctcctttctcttgctttaatcagaatccaaccccttcactttagaatgaagtcaagcaaggttctgacgttagcctgattgaagtaattcatacttaggtgtgaatgactgagtggcttggttcattgattggggcaagtaaagcctcctggaatatatggcagaattccagtggagtggggctgggacttcactctgtcttttctctttgctgatttgttaaaataaaagggtaggaggcagaacatgggccctggtgtcaagtggacctacgttcaaatcctgcttctcctccatttcctatctgtgtgaaagcaggagcaattgtgggctggagcaatttamttcaaacctctctttgcctcagtttccccggatgggtgatggggataattaataactctstcattagattgctgggtagagtaaatgaaaakatctgtgagcccaaagcctagtactgtgcaggccttcaacaaatatcaattccccttcccctgcccttcttctggccttagaaagcaagtccctagagggttgggcctgtgtcatggaacaacttggtgaaatgtagtaaaaggaattctgactgcattagaatcagagacctgactttccattctgactgtatcccttctttgctgtgtgacctagggaaaattgcttacccactctgggcaagactcttccttctataataacatggaagcaggaagaggataaaggaaataattcatgtagagcatttagcaaagggacccttccccctatatccccccaatgacaaacgccaattcttctctgtcttaagagatgggatcttgctatgttgcccaggcttctctcaaactcctggcctcaaggcatcctcccaactcagcctcctgagtagctgctattataaacgtggccagttctctgctgcacctggccagttctcctcttttacacacacacacacacacacacacacacacacacacacacacayatattctggtcttagtttccccttctggggaaatggggtaatgccttcatggtccccatttcataaactgcctctgaggccatgtgaaataatgtggccattgggaaggaaggcctctaggaagggaagggaccacacaaagtcaccgcaagatgtttcatcattcttggccatcagacacttgatttctggacagtgggacctgtaggattaggcacagcaatttggggcactttttttttctttctctttcttttttcttttcttctatttcttttttaagccatgagccaagttattaatgggcctttggcagagaaaattaatttctttatttcctaattaggaagaagagcagagactgtactagctttggtggcactggttcagcacagagaaccttgggctgacctcggggtgaacaaattcttttttcaacttaaaaaaaaaactctcttatattttagagtattaagtgagctcagaaaataaaagagataaggcaaagaaaggaaacacaaaaaacaaaagtaaactgaaaaatagaagaagacgataaacaagtgaagttttggtcaaggcactgtccttatctttcactaggagtggtggaacatagaggcagtatctggatggagcggttccattgtgatgatttctggtggccaaaacaggcagctagtgcacgaaagccatcttggtaaaaaaaaaaaaaaaaaagatctaccttcatattccaggaggacatacttttttgatacgacaaaccatgtcgtgctgatctaaacatatcagtcatttacactttagtgtgaattacttcaactgggtttattcttagatacttggctgagatcatcagcyagcttcctgatacatggggtgggattcctcagaggataaaggggcttgcatctgcccagtgaccaatgggataaccggttttttggtaaatttttctttccataagggagcttcttaaactttaggtcctggtactccagaggcacttacatcctttcttgaaggctgccttgtgcctggtctttccatttctagcaatgctaatgatgtctgcaggcggatcacgaggtcaggagatcgagaccatcctggctaacatggtgaaaccccgtctctactaaaaatacaaaaaattagccgagtgtgctggtgggtgcctgtagtcccagctacttgggaggctgaggcaggagaaccagggaggtggagcttgcagtgagctgaaattgtgccactgtactccagcctggggacagagtgagactccatctcaaaaaaaaaaaaaaaaaaaaaagtagataattccaaataaacctgtttggacctatgtaagaaaactaaggttttcttgttcactctatttttttagagatgaggtcttgctctgtcacccaggctggagtgcagtggtgtgatcatggctcactgtggcctcaaactcctgggctcaagccatcctcccacctcagcctcctgagtagctgggactacaggcatgcaccaccaagcctggttaatttttcttattttttatagagtcagggttgtgctgtgttgctcaggctggtcttgaactcctggactcgagtgatcctcctgcctcaasttcccaaatagctgggactacaggcatgtgccaccatgcctggctaatttttaaatctttttctagaggcagtgtctctctgtgttgctgagctggtctcacactcctgggctcaaatgatcctcccacctcagcctccccaagtgctgggatcacaggcatgagccaccacatccggcccaccttttcactctttgtatctgaattcttttctatgtcctcttggaagkaatagattgggcattggacctaggctggggacccagttccgctcactaccagagatgtggccttgggcaagttacttcccctctgggagcctctgtttcaccctctgggaaatggtggtgatgatcattattgtcctgcctggctcatggaactgcggaaaggtcaccatggaacgtgtgcatagatgatgttcccgtgtctttcagaggcgagtctggagccgggaaaaccgaaaacaccaagaaggtcattcagtacctggccgtggtggcctcctcccacaagggcaagaaagacacaagtatcacggtgagtggcagttcccaatcagaggccatgatttagccaaccggtctccagcttgcagcccaaccgagayacaaacagaacatcattgcaagaactcaggccccatctgactacccctcccctgaagactcaaagagggaccgtctttttggcgagcaggcctgttgagtgtgggtgatttcttggctcagctagaagcatccctccagaagggggcccgttttgtgaaatgagaataagccctttccttccatagcgagatcttcctccacgtcggggcttctcagtggtggcactgatgtcattttggaccagataactcttccttggaggggcttccctgtggctcgtagaatgtttcacaacatccctggcctcgacccgccagatgccgacagcccccttccctccagttgtgacaaccaaaaatatctctagacattgtcagatgttccctggggtgggacagttgccctygattgagaagcactcctttcatgaatctctgtaacgtcccaggggttaaggtaccttttgggttcccggattcctccacgtgtccccctgtccctgggatggagatgctggtatcactcggcccgtgggcttcagtgcaatgccattcagtaactgtggattgagcacctactgtatgccaggaaccacttggggtgrggacctggggataagtctgagagatgctgttattctcttctctgagcttccrgacctgtggaagagcatgtagttgtcaaagaatccctcaaataaacagatgatgacacggtatgactaagagcttgggaggaaaagaagagcaggtttctagagtcatcacctctagggcccatccttctcttcctcctcgtgtgtcagccctgccccatctatcccacaggagggggcacgtggtagggccgctaggactggccggtgcctccgtctgcaggtttgtgggtgggaagatggtaggatggagatctgaccacggcatggggtgtctccagtgttcgccattccagatgtcactttgcgtcctcagaggggactctggggcagccaccatggccggcttgtctggaggcccttggagatctaggatgggcgctggtcrtggctttggagaactttccttctccaaacaaatgcaggaaactcaagattcagcatcctagaattgtctctggcaagttggtttccagccatagtgagtgggaacaatggccccagaggctgtgtggcagtttaaacacagtttccactgccttccctttccctaaagagtaaacacaggagataatactttctaacaactcatcgttatcaagggcctactatgtgctgcttgttttggctgcatgcgtaaacacatctcagacattgtctcactggatactgttttaaggagcctaatgtggccccagtaattatgaaaacctttgaaatgtctggatctctaagaaattagaaaaaggagggaatggctgagcatgggggctcatgcctgtaatctgtgttttgggaggccaaggtgggaggatggtctgagcccaggagttcaggaccagcctgggtgacatagtgagaccctgtctgtaccaaaaaaaaaaaaaaaaaaaaaaaaaaaaatcaagagaattagctgggcctggtgtgcatgcctgtagtcttagctacttgggaggctgaggcaggaggattgcctgagcccagtaggttgagactgcagtgagctgtgatcgtattcctgcagctaaacagagagaaaagaaacagtatcaaggaaaaggagctgaccagtctgtctgggagactccaggctgtttggggggatcaaagtcatatattctccagcccctgatgtccatgtgatggaaataacgctgacatttgttttatactgtgttgttcaaccacagcaaggcccatcttttgcctacgtgagtaactgagagtgttttcctggtgtgtaggggaggcacggagtgaacttagatctgcatgatcctcttgcacccaccgagtcccgtagctggtggtagaaatggggtaggccctagagtttcacaacttaaatcagtaaatgcaccaaaataccatcctgtgggtgtctgatgccagggaagggtgtgggggtgcatttaccacccacgggacgcctattggagtccccagggttgcgctccagcctgaaatggatttctccggttcagaatgaacccctgcacccttcaaagcatccrctcctggtacccttgactggaacaacctagacagagatgtctgtcccatctggctgagtgttttaggactgtcaggccccaaagcttccctggctcgayggacagtcgatggcacagctgtggcatgcctccctcttctctccctgccatcatccctaagtgtcttccctcagccctgtccctggtgcaccagtgtgtccctgtgcatgcgtgtgcagtgcgtgtctgtctcttgcatgctggttgcttgactcaagcctccagaaacagtcttggaggtcgcgatgcactagctttggtggcgcggtaaggccccagctacgcaacgcataacctggtcctgcttggacctgtgcatatgtaaactcatctctaacacagagcttggggggctgatgtgtgggtcccagcctagaagaaacccacaggtgtcttccttggctcccgaaaagatcattcaatccatcttakttagaccctgggtgactgtgttgcagatcagaaggagaattacagttcttatttgggatctgcttttgtgtgaccttggccgagtcagttaactcctcggggctatggtttcatcatctataaaaytgagggtttgaaccaggtcccccgatttaaagctctcttgccaagacttttcaaccttacctgccagaatccccattctagaaagggagcctttttcagagagcatggagaccccaagtttatgtgaacaaaagtgattcctttagtcgtcttcccaccaacaaagaaatgcccgtggtgctccttgtaaatttccaccagtctcagctgtggtgattccacttgtagctgagatttgtatgcrgatgaggcttttgcttcatctttctctgggagctacaaaaaggaggatgtgtggacaaatcaaaacagaaacaaatagcagcttcctgctttgtcctgtagaccaggtaccctgatgccttcctagcatgcggaggaatgaggaggaagccatgcccatccttgtcccctctagacactttcccggctcctgtccagcccagccctgatgcctggaaaaataaggaagggaaagcaggaggggaggacaaggagaaaaactcccagaatccagggcctggaggcctcggggcccaactgcagccgccatgttttagggctaggccaagagcagctcgtttgctttcccagcttaacttaccacattggccctttcctgccatgattaatcacgtgaccgcgtttgtgcaaaggcatcccggcagagggggccggtgggctgtgtacagtctcagcttcctttaacccaatgaatggagctcaggcaacctgctttgaagctttattccgcagtccgctaagaggattcctggtgggttttgtgcattccttacttgtctgctgtagaagacttcagaaaaccagtcctgagaaagaaaaaattgcaacttaaaaaaaattgcactaaaataattagaaggaggcttgtagtggtttaacttgaagaaggctgcttgttaaacatgaacagcagcacgactgccatgtacagtgggacaggtggtgcactgcacaactccggggggcaccattcatcatgatgtaaatgacatcaccgacattgtgcaaggcagtggctttgagtggcagtgatgttgcacagatgagcaggccctggtcttgaaaaaagtgaccttcctagggagcagatgtcctagctattagagagctcagacagttgcttctcttctgaaatcctcctgtaaatctgaacattagcrtcagggtctaagaggaggtaggagataggagagaacctgtgggttaagggcagagttttgtgacaacatccatccaaggtagaactgtcaggacctaggttgctttctccaataactagatgtgaatgaattttagggagagctggaaaagcagcttctacaagcaaacccgattctggaggctttcggcaacgccaaaacagtgaagaacgacaactcctcacgattcgtaagtagcaaagccacatggattttccagaaaagctttggtgtcatctcctgcctggggctgcagagtgtttgcgtgcagaggtgggaggggcatctgaccctggagagatgggctgtatctcacaatcttgcaagggctcctgcctctcactctctcattcattcattaatttattcactattcactcaacaaatattgattggcctggtgcggtggctcacacctgtaatcccagcactttgggaggctgaggtgggaggatcacttgagcccaggggttctagaccagcctgggcaacaaagcgagatcccatctctattattaaaataaaatttaaaaaattaggtattgagcacctggtatgggctagacccttatatccgataccattttatgtaacaaaacatgaattgagtgccaactgtgtaccaggcacacacctcctccaagaaatacttagtaagtacctactgtgtayaattactctggtaggyacttttacatgtaccaccattctctttgtttttttctcatttgctgtttttattaagtgcctactgtataccaggcactcagcgagtctcacaggattgcgatgaatagttcagatatggttccagccttcatgaagctggttcttccmactgaataacagagagtaagtgaggcagggggtactaccttcccatgcacactcccccaggctccaaagcaaaaagtttttgcctgagcccaacagggcaggggaactctgaaagtggatggttgatgataggtagacaacaatggttttattgtgcaaaagaagcggttgtctccrtaggagggtcagaaagatattttagtgagaaaagatgaaggaaaaattgcctctgcattccwkgagaagggggtctctgaactgttgctcgctgagatggggccctgtgaaagactctttgcagaaagctctgctctgctgagcaaatgcacatggtggtccctgaccctgtgatccccaaggcccattttagtaacaaacaattacataatgtctcctttcctcgcccgaaattagaatcatagatagtatcacctcctacacgtattagatgaatacacatcagcataatgccctaactggaatatgaagaagaaataacataagacaattcataatgaaagtgtgcatttcaggccaggcgaggtggctcaygcccgtagtcccagtactttgggagactgaggcgggcagatcacttgagctcaagagtttgagaccagcctgggcaacatggggaaaccccatctctacaaaaataaataaataaagtgcatttcagcatatcaatgctcgggccaggccacaccaacagaagacacagtaagagacagacacttaggtctatccayggcgacagctacaaatacaaggaaaagggtcaagttcaggcactgatgatgttggcatgggattttccagaatggcaactgactctcagtgaagcgctgaaccaaagaacaatcttctctagagtcacacagatgggatattcttgtattagaacaacattttaaacacttgttaatgctttcatttaaaagcataaaaatctagaccaggcacagagtggctcacacctgtaaacccagcaccttgggaggctgagttgggaagatcacctgaggtcaggagtttgagaccagcctggctaacatggtgaaaccctgtctctactaaaaatacaaaaattagctgggcgcagtgacacatgcctgtattcccagctactcgggaggctgaggtgggagaattycttgaacccggggagatggaggttgcagtgagccaaagtcacaccactgcactccaacctgggcgacagagtgaggctcttgtctcaaaaaaaaaaaaaaaaaaaaaaaragsgtaaaaatctaaagtcataaaggttaggttctaagcctggctaattacaaacagatttttacctccatgagtggcaggtgagacattggaagagtcataagggatatagacaaggattggcatcagagactctccaggtcattgcaggactcccaaaatatccttggccccactgttcactaacaacagcggcccccccccaacatgtgacaagccaaataatggcttccaccgatttccaaaatctccatagcagatgtgccgcctccactgagaagcactgcgtttgcatgttccaattctgtgcaatgtttctagcctgtcataaatggaagcacgtgcaagacaaatccctaaaaacatcctccactcactggcgtccctgccatcttgggaaggagagtgaagaaggtgcctgggccttgcctgtgaccagccggctctccctggctccatctgggatatggtcatcccaaatcactctactgcatgtttcccaatggggaaagtttgaaggttttgtcaaggactgagcaagcctaggggattgtgtccacacacgccaacacttcccaccatgttatgtcatgatgggggaaaaggatgaaatcctgtctcacctgttgaggaaacaggaaaagggttcatgccaacagatggaggattgggttccatccttggtttcatggcttagctgaggcaggtagatagggccatctttggagatacttgttgarcctctagggccaggaacatgagccattcctgcctaaaggacatcctacacagggcctgcttgggcagtgtggccaatgcatactcacctgtcccacagaaaaggtttaatccatagttggatgatgtggatgttttggagcagggtggggtctggggagggagccctctagcccctgaatatggaaaaaccttctttctgcttagggccctacctctcaggagcaacgtcacgttggacaagtcacttgatctcttttagccttagttttcccagctttaaaatggggatagtgggctgggtgtggtagtttactcctgtaatcccagcactttgggaggctgaggtgggaggattgcttgagtgcagcagtctgaggccaacctggacaacacagtgagatcctatctctacaaaaaaaaatttaaaaattagccagatatggtggtgcatgcctgtagtcctagctgcttgggagggtgaggtcatggggaaaaggggattgcttgagcccaggagttcaaggttacagtgagctgtgattgcaccactgcactccagccctcgctgacagagcaaaaccttgtctctaataaataaataagtttttttaaatagggatagccatgatggactacggtcattgcaaaagccgaatgaaattgatctgtgaacatgttttacacgttctgttgctgtcaggcctggggtggtttcagctcagcagatgttggttccgcctgacaacttgacctgtggggttctgagtgttcgcaagaatctcccygccccacctcccatcctctgtaccatctgcctcctgcttgcccacagcatggggttaamggctgaagttgggcagcaaagcctgaactgtgttttcctgttggcagggcaaattcatccgcatcaacttcgacgtcacgggttacatcgtgggagccaacattgagacctgtatcctttccctgagcctgggccaaaygggtacccctgccccctaccaatctcctgcccagaggctgggagagtccaagagccacctctatctttccagcctcttaggtttcttccagaacaaatctcccsttaacagcaggcattgtggtgcagtggttatacatgtgtggaccggacccctggtttgaaccctaaacaagcagcctaggctgcatgtgatgctcaaatgatctgtcccttagctgagtgaccttgggctggttactccacctctctgtgcctcatcagcaaaatggggatgataatgaatggtayctgcctcatagaaatgtgagaatagagtgaatgaactcatataaagctctaggcaccatgcgaggtgcagagtaagggctggctacgtagtgtctatcgtatgatcttcacttcatccttattcagccattgtccgaggccaaattctggacctgtcgtcctcttagagagttggtctgtgatcggctccacttcttaggtaggaaattgatgaaaacagagtttacccagaagaatgctggtatygcaaggaacaagtagagcatctctttcatgaacctgagcggtgaagtggagccaagttagaaatttctggacgtgggggaacaaccaggtctagagttcagtgactgatcagcctcaggagctttgcaggcggccctagggctcaggcttcctgtggaacacgtgcttggcaatgwataggacctgggggcctgacttagcttctttctgcacctgaggtcctctagcagcacctagtggtcccatttttccacgttatgtgccctggataagagggtgggttgtggagtagcttcctctccactgtacttgtctaagctgtggggatttgggaaaatcactgaagctctctgggcctcagttttgcctcggtaaaatgggggtgattgcacctagtttctggagctggtgcaggggttaaatgaaataatatgcataataatatgcacagcccttggtacggtactgggcccaaagtgagcatctcataggtggtggctattgcgttaactcaatgttttctacgtttctactttaatctgcccaaaccagccaggattcccatcctgcagctaggagggctgtcaggcttcggtcaagtccagagccagggccctcttgtcctgcagccctgcacacacctctcagcaattcatttcctgtgtttagagcgagccccaggcatagccccgtccttctggcctcagccttccttttagatcagtggttctcaaagtatgtttccaaaccagcagcatcagcatcacttgggagctctttagaaacacacatctcagccaggcacggtggttcacgcctgtaattccagcactttgggaggccgaggcgggcagaccacttgaggtcaggagttcgagaccacctggccaatatggtgaaaccctgtctctactaaaaatacaaaaattatccaggcgtggtggcatgcacctgtagtcccagctactcaggaggctgaggcaggagaattgcttggatccgggaggcagaggttgcagtgagccaagatcacacactgccctccagcctgggtgacagagcgagactctggctcaaacatacgtgcgtgtgtgtgtgtgtgtgtgtgtrtatgtgtgcgtgtgtatacccatgtacaccatgagaaagtctgagaatcactgctttccagattggacatgggctgtggtagcccrggcactgctagctggctttaggacttgaagaagacaaggtctgctgatctagccccatcatcccgcaccatcatgcttagtgctgtggaaatccacccagtacagtagcccagcctccyagctgccctytcccatcaccccrgaccctgtgatctccatgccaccctcacctgccctcccctctgctctccctcctgccaccccgcatcgcggagaagctctcctgaaattaattagtgtggcgtgtttacggtctctctcgcctccatcccgtcagaccccactcttggaacagagggcatggargacagctttgccacttgttagctgyatcatcttgagaaaggacttctcttctctgagcctcagtttccccttattgaaaacacygataatagttgcacttatttcctagcatactttgtgaggcttcagtgagacaatttatatcaatcatttcacacaggaatgaatcataaatcataggatcatagatggtgtcattatttgtattctgtcatgtctgaagacagctcattttaaagaagatttgctggtgatggctgttaggggaacatctcgttaccattaccttcttcctggagcctttttatgctttttcttttcactctattcccctcccttttttttgcatctgaagtctgctggcagcacccagcggttccatttgtccataggggcaatggtcaaagttagacattaccgatcccaggggtagaactggaaagtcatcccatgtgaattgggtgtgacagggatggaggtggaagaccagaggaacacccgcagtatccccagaatccctaactccctccaaaccagayctgctagaaaaatcacgggcaattcgccaagccagagacgagaggacattccacatcttttactacatgattgctggagccaaggagaagatgagaagtaagtgactagcaatgacatgtgattggatggcttgagccttccctttcatcagaatccggggttaagggattggctattaaaacagtctcagatcctgccagaaaggaccatgtctgtgagtgacatatgarcagttcttcatctcctcccaatgagtgagtgtggcttgtgttcagtcattctcatttactgagcacctactatgtgacatagtagccatcaactccaattagacattagatcattaatgattcatgtctcattagaccagagagcatcaagtccaactagacacaatctacgccttcaaggaaagggagaaagacatttgccttacttgccaatttataaaacttgcaaatataaaagatgcattctggttttataaggaatttgcaggggcagcrggactaagcatttttcattatacatgttttgccagtgactttgtagaacaggggtcaaractttttctgtaaaaggccagatagtaaatcttcaggctttgcaggccaggtggcttctggcacagctattcaactctgccattgtaatacaagagcagccacaggcaatatataaaccaatgagtgcaggcaacacataaaccagtgagctcaggcaacacataaaccatgagcacaggcagtacataaaccaatgagcacaggcagcacataaaccaatgaacataggcaacacataaatcagtgagtgcagatgcatcactgtgttacaataaaactttatttacaaaaacaggcagtgtgcagaagtttgctgacctctgttgtagggaaaagtttttttatgtaaatataatacactgtataccaaactccagtaggaagttatgagttctggacctgcagctgtttactaactcttaaaaatatatacaaatcgcatagcttaaaaaaggaatggatcagtgactatctgtacatagtagagtctacatgttagtaataagttttgagtctgaaattctatgggaacaatacagactttgcttcccatctcttttgtggcccaaggttagttattttggttaagacagttaccaaaaggatctgtgtgagctcagaacttcgctgtgtcggagtgtattgtagacctcagctactagggggtggcattatccattatttaaatttccagggtggggcaaagtggctcatgcctgtaatcccacactttcggaggcagaggyggrcggattacctgaggtcaggagtttgagaccagctyggccaagatagtgaaaccctgtctccccaaaaatacaaaaattagccaggtgtggtggctggcgcctgtcatcccagctacttgggaggctgaggcaggagaatcacttgaacctagaaggtggagtttgcagtgagctaagattgcaccactgcactccagcctaggcgatagagtgagactctgtctcaaacaataaaawtaagtttccttaatggctggctttcaggaacataggctatgaggtggagcaatttttggtaaaggggraatgctgaatggattttttatgtaccagcaaacatggtatattagcagttacagtgcaggaccctgtggaatgggccagggaaaaatgttgacattccttttccttttatttggcacccaagaaaacagtttggttgtttggtaccttgggttccagttttgtgctttgcctctggtcttccagaaatgggcaagtatagggctcagaactaaattcccaggggccgtttgtattctagatgatagaactggaaagatgttaggcttttagaaagaaccaaatattgctaaatgcatccaaactcgggataatgaagtcttggcaaakacctcaatcctcgtgacttgaatcaggcatttcaagttaatccaaaagtttgagttaactggtgccttcrgtcaatttaacctcgagtttatcaagcagcttccaagtgacttgacccataaaagaccttgattttgaaagaaaaatatcttgctgacgtctctccaaaagtataaccgaatccatcctaattaaagattgatctggaagaggatccttgatgtattggagggtataataaaagcaaatggtgcaggagaaagaaaggcaattataaagttgggggtgggggagaagctgaacaacaacaaaggaaatgtaatcataggatacagtttgacacagaatatctaattaatgtcataaaaagggagttggcaaactgtttttgctaaagggtcagtagtaaacgttttagactttaaggaccagatggcctctgttgcaactactcaactctgttgcctagtgagaaagcagccatgagaaataaacaaggacatcagagcagctgtgtttcaataaaactttatttacaaaaacaacaggggaccagatttgccaacctgtgatataagccttatatattgattcaactaaaaatagctgggggtggctgggcacggtggctsacacctgtaatcccagcactttgggaggctgaggcgggtggatcacctgatgtcaggggttcaagactagactagccaacatgatgaaaccccgtctctactaaaaatacaacaaattacctgggcatggtggtgggtgcctgtaatcccagctactcgagaggcaggagaattgcttgaatccgggaggcagaggttgcagtgagcagccaatatcgcaccactgcactccaacctggacaaaggtgaaactccctctcaaaaaaaaaaaaaaaaaatagctggaggaaaggaaaggtagtrtaagaaagctgcatttttgcctaccatagcaggaagtcactagatactatctaaacttgacatatccagaaatcgcctattacagcgattgtgctttgcctctggtcttccaataggccaaaagcacctgttacttttggcactgaggactggtttcctggaagaaaakttttccacagactgggcgggcagggttggggggatggtgtggggatgattcacgtgtattacatttactgtgcactttattattacattgtaatatacaatgaaataattatactagtcaccataatgtagaatcattgggagcttgttttcctgcagtcccatcggggggtgatgggggacagtgacagattatcaggcattagagtgttataaggagggcacatgtgcagctcacgatagggtttgcgctcctatgagaatctaatgctgctgctgatcttatgggaagcggagctcagacagtgatgcaagcgatgggcagcagctgcaaatagcggataaagcttcacttgctcacctgctgctcacctcctgctgtgtggcccagttcctaacatggaccggtactggtctatggcctatgggttggggaacccttggcctatgatatgtaatacataatggtatatacattataataggctagtatatatagcaagcctattgtacagagagatagtggtaactgccagataaaaagcagctaaaagagataaaagcaggtattatggagtaaggtagagttggagaagggatgtgacaggagaatgctatttttcattataaacctttggtagtaattgatttttaaaactcatgtgcctgtttgaatttgataaaaattttataaatacatgaataaggccaggtgcggtggctcacgtctgtaatcccagaactttgagaggccaaggtgggtggatcacctgaggtcaggagttcaagtctagtgtggtcaacatggtgaaaccccatctctactaaaaatacaaaatttagccgggcgtggtggcgggcgcctgtaatcccagctactcaggaggttgaggcaggagaatcgcttgaacctgggaggcggaggttgcagtgagccgagatcgcgccactgcactcctgcctggacgacagagtgagactccgtctcaaaaaaaaaaaaaaaaaaaaaagagtaaaggttgatctaactcttctgacagctttgtctctgaaggctgaaggcagggtgcctctagacaattgaggtaaaggcatcccttcctccaggtaaatgtaacttcgtgccagggattgtggcttagcaagcagaaccaaggctggatatcagctgcagtcactggagcagtgcacaacctgcaccgctgtgtaaggctggcagtrgttggtgaggctgtctacgtgacgatgcgtgagggctttaaacggttcaagccttgataaagggaaaggaattatgatggcccagacccttgaccagatctcggtctcatgttgaaattagaagtatgtcttattgaccctgacctgtcttcctctccttctaggtgacttgcttttggagggcttcaacaactacaccttcctctccaatggctttgtgcccatcccagcagcccaggatgatgagatgttccaggaaacygtggaggccatggcaatcatgggtttcagcgaggaggagcagctatgtaagcctcacaccttgagtctggagggtagcttgcctggataccagtggaacctgttaagaactcttctctggtcaggacagatttctgctctctgaattccccaccttccattaaaaaaaaaaaaaaaaaaggaggaaaatgaattttattctaggtggtttgtttgtgttgtagaaaagtggctgtataactagggttgcaagtaacccgagctggcttaaaccaaagggaaagtgactaactcagaatgttgagaagttcagggaggttaggcacagtggttcaggtctgtaatctcagcgctttgcggggccaaggtgggcggatcactttaggtcaggagttcgagaccaacctggtcaatttggtgaaaccctgtctctactaaaaatacaaaaaaaaaattagccagggctggtggtgcacacttgtagtcctagctactcaggaggctgaggtgggaggattgcttgaacccggaaggcagaggttgcagtgagccaagattacaccactccactccagcttgggagatggagctagactccatctcaaaaaaaaaaaaagttcaggaattcaagcttcaggtacagtgagatctaggtgttcaaaagatttttctagaacctaatttcttgtcttctrtctctctcgactacattgtttctctataggatgcagtttgttgacagcaacatagctgggttccagcccttatattctttgggtttatgtccaaagaacagagtagattcccggcttaagttcctgaatggagtgtcattgactctgattggttggcttaggttgatatgcacattcctgagctatgcagcataggcagggttgtggaaagcgcagggtggtttcattatggtccctaagaatggattcttggagctgaaggtagagatgttggcctcatcaggaacatgtgggcagggtttaggggagggggagtgatcgaggcagtggatttactcaggcttttcctggaggggttgctctggtgatcarttgatattgatcaaaatcatccaaccaatggccaagaaacacactgggtcttgagaacaggacagctcagaaagaaattcttggtcgggacactgtgtttccagaaacgattttccttctgcgttagatgtgcctcagtgttgaaggttaatctctttcaggaacaccaggacagaactgtggaaagtttcccttccttcccacgcctacgcccgtttggagccccagaatagcactgaggttgctgaaatgctgcataaggggaggggcagctcctccgaagataacttggggtctggaaaattaggctgtatgggtcagttgacaaatggatggtgtatgtgggtcttggccagggtcccayatcagaatctagtgctgatagcctccttgtctgaatgacataggccctccaagaatgattcatttcatttgggacaggggtcagttttgcttctaatcttgcttttaaataacaatgaacaatggttaagtatttgctgtgtgccaggaatttaccaaatccttttttcttgatgtactacactgttcagtatagttttatttaaataataaaaaactggaacaggctgggcacagtggctcatgcctgtaatcccagcatttggagacactgaggcaagaggattgcttgagcccaggagttcgagaccagcctggataacacagtgagactctgtctctacaaaaaaaataaatagaaaaaaactggaacaaactaaaataggttgattaatagagggtttattaaatcattgtctgtccttgtgaaagaaaacaatgagaccatttaaattgttttgctgggcatggtggctcacgcctgtaattccagcactttgagaagccaaggcaggcagatcacttgagcttgagtttgagactaacctgggcaacatggcaagatcccttctctacaaataatacaaaaaattaactgggtgtggtggtgcacactgtagtcccagctacttgggagactgaggcaggaagattgcttgagcccaggaggtcgaagctgcagtgagccgagatcacaccactctgtcacctaggctggagtacggtggcgcagtctcagctcactgcaatctctgccttgcaggctcaagcagtcctcccagctcagcctctcaagtcgttgagactacagacatgtgctaccacgcctggctaatttttgattttagggtttttgttttgttttgtttgagatggaggcttgctattgtcacccaggctggagtgcagtggcacgacctcggctcactgcaacctctgcctcctgggttcaagcaattctcttggctsagcctccygggtagctgggattataggcgcccaccaccatgccccactaattttttttgtatttttagtagatactgggtctcgccatgttggccaggctggtcttaaactcctgacctcagatgatccacccatcttggcctcccaaagtgctgggattgcaggcatgagccaccgtgcctggcctggggttttttgttttgttttggtttgatttttggaggggtgggtagagacaaggcttcaccatgttatccagtattctctggtcttgaactcctgggctcaaacaatcagcccaccttggcctcccaaagtgctgggattacaggcatgagccaccatgcccagtccccagtgttctcaatgtactttggcacttgtttcccctttaaccacagagaccagactccaggcccagcaccttcggcagccccaagcatctagctagaatttggtaatactgttttccttgtatttatatttataattgccatctatttatggcaagtgaagatgatttktcactgaagatagagaaagttttctattaaaacaaatgtaaggaaagagaaggaagtaaatttaaagaaaatgattaagcaaataatggagcagatggtacacagagcaagcattcagacgatggcgtgcaaatgacgaactctcataggaaccaacttagtcctaaatgtacaccaaccccatttataaaccaagagctacttccaaaccctccatcaaggggcctatggagaagggggtgggtcaggcttcaggctggagcttcatgaggctccaagtgaccaggggacaccaggattttccccaccacattgggttctgcagccttgaactcctggcctcaagatatcctcatgcgccaccatgcctggcctggttatactgcttctaatgtattttgaagataaaaaataaaatcacctaaattgtccatcctgtgtatccctggtggtacacatgtctgatgttggaaagtcctgtttcttattcctcagcaagaagagaggtgtaaggccactgtaaaaaattagcacaaacttgatgccttaaaacaacaggaatttattctctcccagttctggaggccagggttctgaaatcagggtgtcggcaggagccgggcataatggctcatgcctgtaatcccagcactttgggaggccaaggcaagaggatcgtttgaggccaggagttcaagaccagcctgagcaacatagcaagaccccttctctactaaaaatttaaaaaaaaaaaatttttttttttttaaaagacaagatgttggcaggggttgttcctcctggaggcactgagggagatctgttccttgcctctgtcctggcttctggtggctctggctgttcctggcttttccttggcttgtctcactccagtctctgcctcatccttcatgtggcattctactctgtgggtcttctcttctgtccatcataaagacacttgacattaaatgtagggcccaccaggttaatccaagatgatctcatcttgagatcttgtacttgattccatctgcgaagaccgattttttccaaaataggccacgttcaggctgggcgcggtggttcacgcctgtagtcccagctctcagggaggcagaggcgggaggatagcttgagcccaggagttcgagacctgcctgggcaatatagtgagaccccggtatccacaaaaaggaaaaaaaaataaatgtaaccccccaaattaggccacattcacaggttccaggtggacatattttagaaagaccaacattcaacctaatataggtggcttccactctttatcacctactaggccaggcccttgctcagcatcttacaagacctaaacttcacgaagcaggtactactgttaccatctccgttttgcagatagggaaactgaggctcatgggacttattgagactcatgtagagtctctatcctctattcatccatgattcatccatcaatccatcctctatcatccatctatcctctactcatccttccatcacccatccatccatcacccatccgtccatccatctacccacccatccatccatgaacccatcctctatacatttatacattcatccatccattcaccctccatctgccatccatccatctccctccctccccatgtgtatctggacccggaactaggatttggaaattcagagataatgagatttataagaagcaaagctgggatttgaactcaggactctctaactgcagagcgcgtgctttgcaccagcacaccaggatgctgccagccgtcaccacccttgctgtgttgtgtctcctcactggtttacttctttgctgtctgctaattctgccccaaggttcayctcttatggcctgggagtggtggcattcttttgtcatttctggaattacatttaactataccagaaagtgcaaaccaatggttcctgagcccacaggagagatcggccactacaaccttcaaaatttttagaaattggttcctaaagtttaaatatgggtaggccgggcactgtggcctataatcccaaccctatgggaggccaaggcacatggatcacttgaagtcaggagtttgagaccagcctggccaacatggtgaaactccgtctctactaaaaatagaaaaattagccgggtgtggtggcacacgcctgtaatcccagctactctggaggctgaggcaggagaattcccctgaacctgggaagcgcagaggttgcagtgagccgagattgcaccaatgcactccaacctgggtgacagcaagactcagtctcacacacacacacacacacacacacacacacacacacacacacacaccaaaaaacatgggtacacttcacataaaaactctgggtttccattatctagaaaaatcagaagttccagcaacacttggcttatatcccctgtggcaatgacggagtagctgctggccccttcagatgggtttgtggcctccttgggtccccacagtcctcattagttggctttgttcatttagaccagtggttctctgccagaggtgagtttgcctcccaggggacattgagtagtatctggtgacatttgtggttgtcacaactctgtcagggtaaccaccactgacatctagtggttagaggccagggatgctactaaacttcccatgatacccaggacagctccccacaatagagaattatctggcccccaatttctgcagtgacaagattgagaaaccctgagttggccggctcgcctgggctgtgcaggcatttcaggaatctttagtttaaattgacacttttaaaactgtgagtgcaactcttcatagtttacaaagactctttcatagatgttatggttaaaaggaagtgtgtttccaagccctgtcaacagcagcttcattcattttggggagaaggctttctaccatagtaagtgggagcaaatggatgggtggtcagcagctgggtccttttgctgagctgggccagggaccccatggcgtgagaatagctsttgtgaagggccttgtaatgtctggtttggcctgaggaaccagagaagtctgggatctctaggctttgttcctggaacatagtgactgatttgaagccagaactctgggtgatttgtacctgagttaagctaagccaagaatttgcattaatcatcatccatccattcatccatctaccatccatccatcatctgtccatccatccattcatccatccatcatccatccatcaatgctstatccattcctccatcaattctccatccatctatccatcgtctatccatcaatcctctgtccattccatctatccatctatcctctatccatccatccatcatccgtctatcctctatccatgaattattcatccatcaatccatcctctattcatccatctatcctctactcatccgtccatcattcayccattcatctacccacccatccatccatccgtccattcatccatgaacccatcctctatccatttattcattcatccatccatccaccttccacctaccatccatccatctctctccctccctcccatgtgtatcaggaccttggaataggctttggaaattcaaagatgattagggcaggccctccactctccagaaactcatggtcttatggggatttcagacatagaaactattttaacagtaacatggcctgagtatggagtcagaaaggttccaagtattctgggaacacagcgtttttgtttggagacacctggacaacaagtggaaacaaatgtatatcttcttcatcccaacatgggcatctgttacacccagaagagtatgtaagaagcacagggtttttatttcaaaaatccttttattgacatatgatttacatggagaaaattgtgtatgccatagcgtgcagtgcaaagaattattataaactgaacacgtctgtgtaactagaatccattttaaataagacaatgccaccagccccatggaagctcccacatgcaccttctaagaacttccctcaattaaggataatcattatcctgacttctaacagcatcgattagttttgcctcttcttgaatggacggtctatatatggacttagacagtatgttcttgtttccatctgtcctcttttgttcggtatttgtgtctggaagatatgtcagggttttttttttgttttagagacaggatctccctacattgcccaggctgtatcaagctcctggcttcaagcagttctcccacctcagcctcccaaagtgctggggtcgcaggcatgagtcactatgctggccccaatacatcagttttgatttgtggtagttgtagctcattcattctcactgttctgtggcaggggttgctaacacatttttctgtaaagggtcagatagtaaattctttagcctttgtaggccagacgatctttgttgcaactcattaactctgccagtgtagcatgcaaatagttacagacaatatgtaaatgaatgagtatagctgttttccactaaaactttatgtataatagcaagcagtgggccagatttggtccatgggctgtaatttgccagtccctgctgcgtggcattccattgtaatgcaaggttttaagcaaccatatgaaaatattgagctcagaatctagtttcttcagaggaaagatgtaagctggctctgggtccccagtggctttaggctccaaaactccagggtaccttggcattgacctytgtgtctgctctgcccttctctccccacctcagccatattgaaggtggtatcatcggtcctgcagcttggaaatatcgtcttcaagaaggaaagaaacacagaccaggcgtccatgccagataacacaggtacttgccactttttcctgatgaccaatgactttggggttgggggggtgggggaggtgacatttaaccactggttatttttcaaggtgaaggtatctgggattttaacaacagttggactaggttcttatcactcactttttcaaacttttcagtgctcaagaccctatgtggaaagttattgaatcagagcgcagggattaaaaaaaaacaaacctaatagttttatttatttgttcttttttttaaatacaaaattttacaagttttaatagagacgaggtctcgctgtgttgcccaagctgatcttgaactcctgagctcaagtgatcctcccaccttggcctcccaaaatgctgggattacaggcaagagtcatcacgtcctacccctaatagtgaccagacaagatcccgagggaccatctcttctaaaataccccacttaattgttttgttaaagaaatatttctcaagcccctgcaatatgccactgggatacagcaggaaatgacacaagaatagctcttcttacggtatctgtggtcgtcttggggagacagacctcaattgccctgagaattaggggtgccagataaaatacaggatgtccagataaatttcaattttaggtaaacaacaaacctttttttaaattttaattatgtcccttgtaacatttggaccgtgattataccaaaagagtattcttgtttatctgaaattcaggtttaactgagcatcctgtaattttccccctaaatctgataaacctacccacaaataaacagtattttgtgttttgagaagctggcctggctaccactatgcttgttggtggctgagctgagagcaaaacttaggtttcttatttcccagcccaggctgtatattgtgttgctttttcccgctccctagagcccaccttgatcaaacctgttgcaaccgcttactgggtttaccttgcccacagcctagacagagccaattaatcaagacaggggaattgcgatagagtaagagtaactcacgcagagccggctgcatgggagaacagagttttattattactcaaatcaatctccttgagcattcgtggatcagagtttttaagcataatgtggttagggggaggccagtgagttgggggtgctgattggttgggtcagagatgaaattacagggagtcgaagctgtcctcttgccctgagtcagttcctggacagaggccataagatcagatgagccagtttctcgatctgggtggtgtcagctgatccacctggtgccagggtccgcaaaaatatctcaagtactggtcttaggttttacaatagtgatgttatccccaggagcaatttagggagggtcagactcttgtagcctccagttacaggactcctaaaccataatttcaaacctttgggctaatttgttattcctacaaaggcagtctagtctccaggcaagaagggggtttgttttgggaaagggttcttgtgttttaaactataaactaagaggctaggcgtggtggctcatgcctgtaatcctaggattttgggaggcccaggcaggtggatcacttgaagtcaggagttcaagaccagcctcgccaacatggtgaaaccccatctctactaaaaatacaaaaattagccaggcgtagtggcaggcgcctgtaatcccagctactcaggaggctgaggcaggagaactgcttgaacgcaggaggcggagattgcagtgcgccgagattgtgccactgcactccagcctgggtaacagagtgagactctgtgtcmaaaacataaaaaataaactataaactaagttcctgccaagttaattyggcttacacccacaaatggttcagtggagcttggaggttagaagcaaggtggagtcsgttaggtcagatcttgttcagtgtctcagttataattttgcagtggcagtttcattctcaggtgtttgttatgtattagagtccctaaatctggcaaattaatggaatccggatgccaaggaaagacctcagggaaagagaaatgaaaaagtgctcttgccaagagatggggaaaaaaaaatcctaaaatcactctatttactctgccttgcacatgcaaagcagcatgtaatgctattttcatgttaagggaccagctcgtggtcacaccactgcacttcagcccgggcgacaggaagactgcatctcaaaataaaagaagagcatttaggttgactctagcattttgctattgcaaacaatgctgcaacacatatcctagaagggtgaaagaaatatttattgaacagtaactgttcaataaatgttactattaataactatttaatacttactaagtaactgttaaataaatctcaagggccagtggctcacgcctgtaatcccagcacttagggaggccgaggtgggcggattgcctgagttcaggacttcgagaccagcctgggcaacacggtgtaactccatctcaactaaaatacaaaagaaattagctgggtgtggtggcaggcacctataatgccagctactcgggaggctgaggcaggagaattgcttgaacccggaaggcggaggttgcagtgagctgagatcgcgccactgcactccagcctgggcgacagagcgagactctgtctccaaaaataaataaataaataaacaaataaataaataaataaatctatctatctcagggactttacatactttaccttatttagtcctgggtaccaacaaggtaccgaagagctgaccctttttaaagctgagaaaagcaagatgctgggagggtaaagagcttttccaaagtcacatgacttggaagtgtgaagggacagggacttgaaactagaactacctgaccctaaacccccaactggggcctgcttcagcccaccccaatcattgcctctcagcaaaatactggggagtgtgaccactaatgacagcagcctttaggacacttcaagctatattcatggtcagcgggtcccatttccccaagagaacccgctgtattcacagatcacaaatatcccatgcgatgtgtcttcttgccaagctatttcttttgtgatgcactcacgatgtttcttttctccatccagctgctcagaaagtttgccacctcatgggaattaatgtgacagatttcaccagatccatcctcactcctcgtatcaaggttgggcgagatgtggtacagaaagctcagacaaaagaacaggtaatgatgtacttatcacttatccatccatgcacccacccatccatccattcatccatctatccacctgttcactcattcatgtattcattaatccattcacccatggtctgcctctgcatctgtccatccatccatctttctacccactcattcatctgtctgttcatccatccatccatccatccattcatctgcccatctatctgctcacccatcatctctccatccctcactcatccatctgtccatccatccatgacccagccatctgtccatctgtccgtccatccatcacccatccagctgtcattccattcattcattcattcattcatctgtccatgcatccacccatccatctctttatccctcatttattcaatactagaatattcacagtcccatgtcaggttttgtttgtttgtttgttttttgtttttgagccagagccttgctctgttgcccaggggggggtgcagtggtgccatcgcagctcactgtagcctctgcctcccagattcaaacgattctcctgcctcagtcccccaagcagctgggactacaggcatgcaccacaacgcctggctaatttttgtatttttagtagagaagggtttttgccttgttggtcaggctggtcttgaactcccgacctcaagtgacccacctgcctcggcctcccaaagtgctgggattacagtgtgagtcactgcacccggccaagaataaaaatcttcaccaccagcctggcttatgtgaaaatggagcccattgagaataaccgggttcccctggttsccctctgcaggctgactttgctgtagaggctttggccaaggcaacatatgagcgccttttccgctggatactcacccgcgtgaacaaagccctggacaagacccatcggcaaggggcttccttcctggggatcctggatatagctggatttgagatctttgaggtacagctcggtgggatcctaagagccatggtcttggttgtctgagatgggctttttcttggaggagtcatgattttggagaaaggcatgtagatggctactgtagggtaggaggctgtctagttaagggtggatcattgagggtataagagacagaaatccaacaggaaatgcattggtttctggaactgagaaggccagacatgtagctggatcccgtaggcagggtctgatctcccgccatcgttctctctctctctctgccttcctccatattggctccattctcaagcaggctctcccctcacgggggcaagatggctgccacagctccagactgcctctcagtaatcctggtaaaaaaaaaaaaaaaaaaaaagcacatatctcttttctaacagttccaaccaaaatcttggaattaagtctcactgactcttactcacctgaattgggctacatggtcacctccaagccaagaactgtttgcaggagcttgcaatacctcatgtagtagaaacatggatattggatcctttacccatgggtttgaagaaagttctcagagaaagggaaggttttttttttgtcttgtcttgtttttttttttttgagacagagtcttgctctgtcgcccagactggaatgcagtgtcacaattttgtctcactgctgcctccgcctcctgggttcaagcaattctcttgtctcagcctcctgagtagctgggactacaggagtgtaccactgtgcccagctaattttttttttttttttagacagagtctcgctctgttgcccaggccggagtgcagtagtgcaatcttggctcaccgcaacctccgcctcccaggttcaagtgattctcctgcctcagcctctcgagtagctgggattagtgccaccatgcctggctacttttttttttttttttggtagagacagagtttcaccctgttggccaggctagtctcaaactcctgatctcaaatgatccaccagcctcggcctcccaaagtgctgggattacaggtatgagccactgtgcttggccaatttttgtatttttagtggagagaggtttcgctatgcttgccaggctggtcgcaaactcctgacctcaagtgatcctcccgccttggcctccctaagtgctgggattacaatcatgagcactacacccagccaggaggttttaagattgatagatgtcccgaaagaagtgtactaccgagtcactttctctctgcgcctctgttttcacatctgtaaaatgtttccacatctgtacatgcagtagcgtgccttacgaggtttgtccatccatagatggttgtgcagatggaggagataagcatctttaaggtgtgtgagggccatgtgatatcaacttcaccagccctggtggactctaggcagcatgttttggggcctcagccctgtctgggtgctgggatggcagaacaggatgtgggcgggccatgggggcgctgtcgggtggagcttctgtggggctccttgtcttctgacttcataccaagatgctcacgccccgcccccacgccatgtgctcaggtgaactccttcgagcarctgtgcatcaactacaccaacgagaagctgcagcagctcttcaaccacaccatgttcatcctggagcaggaggagtaccagcgcgagggcatcgagtggaacttcatcgactttgggctggacctacagccctgcatcgagctcatcgagcgaccggtgaggggcacgtgggcgtgcggggctcygtcacaccttgtacacgtgtgtggcctctgtggagccgacgtggaccccacactctccccatgcacatagcattcccccacccaatccatcacccagtcctgaaaggctgtaagctgaatccttgtgaactcttacaatttccattaacccacattttcatatcaaaggtattttctttaatttctgccttccttccatcctcttttttcttcctttttttcttccctaccctctttcccttccctttccttctctgccattgctttttttttttttttttttttttttatgacatggtctgactctgttgcccaggctggagtgcagtggcacaatcttgcctcactgcaacctccacctccctgcctcaagtgatcctcccgcctcagcctcccaagtggctgagactacaggcgtgcaccaccacgcccacctaacttttgtattttcagtagagacagggtttctactaattagccgggcctggtggtgcacgcctgtggtcccagctatttgggaggctgaggtgggaggattgcttgagccctggaggcagaggttgctgtaagccgagattgcgccactgcattccagcctggataacagagtgagaccctgtctccaaaaaaaacttttctaacaggaaccctaggtgaattcaagtcaagcaacaaattcatttgcaagaattatgaactcggccgggcgcggtggctcatgcctgtaatcccagcactttggraggccgaggcgggcggatcacgaggtcaggagatggagacyatcctggctaacacggtgaaaccccgcctctactaaaaatagaaaaaatcagccgggcgccgtggcaggcgcctgtagtcccagctactcgggaggctgaggcaggagratggcgtgaacccaggaagcggagcttgcagtgagtcgagatcgcgccactgcaccgtctgcctgggcgacaaggcaaaactctgtctcaaaaaaaaaaaaaaaaaaaaaagagttatgaactcttcatgatgttgcctgcgtgttgcccactagggggcggcagcaaacattatgttctgccttccatccctgttactggtccattgggcacagggtaatttgaaggtagatttggaagcatgggggtcataaactcatctttatatgtgggcaaatacagtatcagatctyggcggatgcccatgcgttgtgtatagttggccagctcttcatggaatgcctgaggttgggtgttctctctgattcaagccctacttgtctcccacagaacaaccctccaggtgtgctggccctgctggacgaggaatgctggttccccaaagccacggacaagtctttcgtggagaagctgtgcacggagcagggcagccaccccaagttccagaagcccaagcagctcaaggacaagactgagttctccatcatccattatgcygggaaggtaccagccacagggcccaggggactctgtctcaggggacccccagtggctgctcagcgcagagacagtctgagagtggcagaaccttgggctgcctggaaactgcaaagccatctgctgctaagcgaatcccaaccaagtcctattcgtaatttgtctacgcatctgtaaggcatcagctgtagccactctcatgttttccaaccgtgacgtccagacagttatttctttctgtttttgttggagacagggtctcgctttgtcgcccaggctggagtgcagtggtgcgatcatagctcactacagcctcaacctcctgggctcacacgatcctcctgcctcagcttcccaagtagctgggactacaggtgtacaccaccatgcccagctaaaatcttttttcctttttgagatggaattttgctcttgtcatccaggctggagtgcaatggcgtgatctctgctaactgcaacctctccctccgggttcaagagattctcctgcctcagcctcccaaatagctgggattacaggyacctgccaccacacccagctaatttttgtatttttagtagagaagggtttcgccatgttggccaggctggtctcaaactcctgacctcaggtgatccacccgcctcggcctcccaaggtgctaggattacaggcatgagccaccgtgcctggccgcccagctaaatttttaaattatgtatagatatggggtcttgctgtgttgcccaggctggtcttgaattcctgggctcaagmgatctccctgcctcggcttcctgaagtgctgggattatgagcacgagccactgtacctggcctcagcctgcttttcttgtatagactctaaatccttcctgctacaagttatacccaacaggcggggccaactggaatggggtgactaatacatccacacctggcttcaacaaaaatctcccatgtcacggtcttgagtttgctattgccagcctgctctggccagggaaatctatgatagttgtattcatcatcatcatcatcatcatcaacatgccttggctgttattgtataggcccttgccctgtggctctcaagagtcctggataatgtacaaaggacatagcttagtctggcttgcagaattgtagtattctattgactcctcagtacctccactgcatcatgggcacaaacaatgctctctaccagggcctggcaacagagtccgatctggcccacagcttgttattgtaaataaagttttattggaacacagccatgcccatttgtatgcataatgtctatggctggctgcttttgtatactacagtgctagagttgagtagctgcgacaaagactgtatgacttggctgggtgtggtggctcacgcctgtaaccccagcaccaaggcaggtggattacttgaggtcagcagtttgagaccagcctggcyaacatggcgaaagcccgtctctgctaaaaataaaaaataaaaaaaatttaaaaattagccagctgtgagattacaggcacacaactgtaacctcagctactcaggaggctgaggcaagagaactgcttgacccaggaagttggaggttgcagtgagctgagactgcaccactgcactccagactgggcaacagagaaccactctgtctcaaaaaccaaaacaaacaaacaaacaaaacattgtatgacttgccaagccaaaaatatctactatctgggccttcaccaaaagtttcccaactcctagcctatattcaagggggtatatgttcctttaagcatatagagacaacacttttcttttccctacttcatcagtggattttttttattattattttcagtcttctctcagatcaagcctacctattatcctgataacccacatcccatgataacccagcaaagctgtattatcagttcctttcatttaatattcaccatagtaaaaattacggctttgggcattgtcattgtttgagtcaggaatgtaaaaagcctatatgtcctttttctgtatatccatatatcaggatctctgagttacaaattatgctcattagagagtggaaaataggatgccatgcttaattaatttatttatttaattattttgagacagagtctcactctgtcacccaggctggagttcagtggcgcaatctcagctcactgcaatctccgcctcccaggctgaagcgattctcctgcctcagcctcccgagtagctggcattacaggtgtgcaccaccatgcctggctaattttttttttttttttgtatttttagtagacatggggtttcaccatgttggtcaggttggtcttgaacgcctgacctcaaatgatccacccaccttggccttccacagtgctgggattaccagtgtgaaccaccacgcttggctgccatgcttaatttctaaaccaggatgattgggaagatgatgaggggggagttttgcatgtcggcaggagggcatctgccgtcatgaaatctcttaatagtgtataactcacaggtactgtgctggcttaggaggagggaggctaccacagcagcgttagtaggagaatatggaatggaaactaggctttcccagcaatggctatcactggctgatgtcctactacgtgggcacaggtccctgggctgttggtctcttcactggtgtttgtggagtcccatcatggtggtcataaacgtcatttcctctctgacctcagaagatctggaaggacaatgggagggctggggtcctggccttggtttctaagtttctagtttcccaggggttctgaccagcagggtgtccttggcaggtggactataatgcgagtgcctggctgaccaagaatatggacccgctgaatgacaacgtgacttccctgctcaatgcctcctccgacaagtttgtggccgacctgtggaaggacggtaaggccttctctgctcgggtccatgttctgctttgagctggagaattgaacacccaagtcccccgactctcacacctgccccaggaggggaggcctttacatgggggcaggggaaggaagagcattggcatgggctggtgatgtctcgttgaaacaatttcttcctgagtgggggtccctgagcccctcaatcctacatgtcccgaggggattgaggtcctgaggtcagggctcaggcaatagaggagaaacagcatgccaggcacggggagttagactgccctgtccagagtcagaaggacttcactgtatcttgtctctgccacctcctagctctgtggtcttggatgagtcacttgatgtcattaagcttcattgtcctcattagtaaaacaggagatgcaataatagttgccgtctctactagaggtattatgagggttaaattagrccagtgatgctcaaactcaagcaggcatcatgaccccctggaaggctttgtttatttatttagggacagagtcttgctttgtcacccaggctggagggcggtggtgcaatcttggctcactgcagcctccaccttctgggttccagtgattttcctgcctcagcctcccaagtagctagcattacaggcacacaccaccatacctggctaatttttgtatttttagtagagacggggttcccccatgttggccaggctggtctcaaactcctgacctcaggtgatccgcccacctcagcctcaaaaagtgctgggattacaggtgtgagccactgcacctggccctctttggagggctttttaaaacccagatggctgggcctaccctaagatctaattctgcaggtctggggccagggatggggcgggcctgaaaacattcatcccaggtgatgctgctggtctagggaccacactccggctccctttgagaaccagtgaatagatgatccctgtgaagagctgctggagtgatgatgaggggagggggtttgctgtttgtccctggccatcagtgtccacagcaggttttattcttggcacagggcccatgggcctggggcttacaggactggtctccccttgttttaagcatgctaaaaaaagggctccaggaggggccagctgtgccctaaccatatgccaggctctgggcctagggaacaacatcgcaccctgggtctgtgtcatcccaggacacatgatgaagcctgtagtccctcctctgcgggacccacagtcttgtgggagagatgagactctcaaagacaagcagagagacaagcatgaggctgcgcatggtggctcacacctgtaatctcagcactttgggaggctgaggcaggaggatcagttgaggtcaagagttcgagaccagtctggccaacgtggcgaaaccccatctctactaaaaatacaaaaactaactgggcgtggtggtggtaatcccagctactcgggaggctgaggcaggagaactgcttgaacctgggaggcgcaggttgcagtgagctgagattgtgccattggactccagcctgggcaaaagagcaagactctgtcttgaaaaaataaaactaaaaataaaaaataaaaacaaaattagccgggtgtgctggtgggtgcctgtaatcccagctactcaggaggctaaggcaggagaatcacctgaacctgggtggtgaaggttgcagtgagccaagatcgtgccactgctctccagctgggcgacagagtgagagcttgtctcaaaaaaaaaaaaaaaaaaaaaagattgttacacagaatctgagtagaaggtgaagaaatggtgccatccatggcctgtgggttgggcttggcatgtgcaggacctgctgggctggtagaaaaagaaccttggaggtgatgatgatgatgatgatgatgatgatgatgdtggccgggcgcggtagctcacgcctgtaatcccagcacattgggaggccaaggcaggggaatcacctgaggtcaggagttcgagaccagcctgaycaacatggagaaactctgtctctactaaaaatataaaaaaaatgagccgggcgtggtggcgcatgcctgtaatcccagctactgggaggctgaggcgggagaattgctggaacccgggaggcggasgttgtggtgagccgagatcacgccattgcactccagcctggccaacaagagtgaaactccgtctcaataaaataaaataatgataataataataataataataataataataataataataatacctactttttgttgagcacttactgatgtgccaggctatctcggagtgtgtgctgtatcttctgcctcagaatatttcttccgtggatacctacatggttacccactcatttcttgctggtttctgctcaaatatcaacttagcagagcccaccacctccttgtctaagagagcaccctcttcactctctctccgctttaccctatttttatttttctacgcacacctcactactcaagatattccatacttaacatctgtgatctctgtctgtctccttccctgtgatataagcggggtgagggggccgggtctttttttgttcacagcagtgtccccagggcctggagcacagaaggtcctcaataactatttgttggtggatgaaagattggaggctggcagggaataagtgccttctgtgccttatttttttttacccctgccctagaaggtagacggtattattacctcccttttgtagaaagggagactgaggcacaggatagtgccaagccaaggctagtcagtgagtggacagcgagagcaggcttgactcctaggtcagcgtgactccatcacagggaatttgttctttctgccactcaggtgctctcaggatttccccaatagacaatacttggaaaccctgactgccgaaggaggcgttggtgatggaaggaaagattggagtgggcaggttggtgggtggggctggggctgagcctctggcctatttaggggtgggtgggccagaggctgatgccaccctggctgtgccccatagtggaccgcatcgtgggcctggaccagatggccaagatgacggagagctcgctgcccagcgcctccaagaccaagaagggcatgttccgcacagtggggcagctgtacaaggagcagctgggcaagctgatgaccacgctacgcaacaccacgcccaacttcgtgcgctgcatcatccccaaccacgagaagagggtgaggcccgccgcccagaccctggggctyccagaarccagggctgtcccaagcggtcacagcgtccccagggcgccctctgcccccacctacccygaggaccccattttccatgtggggaaggctatctgaatctcagacccattccccatccctggaggaaaaggaggaagggaggatgcatccagagacttttcagttgtggagttgctgtgcaggtcatccagccactcattcattcattatcccaggaagtattcactgggctctgccctgtcctgggtgctggggagcagtgttagaaaaattgtagcccttccctgtgggtttctcataatctggtgcaggcatcttcagcttggggcgattgtgtcctctatatggacatgctacagacatttttggttgtcacaaccaggagggggctgttagtcagcatctagtgggtaggggccagggatgccctaagcattgtacaatgcacaggatggtccctcaacccccagcacagaatccctacaagatgccagtagtgctgaggttatgggagacacggggagaggtaaacatacagctgatgatggtgatggaatgtggtcagttaggagaacaccaaagagccagggctcctcccacagcctcaggactcagagaaagcttctggtgaacttgaacgttaagaatgtgtggccatcaacttggtgacatggaaggcagggtggggcctaggataagcagggggcctaggataagcagagggcccaggctaagcaagagtgtggaggtgagaagtgaaggaactaggtaagaaaatgctagatagtgtccaggcgtgttgctcacgcctgtaatcccagctactcaggaggctgagaaacaaaaatctgttgaacccaggaggcggaggttgcagtgagctgagattgcaccacagcattccagcctgggcagcagagcgagactccatcttaaaaaaaaaaaaaaaaaaggaaagaaaatgctaaataggtcatttcatgttgcaaatgtgtgatggcatgaggtaggaatcagatggtgtgaggtaggattgaggctgaatgggtaggcaggggctagatcgtggtgctccttgtgttctttctggagcttggccttctctctctaggcatgccattgggggtgttaaagcagggctatatcatggtcagatttacattttaggaagtgaatgagggggctgggcatatgctagctcatgcctataatcccaacactttgggaggttgaggtgggaggatcacttgagaccaggtgttcaaggctagcctgggcaacatagcaagaccctatatctacaaaaacatttttaaaaattttccaggcatggtagcacatacctgtggtcccaaatacttgggaggctgatttgggaggatcacttgagcccaggagtttgaggctgcagtgagccatgatcgcaccactggactccagcctggctgacagaatgggaccctatctcaaaaaataaaaaggacaaagggattgaggggagaggcaagaccagagagagagaccaggtgggtggtttctgtggttgtccaggcaggagaagatagtggagacaatggtggtgaagagaagtgggggggttgggagatatttgggagctagaagcaatcaaactgctgayggacaggaagtgagggagacgaggtgatgaggaggaagccccaggttccagccaggcgatgctagtgtcaccaagaaccagagagwtcatgaggcagccattgccgaagcaaagagatgaaaacccagaggggggcactgctttgcccctcggccctcagctaagccctccttgggtgcttctgttggtaccctcatggcctggccaggtgggtcatccaggtaggaggtttggggctttgctgcgccatggtttctggccccagggatccactgccctctttgacctttgcagtcyggcaagctggatgcgttyctggtgctggagcagctgcggtgcaatggggtgctggaaggcattcgcatctgccggcagggcttccccaaccggatcgtcttccaggagttccgccaacggtaagtcccaaggtctggcccwggtagggcagggggtgagcrggactgggtggaggaatggatgytggaggtayccggggtgacttctgctctgtgtttcaagctacgagatcctggcggcgaatgccatycccaaaggcttcatggacgggaagcaggcctgcattctcatggtgagcccagaagtccaccagagacctcccaacctctggccgcaagccacctgctgctcttggtgggaccgttcttacccatgtcatcactggccaaatggcacagtggaaatcaggagctcttcctttccttccttttgcagatcaaagccctggaacttgaccccaacttatacaggatagggcagagcaaaatcttcttccgaactggcgtcctggcccacctagaggaggagcgagatttgaagatcaccgatgtcatcatggccttccaggcgatgtgtcgtggctacttggccagaaagtaaagatgctttcctgcatcctaatacctcaaacgcgaatcacaaacaggggcctttctgttctgattccctgattctaagaggccacctgtttaagatgcatcattgactgaatgacagccttttcttgaaggggaagaaatgcttctactttaaataaatgtaccaagttacgagtgcaggaagggaacgagttttagacctgggttctcatygtggatgccccagtttttgctgatgaaccttgggcaagttactctacctctctgagcttccagttttttagctggaaactgagcataatcattttgacctcagagagctgttcatgaggtgtcactaagataacgcatgacgagagcttagaacagtgcgtggttctcaggtcagaaatgattgttgttgtttttacctccctccctcactccttccttccctccctcccttccttccttcctttcttcttcctttttgagacagagtctctctctctctctctgtcgcccaggctggagtgcagtggcgcagtctcaactcactgcaacctctgcctcttggactcaagcaattctygtgtctgagcctcccgagtggctggaattagaggcgcccaccaccacactggcctaatttttgtatttttagtagagacaaagtttcaccatgttggccaggctggtctcaaattcctggtctcaagtgatccacctgccttggcctcccaaagtgctgggattataggcatgacccactgcgcccagcctagacatgttagaattggataaaccattgaggaaagaggacttgacggtgtctagatccccgtgtcccagtgggatttataaggcagggttttggagggtgtgatgtcccagctgttctgtgaagactgggagccggggaagggttcgggttccttaatgaaagtcataccccagggactgcagggacaggtggggtcgctctctgtctggggtgtgtgttgtcattgggcagagaccacaccctcaccagtaggaccctgatgtgtcaggttcattcattgacacatggacccaagatggtcaaggccagctttgggagctcttggccctcccgcaacagacctaacttgtcaagtttcgttactaagttccctgttgctgtccttcctggataactggggcaattttattcttaaagttttcctgtgtccaagatggcagccaagcagggaagacagaattacgttcactgttctatcgtttctcaatctatcgatagcccttaaacgggaagagtgctggttcagggtcacagtgtgaaattcctaaaacaacccaggagagaataggtttgacagggctgggtgtggtagctgacacctgtaatcccaggcactttgggaggccgaggcaggaggattgcttgagcccaggagtttgagaccagcctgggcaacatggcgagacccctatctctaccaaaaaaaaaaaaactttaaaaattagctgggcatggtagcatgtgcccgtagtcccaactacttgggaggctgaggcaggaggatcatttaagcccaggaatttgaggctgcagtgagccatcatcacaccactgcactccagcctgggccgcagagccagaccctgtctctgaaaataaayaaataaataaataagttagtcagaaacagctggtgtaggctgggcatggtggctcctacctgtaatcccagcactttgggaggccaaggtgggtggatcacctgaggtcaggagtttgagacccacctggccaacatgggaaaccccatctctactaaaaatacaaaaattagccaggcatggttgtgggcacctgtaatccaagctactcaggaggctgaagcaggagaatcacttgaaccccggaggtggagtttgcagtgagctgagatcgtgccaccgcactccagcctgggcaacaagagcgaaactctatctcaaaaaaaaaaaaaaaaaaaaaagaaagaaagaaaaaagaaacagytagtgcagctggggagtacgggagcccccttaggaatgatgcacatagttgtgttttctgagtggtgtttggatctcagctaagtccagggcatgttgtgagccctgggtcttccttgtccactgaaaaaggctctgtcctgtagatgatttaagttgtttgcagccagacaacacatgtgtcacacagggtttctggaagaacctgagttggggagattggggcaygtccctgtgcaggttcaggatgctgcagggcagggctctgttgacagcagggtgtggcttcatgacccccgcaccttctcttccccmctccctagggcttttgccaagaggcagcagcagctgaccgccatgaaggtgattcagaggaactgcgcygcctacctcaagctgcggaactggcagtggtggaggcttttcaccaaagtgagtgmtctgccccagcccccttcccaggggcccccagccctgsttcttcactctggagccttcacatttgggacaggaggtggtcgcaagtgggtgtggaatggagggctcgaactcagaccttgagcattggcggttctctggcccgaggaggccctgtcctttggcacataggctatagccaggaccttaacacaaagtattaatatttccatccgcactggaatccctcgtgtggcccatttatagccacacccacttcctccgtagccatggaaaccactctgttctccagttctgtaattttgatggttcaagaatgctgccgggggcggcggctcacgcctgtaatcccagcactttgggaggccgaggcaggcggatcacttgcggtcaggagttcaaaaccagcctggccaacatggcaaaaccctgtctctacttaaaatacaaaaattagctgggtatggtggcaggcacctgtaatcccagatactcaggaggctaaggcaggagaatctcttgaactcaggagacagaggttgcagtgagccaagatcatgcctgcactccagcctgggtgaaagattgagactctgtctcttctttctttttttttttatttaaaaaaaaggccaggcacggtggctcacgsctgtaatcccagcactttgggaggccgaggcgggtggatcacaaagtcaagaaatcaagaccatcctggccaagatggtgaaaccctgtctctactaaaygtacaaaaattagctgggcgtggtggcaaacgcctgtagtcacagctactcaggaggctgaggcaagagaatcacttgaacctgggaggcagaggttgcagagagctgagatcgcgccactgtactgcactccagcctggtgacagagcgagactccgtctcaaaaaaaaataaaacaaatattctatacatggaattagagagcatccagactgttgcatgtatcaatactgcaggtttttttttttttactttttgcattttttgaaatggagtctcactctgttacccaggctggtcttgaactcctgacctcaagcaaccctcctgcttcaggctcccaaagtgctgggattacaggcatgagccacctcatctggccatagcatattattttttatttctggcagagtcagggcctccagaggactcaactggttcctgtagtggcactggttgcattgtccccatggcacaaagacatgctctgttgcaatagactaggcttctccttatatgcccttgagtgtatccactggtgcaaggctttttcaccaagcaaacagacattgagtgcctgctgtatcccaggcacatgctaggtgctgggggtgcagctgtgaacacacaccatggtccctgacctccatgaatattctagccgaattggtggggagtaaacaataaacagataatcacagagacagatacataatggcaaactgtgataagtgcatgaagcaagctgctggagtacatagcaggggcttccttgtgccaggcaggggcttgaaaacaaagagttaggaggcagcccagggaaggacagcagatgctgctttttggaaatgttcgtccccactgaaccaacttctgaaaaactatcctaagaaaatcgtcttagccaggtgtggtggctcatgcctgtaatcccagcactttgggtggccaaggcaggaggatcacctgggttcacgagttcgaaaccagcctggccaacatggcgaaaccctatctctactgaaaatacaaaaattagccaggtgtggtggtgggcacctgtaatcccagctactcaggagattgaggcaggagaatcacttgaaccgaggaggcagaggtttcagtgagctgagatcgtgccactgcactccagcctgggtgacagggcgagactccacctgaaaaagagaaaagaaaatcaagagttaagggcattcattatggccttatttacaatagcagaatttcagtgtccagtcctagctgaatgatgagttcaataatggttcatctatcaatggaatgttttcagctattaaaatgatggctttggctactgaataggtctgctaaaaaaaaaaaaaaaaaagacttctacctagctgtctagttggacactgtggcatgtgcctgtagtcccagctactctggagctggggtgggaggatcgcttgaggccaggagttcaaggctgcagtgagctatgattgtgtcactgcactccagcctgggtgacaaaacaagaccatcgctaaataaataaattaacttaaaagatggctatgtaaagttgtaagaatgatgtaacagcatggggtaatacatatcttataatttttaaaaaaattttatttgtggagacagggtctcactgtgtcacccaggctggagtgcagtggcacaatcgtggctcactgcagcctcagcctgcagggttcaagcgatcttcctgcctcagacccctcactagctgggactacaggcacacaccaccatgcctggttacttgtttttgtagagatggggtctcatgatgttgcccaggctggtcccaaactcctgggctcaagcgcttgcctcggcctcccaaaatgctgggattacaggcatgcatcactgttcctgtctgtatcatataattttaaataataaaagcagcctctacaactaggcagcatggtcttaagtctattttttaaacatagaaaaagagccaggaaggaaatgtaaacaatgttaataatgactttgatagggaggtgggtgggatatgaaagattttttttctcccttttgtccttggaaggaaatatcacttttcagcagtagttctctgttgggatggttctaaagtggggaagatgagactttttcctttcactttgtaccttttctggtgctctgatttagagctcctcagtcttgccactgttgatattttggggtgactaattctgttgtgggggctgtcctgtgcactgtagggtgtttagcagtatccctggcctctacccactggatgccagaggcaccccccaccccagctgtgacaatcagcagtgtctccagacaatatcccctagtggggatcggtgggggcaacattgtccctggctcggaaccactgatsgaatttattatgacaacatatccctttgccacaaaaacaaatgatgggctaaccgtgtgtgtgcaggtgaagccactgctgcaggtgacacggcaggaggaggagatgcaggccaaggaggatgaactgcagaagrccaaggagcggcagcagaaggcagagaatgagcttaaggagctggaacagaagcactygcaggtacctgtatggatgcatggctggggttgctggggaacaggacttggccccgtggggctcacccgcctcctccccaccacctgcgtgcagctgaccgaggagaagaacctgctacaggaacagctgcaggcagagacagagctgtatgcagaggctgaggagatgcgggtgcggctggcggccaagaagcaggagctggaggagatactgcatgagatggaggcccgcctggaggaggaggaagacaggggccagcagctacaggctgaaaggaagaagatggcccagcagatgctggtaaggtgtcacaggggcagcccgtggtgggtagcaaatcacttgaccctcaccacaggcctgtggaggtgcatccagggatatgtgtccctgctgggacagatgatgagacgggggcttggagagggttggtcatctgatcaaggccacacarctgggattgggactggaacacagtgagcccactctgttctattgccctgccttgcatgtgctaaccccttttctcctaacagcaagcctgaatggaggataattgtatttgttagctattgctacataacaaaacatgccaaactcagcagctaaaaataaaaagtattgcatagtcaggaatttgagagtggcttaggtgagtggttctggctgagggtccggcctgaggttgcagtcaaggtgttggctgaggctgcagtcatctgaaggctcatctggggctggaggacccacttctacttggcttattcacacagctgttggaggaggcctcagttccttatcatgaaggcctctcccctcagggctgcttgagtgtccttccaatatggcagcagagttcccccagaaggagtgatctgagagaggagaaaggaagccgcaatgccttttatagcctaatctctgaagttacattccatcacttcttcctgatttttgttgttgttgttagaagcaaatctaacccccactcaaggggaggagaattaggctccacctttttggagtmgcaaagaacttgtggatagattttaaaaccaccatggtacctactgtgctcattttatagatgaggaggttgaggttccatgaagcagagcagcttacccaggtctttattttttttttttttttgagacagagtctcactctcttgcctaggctggggtgcgatggtgcgatctcagctcactgcaacctctgcctctcgggttcaagcgattctcctgcctcagcctcccgagtagctgggattacaggagcccaccaccatgcctggctaattttttttgtatttttagtagagacggggtttcaccatgttggccaggctggtcttgaattcctgacctcaagtgatccacccacctcggcctccaaaagtgctgggattacaggtgtgagccaccacgctcaggcctttatttcttccttttaggaggctacagagttctgggcatcttcaggcctagcccctgtattcattagtccccagatcaccacgagagtaaatctgttataaccaaagctgttactcttttccctccacaacaaaggaccttgaagaacagctggaggaggaggaagctgccaggcagaagctgcaacttgagaaggtcacggctgaggccaagatcaagaaactggaggatgagatcctggtcatggatgatcagaacaataaactatcaaaagtgagtaggggccgggtgcagtggctcacgcctataatccgagcactttgggaggccaaggtatgtggatcacttgaggccaggagtttgagactagcctggccaacagggtaaaactccatctctactaaaaatacaaagattagccaggtgtggtggccagtgtctgtaatcccagccacttgggaggctgaggcaggagaatcacttgaacctgggaggtagaggttgcagtgagctgagatcgtgccactgcactgcagcctgggtgacagagtgactctgtttcaaaaaaaaaaaaaagtggaatcaagtttctgcattaaaaacaacaggcttaccaggatcagggagattttggggatttgggactttcagttctcaaagcagaaaagcccttagaaaaccaggacaagctggtcaccgtagtcagtagtcactaaccagccccacctgcttttagttctttgagctggatgtcagcttggcccctactgtgagccaggctctgtgttagatgcaggtatgcatggtgaaggaggacccttcccttgtggggtttatactgtagtgagatggcaaataatcgtcatttaccatggtgatcagggctctgaaggaaacgttcaccatattttaagagtgcggcaggccgggtgcggtggctcatgcctgcaatcccagcactttgggaggctgaggcaagtggattacctgaggtcaggagttggagaccagcctggccaacacggtaaaaccccatctctactaaaaatacaaaaaattagttgggtgtgttggcgggcgcctgtagtcccagctactcgggaggctgaggcaggagaatcacttgaacgtgggaggcagaggttgcagtgagctgagatagcaacactgcactccaccctgggcgacagagtgagactctgtctcaaaaaaaaaaaaagaatacagcagtgggggatagaggaagggtattcatagaagacttcctggaggaggtgacatttaagcagaaacttaaagatgaaggagcagttagaggggagtagaagagcatctcagctggttggcccactgtgcaaaggccctggggcagggaagagctggccagtggcaggaatggaaggagggtacctttagctgaccatacaatatgagggacaaactggcacgagatgagaaatggccagtttttggaaattgttatgggacttctctttaccatttaaaactctagttgtattttgttataatgtgggtttttctttcaactgtttacatggaaatcactaaaagtgaaacatagattctagagaaaagaaaaatcctaaagctatctctttctctttccccaaaaaggaacgaaaactccttgaggagaggattagtgacttaacgacaaatcttgcagaagaggaagaaaaggccaagaatcttaccaagctgaaaaacaagcatgaatctatgatttcagaactggaaggtaaaccagctaccaagagatttatttttattttattttattattttttttagagatgaggtcttgctctgttgcccaggctgcagtgcagtggtgcgatcatggctcactgcagcccgaaactcctaagctccagtgatcctcctgcctcagcctcctgagcagctgagactacaggcgtgcatcaccacacccagctaatttttttttattttttattttgtagagatggggtttcactatgatgctcagtctagtctcaaactcctgggcccaagcagtcctcccaccttggcctcccaaagtgctgggattataggcatgagccactattcctgggcttgaatgggtatttttaaaagcaggaaaatcagaaaggaaatttgaggatggcagatcatcccatgagtgacaactaactctatgccacctctcgaaatcacccttagtcatcacatgcactaataatatgataaaagggctgggtgcggtggctctcgcctgtaatcccagcactttgggaggccgaggtgggcggatcacgaggtcaagagttggagaccagcctggccaacatggtgaaaccctgtctcaaaatacaaaaattagccaggcgtggtggcrggcgcctgtaatcccagctactcgggaggctgaggcaggagaattgcttgaacccgggaggcggaggttgcagtgagctgagattgcgccactgcactccagcctgggcaacaagagcaaaactccatctcaactaataataatattatgacaatataaggtgctgttcatcgggagataatggtccagaccgtgactatgatggttactgattgggggatgtgttcatctcctccgggtaaaatgcctgggcaggaaggctcatttccgggcatctctctggggcctccccttcctgaagagcaccttggtttttgcagtgcggctaaagaaggaagagaagagccgacaggagctggagaagctgaaacggaagctggagggtgatgccagcgacttccacgagcagatcgctgacctccaggcgcagatcgcagagctcaagatgcagctggccaagaaggaggaggagctgcaggcggccctggccaggtagcggggctggcaaggggcatttgctgtgtgtccatgtatcccctgggcccctgctcattcgctcattcgcagtggctgtcttggtcaaggyggccccaggcccttggcatgaacttcgtttcccaggccaggcctcccacaagccttctcgaccctgttcactcccccagatcctcaccttcgactttcttctcttccctgcaaacacatcatgtctttgcagttgatctcacctactcccatggtgttgctgctgcctcttcgacatccaggcttttctcatctakacccccttctgaatttccgattgcccaatgagtcaatttccaccgtcatctcaaacacccctgtctaaggcgggaatgaccttcctttccccagcccctccctctaagggccctcttttttgtgaacaccaatctcctcctttgtttctgccgacccacagcaagcagcaaccttcagattctgccagtccttctaaatgtcccccacccatttcctctggtttttccctcttcctggctcttagctggatttacactaatgctaatactgcagcagccastatgaatgattatttacctgctcactcggtgctaagttcttttcaagcaatacctttgcagacacctggccaggtgtactgccggtgtctttgaggaggaagctgagcctcctaggggtaacgcaacaggagcaatgtcattgcttctaagaggcagagctgggatttaagcctcaaagctttctgattgatcccctggcctggctcttttgtcggccaatttgtgctatgttgacagtgctacggtgatgaagggaaagcatctctctggggcaggaacctgctcacaaaactttgctggctggatgcagtggctcacgcctgtaatctcagcactttgggaagccgaggtggggggattgcttgaggccagcagtttgagaccaacatgggcaacatagcaagaccctgtccctacaaaaagttaaaaaatgagccaggcatggtggtgtgtgcctgtagtcccagctactcaggaggctgagatgggaggatcacttgagcccaggaggttgaggctaaagtgagctatgatcatgccactgcactccagcctgggcaacagagcaagaccctgtctcaaaacaataataacaacaaaacaaaaacctaacttcactggcttactagggaaaatccagtttccttagcctcaccctcagagcccatccaccctctgcagtctcaccccaacccaactatttcactttctctcttgttgctgccctttcacaagtacagtaaaatcaaagtgcttgcctctcctgcagcattctgccatttaacagggcttcttgcagcccaccttgatctctggtcaccacctccaccagatgcagagccccagtctgaatatcccccgcaagcagtggctggccaaatgctgtgcatggggcgggtactcagtcactgagcaaatgcagaaagaacagacagttgccagggaagaagaactgtccaacattcagaaagcatctacacagtccctactgtgaccaggtaccttgccagtctggggtcaatgctttgcattcttgcacacacatgcacacacgtgcatacacacgtacacacacccatgcacatgtacaacctgttttgatgtcagaccttggcactcacatcctatgttaatctcatatagtctggcatgtcaagaagcagacctggggacatggatagaargtgtttgatgtctstgcaacataactgtctggtcccagaaaagtttttggccacattgtaagagaggaaaccaagggacctgggggttcattctgctgggtctctccctggaaggcttgacgatgaaatcrctcagaagaacaatgccctgaagaagatccgggagctggagggccacatctcagacctccaggaggacctggactcagagcgggccgccaggaacaaggctgaaaagcagaagcgagacctcggcgaggagctggaggccctaaagacagagctggaagacacactggacagcacagccactcagcaggagctcaggtgaggggcccatcaatcccaccatcctgctatcccactgcaccaatgggatgggggcagaagaggggacaaacccaaagcaaatcgtgcatcagcccctgtgcatttaccttcctggccgcggtttgctttaacttatagaagcatggttggctgtttcttttttttctttcttttttttttttttttgaggcagtctggctttgttgcctaggctggagtgcagttgtgccatcttggctcactgcaacctccacctctgagatttaagcgattctcatgcctcagcctcctgagtagctgggattacaggtatgtgccaccacacccggctaattttttgtttttagtagagatggagttttgccatgttgcccaggctggacttgaactcctggcctcaagtgatccacccacttccgcctcccaaactgctggtattacatgtgtgagccactgcacccgaccctcatcatcttatttctcatcagaagagtagtatataccagggatgtacaatcttttggcttcccttggccacattggaagaaaaagatttgtcttgggccacacataagatacactaacactaataatagctgatcaactaaaaaaattttacaaattggaaaaaacatctcatactgttttaagaaagtttatgactctgtgtcaggctgcattcaaaaccatcctcattggtaagcttggatatactcagagaacaatttgaaaactatagaaaagcagacataaaaaaaaatcacctttagggtcgggctcacgcctataatctcagcactttgggaggccaaagacaggtggatcacttgaggtcaggagttcaagaccagcctggccaacatggtgaaaccctgtctctactataaatccaaaaattacctgggcgtggtggcgcatgcctgtaaatcccagctactcaggaggctgaggcagtagagtcacttgaatctgggaggcagaggttgcagtgagctgagatcgcaccatcgcactccagcctgggtgacacagtgagtgagactccatctcaaaaaaaaacaaaaaacaaaaaaatcacccttagtcacaccagttaacattcttgagaaattccttcctgtctgtgtgtgtatcagtcagtccccaagctccaattcccaagtatgtgtgtgtatcacttttgtgttaaattttaaaaataaaattgatcagattggttttcaattgaagattcacttcaaatgaacaaacaataacaaactgcctgccagatcacgaatcctgactctagtgaaactaggtcattgattcattcagtaaacacataaatgtattttgatgcaatctgtggtgttggcatagcatgtatcatagcatatagctatgctagctgtgccaacaccatataccctggggtttacttcccccactttgggttttgtgcagtgtcacatgcacatagagcacagcgttctgctcccttgccgcttggcctttgatacagaagagcccagtgcatgggccaggtatggtggctcatgcctgtaatcccagcactttgggaggctgaagcagacagatcacctgaggtcaggagttcgagaccagcctggccaacatcatgaaaacctgtctctactaaaaagacaaaaattagccgggcgtggtggtgggcgtcggtaatcccagctacttgggagactgaggcaggagaatcccttgaacctgggaggcagaggttgcagtgagctgacatcattccactgtactccagtctggacgacggagcaagactcgataagaaaaacaaacaaacaaaacaaaaaaccaggctgagtgcggtggctcacacctgtaatcccagcactttgggaggctgaggcgggtggatcacctgaggtcaggagttcgaaaccagcctgaccaacatgktgaaaccccatctctactaaaaatataaaattagccgggcgtggtggtgggcacctgtaatcccagctacttaggaggccgaggcaggagaatcgcttgaacccgggaggtggaggttgcagggggccaagattgcgctgtygcactccagcctgggcaacaggagtgaaactccatctcaaaaacaaacaaacaaaaccatggactcaaggtcaaggtttagcttctaattctggctccatcacacaatggctgtgacaccatgggtaaaactgcttaccctctcttagccttagtttcctcatttgtaaaatggaaataataacacacctgcctctttgggttgctctgaggattagatgatgtatataaaaaacttagctcagggcctggcatatagtaactgctcattaaataagagccaacattaatatttaagcaaaattttgcagttcacagacatcctttcaattctattactttgtgtatttgtttgccagtcattacagatgtcctaggcaggtgatatgctccacattttgcagctgaggaaattttaggtccagagatgttaggtgaatgacccaaggtcacacagctagagaggggtggtgatgaggactgcagctctgggtcctggaagagctctcattcttttgcacggcactgagatgaccctctgtctccacccaactgccattcactgtgttcctcccaccaagggccaagagggagcaggaggtgacggtgctgaagaaggccctggatgaagagacgcggtcccatgaggctcaggtccaggagatgaggcagaaacacgcacaggcggtggaggagctcacagagcagcttgagcagttcaagagggtaatgctttttggtgatgctttttggtgatgacacataagagtgacatcagcagcctcaaattactacaggtcagggtctgcataaagacaaaaaacaagttacataagattctaatgatgatgatagcagcttatatttatttacaaaatgcttcccatacaggctgggtgaggtggctcacgcctgtaatcccagtacttggggaggctgaggcgggaggatcgcttgagctcaggagttggagaccagcctgggcaacatagtgagaccttgtttctactaaaattttaaaaaagtaggccaggcgtggtggctcaagcctgtaatcccagcactttgggaggccaaactgggtggatcacctgaggtcaggagttcgagaccagcctggccaacatggcgaaaccctatctctactacaaatacaaaaaattagccgggcgcggtggtgcatgcctgtaatcccagctactcgggaggctgaggcaggagaatcacttgaacccaggaggcagaggttgcagtgagcagagatcatgccattgcactccagcctgagcaacagagcaggattccatctcaaaaaaataaaataaaataaaatattggccaggcctggtagtgcattcctgtggtcccagctatttgggaggctgaggtgggaggatcgtttgagcctgggaggttgaggctgcagtgagccctgtcatgccactgcactctagcctggacgacacagtgagaccttaatcaaacaataaaaataggctgggcacggtggctcaccatgtctgtaatcccagcaatttgggaggcaaggcgggcaaatcacttgagctcaggagttcgagaccagcctggccaacatggtgaaaccccatctctaccaaaaatataaagaattagctgggtgtggtggcatgtgcctgtaatcttagctactcgggaggctgaggcaggacaatcacttggacccaggaggaagaggttgcagtgagctcagatcgtgctactgcactccagtctgggcgacagagtgagccgccatctcaaaaaaagaaaaaaaaaaaagaatgaatagaaatgcttctcatacagtatgtcaattaatcttcacaaccaccctgtgagacgtgtactattaaactcattttacaagcaaagaaactgaggtcctaggtgcctagaggtgaagagacttacccaaggtcacactgctggtaagtgacagagccatgatttgcacccaaacagtctggtcctagaccccactttctggcctctacaggactgaaggcctataggatgggtggggcctatcaatatactgcccttcagggataagcaaaggtgtaacaacactttcggggagatttaaatgaaacttaaaactgggatcattctatccactttaatttctctgcagactggaggaaggccaggcatggcggctcatgcctcccgtaatcctaacactttgggaggccaaggagggaggattgcttgagcccaggactttcagatcgcctgggcaacatagcgatttttcttttgtaaaaaaaaaaaagactggaggaaacttgtcattatttgatttcaatggcagaacagctctctccggcataatttgagaatgactaggtcaaatcactctcccgttgttggaactctttgcggtgtatgggagtgggagctggtaaatagcagtaccgaatgctgaatcttgggtgctcttctctcctttggggtagtgcctgtgcttcattccccagggtaagttttttagcttgcgaccttcggccagattgttttcctgaaagcctgagttacattaccctcagcgttgcagctcctccacatccccttcagtggaagcttttggttctgctagattaagtgggtgcagcattgcctaaaaattttggggaatttgcatttggttctatcactagtgtattggtccgttgttgcactgctctacagaaatacccaagattggattatttgtttattttttgagcagtggagtcttactctgtcactcaggctggagttcagtggcgtgatcttggctcactgcaacctccacctcctgggttcaaatgattctcctgcctcagcctcccaagtagctgggactacaggcacacaccaccatgcccggctaatttttttttttttttttttttttagtagagatggggttttgccatgttggccaggctgatctcgaactcctgacctcaggtgatccacctgccttggcctcccaaagtgctgagatgacaggtgtgagccactgcaccaccctgagattgggtaatttctaaagaagagaggtttaattggctcacggttctgcaggctgtacagaaagcatagcagcttctgcttctggggaggcctcaggaaacttaccatcatggtggaaggcaacggggaggcaggcatgttttacatgaccagagcaggcagaagagagagaatggggagctgccagacacttttaaacaaccagatctcatgagggcagcaccaaagggatagtgctaaaccattagaaactgcccccaaaggccgggcgcggtggctcatgcttataatcccagcactttgggaggctgagataggcggatcaccaagtcaggagttcaagactagcctgaccaacatagtgaaaccccatctctactaaaaatacataaaattaggctgggtgcagtggctcacgcctgtaatcccagcactttgggagcccgaggcaggcagatcacctgaggtcaggagtttgagaccagtctggccaacatggcaaaaccccgtctctactaaaaatacaaaaattagctggacgtggtggcggtcgcctgtaatcccagctacttgggaggctgagacatgaaaatcacttgaacccaggaggtaaaggttgcagtgagccaagattgtgccactgcaccccagcctgggcaacagagtgagactcagtttcaaaaaaaaaaaaaaaaaattatggttggaagagtgaggccccagacagaatcactgaccctccccatgcttggggttcattagacgtgaacaggagctagaagccaagcccattcccagccaggcctctttgggaagacgcagttattaagaccaccagcagacggcatgtccattactgacccgcacaaagcaggtagaggtgcaaacctctgcccatctcaggtgcagggaaacagaggcctttgcctctaacaacttgaattctgatgtagagacctggttccatctgcttgtgggggaaacgtttaacatcagctcctacctgggctccccaggccctcgtgcggtttggccccagttctggggtcttaggctgggctaaggtttctgggagcccatgtcccctagggtccccgcttcactgctttgttaccaccaagagactccctgtccccatctgaggtctggcagctcttagtcatgtcttggagggaggacgggcatccagggctgaccggtcaacgtccagcacctcccagggactatgggaagactgagtggtgggtctcgtcctctcgggatacttgcgcttctctttccccttctctacaacctggaaagaagcccctcaccgcgtcctacttttgcccaacacgcttttttttttgagacaaagtctcactctgtcgcccaggctggagtgcactggcgggatctcggctcactgcaacccccgcctcctgggttcaggcaattctcctgcttcagcctcctcagcagctgggattacaggtgactgccaccatgcccggctaatttttatatttttagtagagacggggtttcaccatgttggccaggctggtctcaaactcctgacctcaagtgacctgcctgcataggcctcccaaagtgctgggattctaggcctgagccaccgcgcctggccccaacacactttttttttcctgtagggcaactcacatgcctacaggagctggttccataaaataagtttcccttaactaggacagaagtagcagtgtcaatcacacgacacctgtgaaggacgggggcggtgaaaggtgactgccccacctgcagagccagccgctacttagatgtggcagattgttgccttgaaggaaagcaagaccctctgtttccagatctttcgttgttgttggttttttgtttttgtttttaagtttaggattactgaggcatatgtagtaaaatttatccattttactgctccattaattttaacaaatgtgtattgtgtaactaccaccaccacagtcaccacatagaatgttagttattgattgattgattgagatggagtstcactctgttacccaggctggaatgcagtggcatgatcttggttcactgcaacctccacctcccaggttcaagcaatacttgtgccttagccaccccagtagctgggactacaggcgtgcgccaccatgcccggctaatttttccatttttagtagagatgcagtttcgccatgttggccaggctggtctcgaactcctcacctcaagtgatccacctgccttggcctcccaaagctacttatttctgaaacagggtctcactttgttgcccaggctggagtgcagtggtgtgatcatagctcactgcagcctccaattcctgggctcaagcaagcctgccatccgcctcctgagtagctgggattgctggtgtgtgccccccacacccagctaatgttttattttagtagagatgggggtctcactacattgcccaggctggtcttgtactcctggccttaagcgatccttctgcctgcttcccaaagtgctggggatgacaagtatgagctgccatggcatgccttcaaacattaaagttttttgaaaaagaagctgggaatccagatttttatgtgacatttattaaaatgtcggcaactcatttttttaaaagtagtgaaagggtcaaaggggacatgtcagcaggttggataccgcttgtgggattccagattgcaacccatgagctttaggaaaatagaatccaaaatatcagctgggtgcggcagctcacgcctgtaatcccagcacttagggaggccaagatgggtggatcacttgaggtcaggagttcgagagcagcctggctaacatggtgaaacctcgtctctactaaaaatacaaaaattagtcgggcatggtggcgggcgcctgtaatcccagctacttgggcagctgaggcaggagaatagtttgaacctgggaggcggaggttgcagtgagccaagattgtgccacggcactccagcctgggtaacagagttaagactccatctcaaaaaaaaaataacaacaaaaaaaccccaaatctcttactggtgattgtgtgccccctgttgtgtgccttcctggacctctctgagggaggaaagggcagggcctgaaacgttctcccggccacagcctccctgttatccctcccctctgcttccttcgccaggccaaggcgaacctagacaagaataagcagacgctggagaaagagaacrcagacctggccggggagctgcgggtcctgggccaggccaagcaggaggtggaacataagaagaagaagctggaggcgcaggtgcaggagctgcagtccaagtgcagcgatggggagcgggcccgggcggagctcaatgacaaagtccacaagctgcaggtgaggaggtggcgcggtggtgtggtgggcagtgctgggtggtgcccagttctgtggggaggagcctcttcccggctcgctgaggtctctcttgctgcaaggcaagtcctttcctctagttgcgttcctggaggagaggcgatgatctccctgttcaattaaatattaaaaaaaccttctggccaggcacggtggctcatgcctgtaatcccagcactttgggagacagaggtgggtggatcacctgaggtcaggggtttgagaccagtctggccaacatggtgaaaagtctctactaaaaatacaaaaattagccaggcgtggtcgtgggcacctgtagtcccatctactcgggaggctgaggcaggagaatagcttgaacccaggaggcagaggttgcagtgtgcrgagaccgcaccattgtactccagcctgggctaaaagggcaaaactctgtctcaggaaaaaaaaaaaaaaagaaaaaaaacccttccttttccaatttgataagtatttattgagcacctgctgtatgccaggcactgtgcttaatcctgagatccaacagcaaggaagaagagacactgtcgctgccccagtaggactccagccgagtaaggggaagggaagggaagggaaagacatgaataatcacacaaatgaatgtcaaatgatgcagcaaagggaaggcacatgatgcccaagtgtaaataaccagggggcctaacctgggggaggaggagccacgaaaggcttccctaaggagcatggataagtctaccaggcagagggaacagcgtgtgcaaaggccctgtggtaagtagaaaaattaggagagagacatacagccagtagagctggagtgcccagctggggttgggggtagggggagatagtacagagtggggttggagggggagcttgtacccagatgatgtagggcttttgagaacctattacatgtatgttgatccttactctgggcaatgtgaagctgttgaggggttttaagctgctgaatgacatggtctttttgtctttggtcttctttcacttggcatagccatttaccctgccttgccactcatggggacgtggccaaagttttcacaaatgtttaacatgtccacagccagggaccaaggggcgagggaagaattaagtgagatgtttttttctcacatgcagttgagagcagggcttttgccgccctcatataagcagtgtcaagatcattcatatcctccttgtcaatggaagagatggaggggtaggctaacagcctcaaagggacttatgcagagacactagggagtaaaagccagagaatacagagaggacgtttttacctttagggcctgcgtctctggctttggccatcagggtcaaagagtaggagtgaggaaggaagggatgggacagcatccctgggacgttcaagtaccatcctggtctcccttctccagccttagagagtggaccagccagagcacctcgtctggactctcagacctgctgctttgtctctaccaaccttggcagggatctaggatccatttagtgggatcaggtcccagtcaataccattggggctcaaataagttcttagaaccacagagtctagggccagggtcccaactcataggtgayggagttcccttcaagccacagattctgttttttktgtgtgtgtgtgtgtttttttttttttttatcagagtcccatacctcacsggtattttctcaatcagtgaacacctcaagtactagcccatgtgttttgagtaaaaagggctcctttcaacgaggatccccttctagaggctttgactaaccagtctcttggcacccttagaatgaagttgagagcgtcacagggatgcttaacgaggccgaggggaaggccattaagctggccaaggacrtggcgtccctcagttcccagctccaggacacccaggtgagtgtcctgccacatcatccaggggacctggggggtggccttcctcggggcaggtccctgggacctctttgcatcccttttgcaggagytgcttcaagaagaaacccggcagaagctcaacgtgtctacgaagctgcgccagctggaggaggagcggaacagcctgcaagaccagctggacgaggagatggaggccaagcagaacctggagcgccacatctccactctcaacatccaggtgcctgccccgtgtccttgcttccttcatgggtcctctcaacttctctgcgctgagatcccccgcaggcagatcgcggtggagtgttggtgcgatggtgcttgaccccycagcttcccctgctattgggtttctccaacgaggagacatggtcttcscttctcagagtctgtggggccagggacaggggccaytcatggtccccctctcaccctaccctggacgctgtccttgtagctctccgactcgaagaagaagctgcaggactttgccagcaccgtggaagctctggaagaggggaagaagaggttccagaaggagatcgagaacctcacccagcagtacgaggagaaggcggccgcktatgataaactggaaaagaccaagaacaggcttcagcaggagctggacgacctggttgttgatttggacaaccagcggcaactcgtgtccaacctggaaaagaagcagaggaaatttgatcaggtagagggcgtggggtgtccccyactctggccatggacgctgggttggggaatcagctctgcagagtatgacgcgtggctctggcctgtgcctgcatcccctctccactctgtggggagccatgggaggctgtcttatcttgtcttgggcgaccatggagcattaacgctaccaggtcacagtaaggatggcaaagaagccttgatgactgtgacttttctgggtaccagcaccatgagggtcacctgcacacatggtgatgccttagtttctagcctgaagaaggaatgaggtgcttatttattcactraatgtatttactgaatacctattgagtagtattccaagtaattcagtttctatacttttaataccactcttccctaagatttcattctgtaaaattccaagtacacagcaaagttgacagaattgtacggtgaacacctttaaggccaccacctggattcagtcattgacactgtattatatgaactttatcagatacttattttgagacaggatctrgctctgtcacccaggctggagtgcagtggtgtgatctcagctccccgcaacctccaccactgggttcaagcgattctcctgcttcagcctttcatgtagccgggattataggagcacaccactatgtctggctaatttttgtatttttagtagagatggggttttgccatgttgtccaggctggtctccaactcctggcctcacatgatctgcctgccttggcctcccaaagtgctgggattataggtatgagccactatgcccggcccacatatttatttataaagactaattstatctatcatgccttatctcttgggtacatttcagagcaaattacagatgtcagtacatttccccttccacacctcaacattgcatattaattagagtttatttttaaacacaattttgcttcttttggggtaaaacttacatgtgatgagattcacaaatcttaattgtacgataaatggagacccctgtatgacccaaacccctaaataccaacttttaagatacattattatttagtaaatatgatttagtttacaagtgactcagggttattctaaaaatcagtttgagaggccaggcacggtggctcaygcctgtaatcctagcactttgggaggctgaggcaggtggatcacttgaggtcaggggtttgagaccagcctggccaacatcgtgcaactttgtctctactaaaaataccaaaattagccgggcgtggtggcgcacgcctgtaatccctgctactctggaagctgaggcaggagaatcgcttgaacccagggtggggtggaggttgcagtgagccaagattgcgccactacaccccagcytgagtgatggagtgaaaaccctgtctcaaaaataaataaaatgaggattgtacagtgaggctaaatgccagatgcctgcaggttccctacccctccctgactgacctcctagtgtcaggattctagataacatcccagtttctcctcttcccatcagctacctctcctctgggctgtcagctcatcttcaatgcttcgttatctggttgaaggcctgaggttgcttttattttcctgtcacatagagtgtagtgcagtggcacacatagtgtgggatttttgtgttgactgtgccatttagaggtccctgtctttgctgaatactggaagtttggcttttggatgttacaatttataatctgctctgttctctctgaagatgagattaacgtgagcatggaatgttctctgagttgcttctccaagcagagagatatgtgtgcagggccacccatgcttaccatttccctactgaggctcttaggatacttttgtragatattaatagctacttgtggccatgaaacaaactaataactagcttctggcagctttaaatctcactttgacctcagtgtgctctaagcaacgtgggcaggtctagtggtttcgaagcacaaggatttggccaggtgtggtggctcacacctgtaatctccgtgctttgggaggccgaggcaggaggctcacttgasggtcaggagttcgagaccagcctggtcaacatggcaaaaccacatctctacttaaaatacaaaaattagccaggtgtggtggtgggcacctgtaatcccaactactctggaggctgaggcaggagaatcgcttgaacccacgaggcggaggttgcagtgaaccaagactgcaccattgcactccagcctgggtgacaaagtgagactccatctaaaacaaacaaacacacaaaccaacaaaaaaaaacaagtcagctgatttctggctctgcataaggttgatgtagaagtcagaacgccagatgattatataaattactcccatagctaacctacactgcttacacctgcacctcaatacattcagcaggacacagggcttcccccggtatttacaattcagtgacgctgaccccggatatgcctagaagtcacctctgggtcttgtgttgtagttgttagccgaggagaaaaacatctcttccaaataygcggatgagagggacagagctgaggcagaagccagggagaaggaaaccaaggccctgtccctggctcgggcccttgaagaggccttggaagccaaagaggaactcgagcggaccaacaaartgctcaaagccgaaatggaagacctggtcagctccaaggatgacgtgggcaagaacgtaagtggctctgggtggtttttctcgtccatgtttcgcctgcccaccctctgtgctattcaccagtccatgcgaggctagctcctggcctttttcatagcgaactatcatcggaaatggaaggaggtttttggactggtgcaggggctgggaggggctgagaatggcagtcgaggatgggtctgagttggggggtccgaggataaggctggggtctgaactctcaggggtcatcttgagtcccggccatgcatcctgtgggaggccaaagccacctccctgatctcctgaggtgccgctcacggtgggtttctcaatcgtcttcatgaagttgagcctcayagaatggggctgcccgctctgccggcaggtccatgagctggagaagtccaagcgggccctggagacccagatggaggagatgaagacgcagctggaagagctggaggacgagctgcaagccacggaggacgccaaactgcggctggaagtcaacatgcaggcgctcaagggccagttcgaaagggatctccaagcccgggacgagcagaatgaggagaaraggaggcaactgcagagacaggtgygtgctgccgggkaggccagcagagggaggtcgggtggcctttttcattcctatcaccactctcatggttggtgtggaaacttcgttttctttatttttttttgaaacagagtctcgctctgtcgcccaggctggagtgcagtggcgtaatctcagctcactgcaacctccacctcctgcctcagcctcccgagtagcttggattacaggcgcatgccaccatacctagctaatttttttttttttttcagtggagacaaggtttcaccatgttggccaggctggtcttgaactcctggcctcaagtgatccattctcctgttggcctcccaaagtgctgggattacagacatgagccacccacgcccggcgtgattccgttttctcatctgcaactggggatgagatgcccacctcacaagggggctgtgctggggaaggggtgcagtgatgtgctgcctaggtgagccaaaggacctcccaggggcaagtggggcagcacacatctctattcctcgcccagcttcacgagtatgagacggaactggaagacgagcgaaagcaacgtgccctggcagctgcagcaaagaagmagctggaaggggacctgaaagacctggagcttcaggccgactctgccatcaaggggagggaggaagccatcaagcagctacgcaaactgcaggtgggtgacactaggagcttggggcatgggtggagggagggcacagttcccctcaggccaccraagtcagcagagcgggctccaggaagcaagcctgcacctgccattggtgtgggttcagctggggtttttctggaaccattcaggatttggtggctgtctcctgccctgggtagggcagcattattaggtatttggccactgccctcagatcacatcaggggctcagcttctcaggcaggtctgtggagcccacccagaatggtgctcccagcgcaccaccagccacctggaactgagagccatgctcgtgcaatgggaacttctttgtggtcaactgcagaaaatccaaggggtgggtgtgcaaagctgaaytgggcagcagaacttgggggagtaaggacatctgagcttgtcctccctgttgactcatgcaggctcagatgaaggactttcaaagagagctggaagatgcccgtgcctccagagatgagatctttgccacagccaaagagaatgagaagaaagccaagagcttggaagcagacctcatgcagctacaagaggtaaagcctcgccttgctaggagagcctcagatgcgggtgtcayggtagcaccccttggcagctccagtctgtgcattcccagatttcatttcgtcctcctctggggtccacctgtctagaaagacacacgcttccctcctctatgtattcacggggcctcccctgagctcagaggaagaacatgtactttcaagggtggctgagttgtcagggtggactcttggtggggmttggcctttccctggcagacaacagccttcctccctcccacctaggacctcgccgccgctgagagggctcgcaaacaagcggacctcgagaaggaggaactggcagaggagctggccagtagcctgtcgggaaggtaggaaactgaatggaggaagagggctctgaagcagaggatggggggacaggcagcatcctcgacccccattttattttttaaattttttcgagacagagtttcattctgtcacccaggctggagggcagtggcacaatcttggctcactgcaacctccacctcccaggttcaagcaattctcctgcctcagccttctgagtagctgagactacaggtgtgtaccaccatgcctggctaatttttatatttttagtagaggtggggtttcaccatgttggccaggctagtcttgaactcctgaccttaggtgatcctcctaccttggcctcccaaagtgctgtgattacaggtgtgagccaccgtgcctggccctggacccccatttcaatgctgctgctgacgaagcgtcctctgagattggggacagacccatggtggttaggttttccgtcagcgctttcatgcctgtttgggggtgtggctgctttcattcattcccaataagtagctgtgtggggagaaggggaggccaggaagagtcagggaggagtgtgctggtccccatcccaatcccagctttgctgacacggacccggcctgagtcccggctgtccacttcctggctgtgtaactacagatgagtcttctaatcttctccaagcctcagtttcacccattagatgatgagggcaatacccctgaggcatgactccaaggagkgggcatcttttaaggcgggggagggtagaggcccccaccatggcygcccttcccccaggaacgcactccaggacgagaagcgccgcctggaggcccggatcgcccagctggaggaggagctggaggaggagcagggcaacatggaggccatgagcgaccgggtccgcaaagccacacagcaggtgagggccgcctggacaccacagtcacgctgcctactgtctctcctgcagcaggatcctgcaccagtcaacacaygcgtggcggcttcctgtgtgcaggccctggattgagggacaagagggtggtggggcctgagagtagagatccagggcccttacaccagtgcccaggctgctgtcttcagaatactcctctccacgctgcagtgtctcattttccagccacggcgtggctggctccccgtacctcacggccatccctggagtccgggccttgggatgctctttcattgcgttttcccctagctgaagctctgaccttatccagtgagcccttggtgatgtcactgagcactagttccatggtgggcactagggaccatccagtaacctgcagccccttgtggtgtagggtgaacaggcatcattctccaggcgactccaggacagagaaagcaagggacaagtcactcgctcagcctgggtggcactgacacttgtggaagcacctcttttttttggagacagggtctctctgtggcccaggctggagtgcagtggcgcaatcttggctcactgcaacctctgcctcccaagttcaagggattctcctgcttcaacctcccaagtagctgggactacaggcacgtgccaccactgcccggctaatttttgtatttttaatagagacggggtttcaccatgttggccaggcaggtctcgaactcctgagctcaagtgatytacctgcctctgcttccaaaagtgctgggattacaggcgtgcgccaccacgcccggcctggaagaagctcttgagtggagttttacaggatgaaggagaggacagggtgcccgggatcaagggactcgtgcagaggccaaacaaggcaggaagaggcatggtctcagtgcgctstcttgggcttccctgagtccgcctcatggccttcactctcctccccaggccgagcagctcagcaacgagctggccacagagcgcagcacggcccagaagaatgagagtgcccggcagcagctygagcggcagaacaaggagctccggagcaagctccacgagatggagggggccgtcaagtccaagttcaartccaccatcgcggcgctggaggccaagattgcacagctrgaggagcaggtcgagcaggaggccaggtatgcgsgtgtggagttccgaacccagtttgcaggggggtgatggacagcaggagtcatagtgaagtcagggaacctcttccagcatcagttctggcttgtaagaagcaagctstgtgatgcctacagtgcaggtatgttgtgagaactgaacgtaaacacagcaaagtgccctgctggttcctggcctagggcaagcacctraagtgtgagctgctcttagcatctccatggtcctcctgacattaacctgccttcccagcagtacatatgacttttcccagcctctgcagggatagcatgctgacagatcaaaaatccaaccaggctggacgtggtggctcacgcctgtaatcccagcaatttgggaggctgaggcaggtggatcacttgaggtcaggagtttgagaccggcctggccaacatggtgaaaccctgtctgtaccaaaaattagccgagtgtggtggcacatgcctattatctcagctactcaggagactgaggcaggagaatcactccaacgtgacacgtggaggttgcagtgagccgagattgtgccactgcactgcagcctgggtgacacagtgggacccttccacacacatacacacacacaaaaaaaaccccaaaaaacaaaagtccaaccggcagcccatttggtacacacactggaagccttcttaattatgggtcgaatgaggcatatgatcacagcacatttcttaccattggattctaaggattctcacccattctcttctagtagctttttcagtaattcgcacgccctgcaatgcacccatttaaagtgtataattcaagggctattcatatattcacaaacatgtaaaaacgatcaccacagtcattttgagaacattttcatcggctcaaacagaaaccccaggccatatgtggtatttcatgcccataatcccggcactttgggaggctgaggtaggtgggagcagcacttgagtccaggagttcgagaccagtctgggcagcatagcaagacttttttatttttatttttttgagacatagtctcactctgtttcccaggctggtgtgcagtggtgcgatctcagctcactgcaacctccgcctcaccctcccaagtagctgggactacaggtgcacaccactgtacccagcttgtaattgtattttttagtagggatggggtttcaccatgttggccaggctggtctcgaactcctgaccacaggtgatctgcccacctcggcctcccagagtactgggattacaggcatgagccaccacgcctggccagagactccgtttctatgaaaaacttttaaaagtctgagcatgctggtgtacgcctgtagtcccagctacttgggaggctgaggtgggaggattgcttgagccaggagttcaaggctgcagtgaactatgaactagggtgaagagcaggcattggagcaccactgcactccaacctgggtcacacagcaagaccttgcctcctccccgcaaaaaaaatagaaaccccatgccctgtaaccactcccttcagtccctggcaaccataatctactttctgtctctatgaatttatctattctggacacttgatatcaacggaatcacacactatgttgtctgctatgtgtcttctttcacttggcaagaattccaggctcatccatgctgtggcatgcattgatactttattccttttcatggctgaatactattccaccatctgactgattcttgagaggagtccagatacggggctcaggaaagcactcaagatgccacctccaggtgacacaccagctacaaggggtgccaccctccgctgaaaccacctgttttccttgctgtttgcagagagaaacaggcggccaccaagtcgctgaagcagaaagacaagaagctgaaggaaatcttgctgcaggtggaggacgagcgcaagatggccgagcagtacaaggagcaggtagcccctgccacccagcctccctcgagcccccagcccccagccggcctcccctaaccacccctccaactctccgcgacaggcagagaaaggcaatgccagggtcaagcagctcaagaggcagctggaggaggcagaggaggagtcccagcgcatcaacgccaaccgcaggaagctgcagcgggagctggatgaggccacggagagcaacgaggccatgggccgcgaggtgaacgcactcaagagcaagctcaggtgaggagcccgtggcccgggaggaccccgtctctcaggccagagaaaagcactgggggctcgggctcctttcggcctgcaaatgccccttgtgcccacagccgccactcccttctgtggtttattcctgcttctccttaatcactaagcttagtgtgggccaggcactgagatcagacccgggccctgccttgcctggtagcagctaaccttctagatcctttaacgatcgaccgtctcccatccggtcctccggctgaggaggaggaagaggctatccccactgtctcctccagcccctccttcattgcatcactgagtcttcacgacatccattgaagctgcaacaccaccccccgccacttcacctccttcctgacatgctctgctcctcctttctccccctcagcactgctgccatctgggctgcattattctcgggtatgggggctgtccgacattccccatcagaaggaaaaagatccctgaaaagtagcaggtgcttacatttctggcctctacccaccggctgcagtagtcccccaccaccctgcaatgtgacaaccaaaaatgtctctagatgttgccagaagtcctctagagatgggagggtacgactgccaccccgctgagaattcctgctgtcactggagtgggggctgttttctctcccatgcctctggtaccttgggggtcccccctgctcccaagggctgcttccaccaccctgtccatccatcccgattggctcccaggaggttttagctccgggcttcctgtctcccacaccactcctcacagttctccatgatttcaacatccaggtgggcgacgcagcctctcggttccttgaccctctgggtgatcctgctgcttctaccgggccaaccagtactcctaggagccctcacaatttgaccctcaggcatcccattgtctgcctggtgccacctttctttggctctgtccccaacggggtcttcactccattaatgccatcagcctctgacccagctccaaaccagctgtctagtaacccccgtcgcgcatcctcaacatccggttccccctcttgcattgctgcaatcrtttggtgaaagcacaacccaaatgaaactcaagcttggctgggcacgggactcacacctataatcccagcactttgggaggccaaggcaggtgaatcgctttgagctcaggagttcaagagcagcaagaccccatctctacaacaaacaaacaaaaatcagccaggtgggatggcgcaaacctaaaatcccagctactcaggaggctgaggtgggacgatcagtggagccccagaggtcaaggctgcagtgagccatgatctagccaatgcacttaccctggatggacagagtgagaccctgtctcaaaaaacccaaaacccactctccaccttttcccacagagcaggccttgctcaggggtcctcccacacccctccctcatcttctcactctctgctgcttttcactttttctttgaacttatgatcgctcctccccattctctctcagctggggaccttacttcctacttaactcaaaagcagaaatgatcatgaaacgtgcacaagctcccactgcctcatcaycctacctccgtgcacctctgtacacttctattttttttccatttctatgctgaaccctctggcaccaaccgaggccaacacctccattggacccgaccctcttgttcactcaagcacatagctccaaaaatccttattttgcaaggttttctctttcatttgctccatcagcaaatggaataacctcttagccccatgtctaccttgctacccttactacaaaactggatgtgaatgccgaaaccctgtctctaccaaaaaatataaaaattagccaggtgtggtggtgcatgcctatagtcccagctactcaggaggctgaggcacaagaatggcttaaaaccgggagagagaggttgcagtccagcctgggtgacagagtgagactcggtctcaaaaaaaaaaaaaaaaaaaaaactgtatgtgaagagttgctggttcccctcgcccccacccatcactctcccagaagcctcccatgggtgacactaatggccagaggtcccctgacagggcagcagcacgtgacgcagtccatcatgcctctggcctaattcacttgcttccctggacttccccgacaccatccacacctgcttgtcccccgacctgtggggttgtccctcttcctctcctctgctgatccctcacctcgaaacctgcttgccactagaccgccccagggtatcaacttagttctcttttgrgcagagtcttgctctgttgcccaggctggagtgcagtagcactatctcagctcactgcaacctctgcctcccagttcaagctatttttggcctatttttatatttttagtagagacggggttgcaccatgttgcccaggctggtcttgaactcctgatcttgtgatccacccgcctcagcctccccacgtgctgggattacaggcatggaccactgcacggccttagttgttttcatctctccccagcgctaggtgagaggtctcaactaatcttggcgctttagaattccatgtatatctaatgactcctcagttcatctctgagaagccctagcttcttcctagaacctcagaccaccctcccgttcccacatggatgtctaataggcagctcacaccaaacatgctgcaccccaagtcctgactgaaactcttcacccccaaactggctcctctctccagctcagcagctaaaatgatgaagttgccaacaattcacatcacaaacctcgtggtccttcttaacgttttggtctcctttataccccacatcccatctatgggagaatctggtcaactttccctaaagaatcctgcccaggctgggtgcagtggctcaccccttaatcccagcactttgggaggccaacgcaggctgatcacctgaggtcaggagttcaaggccagcctgaccaacatggtgaaaccccgtctctactaaaaacacaaaaattagccgggtatggtggggcgtgcctgtaatcccagctactagggaggctgaggcaggagaatcgcttgaacctgggagacacaggttacagtgagctgagatcgcaccactgcacttcagcctgggtgacagaccaaaactcggtctcaaaaaaaaaatctccagtgtctaggacagcaccaggcagagtgaacctttatccctcgggtcctagatattttccccgcttcattctcataccaccacagccatgtgctgagcctcttactacctttaataccaatgacttgatcttttaacagttttaatcatacatgaatataacggcaaataaacatacctcctctatatttttaaaccagcatcacctctatcaactggttacgatgaaagtaatatgataaaaatagtatcaagttcaatatctagctattgtggccacaacttgatcaccaagacctgaagcctacttctccactaaaaagggagtgacaacagccattagcaccaaatagactctctctgacatcataattagacttgtttaaaaagagttggaaaggaaatgactttctcagggcccagttcagttagcggatggcatgcccggaagccatctgaaatcacctctagagtttggggaccactgcgtgagacagggaaaagtccaaacccctctgagaaggggaagagagcagctggcgcagggcaccaagccttcagggaaaagccccactcgctgcatggtgagcgcttgttggtcccccatggataggagagaaaccaggcctaggctcccaaagtacagcaggggcctggaagcatctcccagggttgaggggtcagtggaggagagctgttctcactgtgaagactcctggggcaaagcgcggtggctcacgcctgtaatcccagcactttgggaggctgaggtgggctgatcacctgaggtcaggagttcgagaccagcctggccaacatggtgraacttcatctctactaaaaacacaaaaatcagctaggcgtggtggcagatgcctgtaatcccagctactcgtgaggctgagacaggacactcctttgcaacccaggaggaggagcctgcagtgagccaagatcaagcctctatactccagccttcagagcaagactctgtctccaaaaaaaaaacaaaaaacaaaaaccctcagatgtgctctgctggcaaccagtccccctgcctctcctgagtggctgggctgagcgatggggatacagccactctgactccctaccccactgctgtctctgcttccctttctcaggcccagtgatttcttttctttttattatttatttttagacggagtctagctctgttgccaggctggagtgcagtggcgcgatctcggctcactgcaacctttgcctcccaggttcaagcgattctcctgcctcagcctcccaagtagctgagattacaggtgcgtgccaccacacctggctaatttttgtatttttagtagtggcaaggtttcaccatactggctgggatggtctcgatctcctgacctcgtgatccacctgcctcggtctcccaaagtgctggggttacaggcgtgagccaccatgcccggccggcccagtgattctttagcacacactggacacctcctgtgggttctgccccagacacttgagccttcttgggcagccaagggcaaagtggaacaaaaagaccatttttgccagttccgacacgaatacacacataatgcaggtggaaggtctgtcctgccttctgcatcttttgggtgcacaaaaacataaaatcaggcactagagccctgagggaggttggtaagcatgcctggctcctcagccaagaaggaactgtagtgcgagtttcaccaagttctatcagccagacgcatctcgacacaagccctctctaaagccagacccacttacctaccactggctacactgccagttacctccggcaagagctgtacaaggcctccacctctcctctcttgctagaggcccgaaagctaatgaagagcaagtaatcataaaccaagggacaggcggctgcaggttccttgcctgggacttcttggcttctgttccaacactgatttctcaaactagcttgctcaaatgcttttacttccctgaaccagtatgcaatcatgggatttataggaggttcttaaaagtagctctaaaggacagacattttcctttccatttaaaaaactgagccrggtgcagtggctcacacctgtaatcccagctctttgggaggccgaggtgggtggatcacttgaggtcaggagttcgagaccagcatggccaacatggtgaaactccgtctctactaaaaatatgaaaattagccagccacggtggtgcatgcctgtaatcccagctactcgggaggctgaggcaggagaatcgcttgaacccgggaggtggaggttgcagtgagcagagatagatcatgccagtgcactccatcctgggtgacagagtatcaaaaaactgcttatcctttcatctaccagcctcaccaaatgctcttggcgtcaggtgattcactgcaacgttgacttaagggtgcttttaatgccaggtgcggtggttcatgcctgtaatcccaaatcccagcaccttgggaggccaaggcaggaagatcattgacatcaggagttggagacaagcctgaccaacatagtgcaacmccatctgtactaaaaatacaaaaattagccaagcacgtggggcmtgcctgtaatcccagctactcgggaggctgagacaaggggatcacttgaatccaggacgtagaggttgcagtgagccaagatcgcacccctgcactccagcctgggtgacagagactatctcaaaataaaaaagagtgcctttaattattaaatcgaagcaaatgtctttaacaattaagaatatacttaaccgggctccttcttgtttgctgatggtaacctccggggattctctctctgtttcagagggccccccccacaggaaacttcgcagtgatgcaccaggtatcatgccttcagcttcgcagctgtgtgttgtctcagtatccatttcttttctgcccaatgcgcccctctgcccaccccaatttttaaacccttgcacatttccaygagattcttgcaaaatctggaggcttggatatctttgtgcaaagctttcattgaaaccaagatcaggatgacaaatagacctcatctcttgacccactgtccttcctgcctctgggcagcacatgtgacatgacacccaacagtgtgcgcccttatcactgcatcttgacgagatggcagaggctgtgtgtgtagcttggatttttcttcctttcatrccaaaagccactcttacgtggttagggcactcagcagtgctgtcctcccttgtccagtgaagacactgcactgaatgaatatgacagttccactatctgggcacattcctggagaacgtacttggcttctagttggctggtctgggtcacaagtcagagatcacaaagttcacggtaactgcggcgcggcaaccagtcctcccatgattcagctttcacaggcttgtctgcgaaggaaatgagctcactgcgatgtctgacaaatgccgggggctgcacgtggcttgagtgatgtctagctacaaactgcattttcagcacacggggtggaagctgaccaccgcaaagccaagcacagtcctggcagagccttttctggaggcttcacgggcatgtacatgttcagggactggggagtggatacccaagactcaaggatgcacacagggcccttcccaagaaagcatgaagaggtctctgctgctctgggattttgcttttttttttttttttttttgagacggagtctcgctctggagtgcaatggcgcaatcttggctcaccgcaacctttgcctcctgggttcaagcgattctcctacctcagccttctgagtagctgggattacaggctcccgccacctcgcccagctaatttttgtatttttattagagacaggatatcaccatgttggccaggctggtctcaaactcctgacttcaggtgatccgcgcgccttggcctccccaaatgctgggattacaagcatgaccaacttttcacaggtgaagttaggccatgtggatctgacttcacctcatggagaggccaaaccaaccctcatttgtgtccatcttcatttttggagaatctcagctttgctgtcactaccaaaatacttaaagcgcagggtgaggtcttgttaagagccagttttgtgggggagcagatgagtttctaggacacttcaagcagctctcctaccagctgattgggatcataggataagccaaattccagggtgggctgaagtgcagaacccactggtcagtgggaaactgagtccttgcaaactagcaggtgcttacactcaagatgattcccgaggccttggataagctgagtccacgaatagaatccaaatgctaggccaggcacagtgggtcatgcctataatcccagcactttgggaggccgaggcgggcagataacttgaggtcaggaccagcctggccaacatggtaaaaccccgtctctcctaaaaatacaaaaattagccaggagtggtggcatgtctgtagtcccagttacttggaaggctgaggcaggagaatcgcttgaacctgggaggcagaggctgcagtgagccaagatcacgccactgcactccagcctgggcaacacagcgagactctatttcaaaaaaaaattccagattctccaggatcagaccctttaagaaaacctttaggggggtcccttagttcctgtaacaggtatagttggtgtcaaccttggtctaggatttgaaaccagttccaagaaaagcacttcagccaaaacagagtatcttgcaggctgacagccaagcaaggagcttcaacggcccagggcacaatgtatttcttaggtcaagggagcaaatttatccattaagcttttccagttagcaaatagactcttccaagagccaaaaagagagtgcctagagcactgatgtggaggttagggactacttcccagctcatcagatttttttttgtttttttttttggagacagtcttgctgtttcccaggctggagtgcagtggcacaacgttggctcactgcagccttcacctcctgggttcaagcaattctcctgcctcagcctcctgagtgactgggattccaggcgcctgccaccacgcacggctaatttagtatatttagtagagacggggtttcaccatattggccaggatggcctcgaacaactgacctcacgagtgatctgcccacctcggcctccccaagtgctgggattacaggcatgagtcgcagcaactggccaacccatcagggtttgaacctggagttaaaactgtgacgaagagagctgtgtggggagcgtacagggaacagtcaaactgctgctcctctgcgctgaatttgagcatccttctgagtcaagcgcttggaaaacagtgctaaaaaagaaaaagacttaagggtcacatctagagagagaaggatggagagttctctagtagggctgcaagtccagaagcttctctgtgaagctgggctaggagtgtttactttgaagtggctgcagctttaagtatttattcctgatcgctgcactgcgggaagtcccatcctttatagccaggtgggctttcccagccggggtctctcccatcctctgtcaacaaaagggtcatttgcgaattcctcttctcagtgatcatgaatctctgggccttgatttttttttttttttttttttgagacggagtctcrccctgtcgcctaggctggagtgcagtggccacatctcggctcactgcaagctccgcctcctgggttcatgtcattctcctgcctcagcctccctcccgagtagctgggactacaggcacccgccagcacgcccggctaattttttgtatttttagtagagacacggtttcaccatgttagccaggatggtctcgatctsctgacctcatgatccgcccgcctcagcctcccaaagtgctgagattacaggtgtgagccaccatgcccagccgagttgttccttttgactaaagaattggtyactgagttgtgttcatccttatggcttcttatccaacccttgcgtggggagcaaaagtctgctctcttctttgatgtcctaaaataagacctgtcttccgattcaggtcaaacagggccagatggccagagcccaacataattatttgttgcggttgctgaaaagagttaagtgtttcttctgaacggtgaaggctggcagcaggcagatctgatttttccttctyctgcccactctcttcctcctacccaaagtctcccctcacgtgaccagcccttcctgtgaagtcgaggtgataaactcaagagagaaccagcgcagagaggagatggcagcattaaggagagacaggggtgtcctactggctggagctaaaatccacctcagaggccaggtgcactggcacacacctgtaatcccaacactttgagargctaagacaggtggatcgtttgaggccaggagttcaagaccagcctgggtcacatggcaaaatcccatctctgctaaaaatacaaaaattagccaggcgtggcagtgtgcargtgcatgtagtcccagctactcaatactgaggctcaaggactgctggaactcaggaggcagaggttgcagtgagccaagatcatgccactgcactccagcctgggtgagagagactcttaaatttcttttttaaatccaccttgaaggccaggtgtggtggcccacgcctgtaatgccagcrctttgggaggccaaggtaggagaactgcttgagctcaggagttccagaccagcctgggcaacaatatcaagacctcatctcaatttaataaaataatccaccttggattaacacgtataatttccttttctaatattcactgggcacctgttttacgccatgtgcggtatgttccacgatcagcaaaacagatgcagcagtccctgcagtggggaaaactcagtccatgaacattcacaccagcagggggtgctgtctcgccttttaaccagggagcycctctgtgtccttctcaaggctgcccttgtccatttcaccttcttccaattcaaatcttgaaaactcacctctaaggcgaatgggggtgaggagatacagaagaaaaacagtatgttctctcttcaactctgccccatgggctatgaataaagtcagaagacaaaatcccctgcttggtttttggcgtttttttcctattctaaatcaaagaccacagcagaccagaatcctgtggcttctcaaatgaccaagcctgacatattgaaaagcagatcgtcttgctttgaaaaaccttctccacccacccccgmaaccaatttcagctgattaaattcaatcactcatgccttaagactggcaatgatttgttgacttcaacttgaatatctgcatcttatttgtgccgtgtgtgttttctgccataaaaaaaatttatattgcaataggactatagctacaagtttaaaatagatttataaaaaatctatcccaaccatgaagatttctttgctaaataatgtgttttcttacaacccacaggcgaggaaacgagacctctttcgttccttctagaaggtctggaggacgtagagttattgaaaatgcagatggttctgaggaggaaacggacactcgagacgcagacttcaatggaaccaaggccagtgaataagcaabtttctacagttttgcaccacggcaagaaaaccaaaaaccaaaacaaacaaacaaaaaaaacccaacaacaacccagaacaaagcaaaacccagcagactgtacttagcattgtctaaatccattctcaaattccaaatatcacagacacccctcacacaaggaatataaaaaccaccaccctccagcctgggcaacgtagtaaaacctcatctatacaagaatttaaaaataagctgggcgtggtggtacacacctgtggtcccagctactagggaggctgagccaggaagaacgctccarcccaggacttcgaggctgcaatgagctataattgcatcattgcactccagcctgggcaacagagaccctgtctcaaccaccaccaccaccaccacccctactacccctgtattsaaggtaaaaattgaagtttgtatgatgtaagagatgagaaaaacccaacaggaaacacagacacatcctccagttctatcaatggattgtgcagacactgagtttttagaaaaacatatccacggtaaccggtccctggcaattctgtttacatgaaatggggagaaagtcaccgaaatgggtgccgccggcccccactcccaattcattccctaacctgcaaacctttccaacttctcacgtcaggcctttgagaattctttccccctctcctggtttccacacctcagacacgcacagttcaccaagtgccttctgtagtyacatgaattgaaaaggagacgctgctcccacggaggggagcaggaatgctgcactgtttacaccctgactgtgcttaaaaacactttcactaataaatggttataaatcacaatgtcgttggcttttctgttgagctgttttctatagaggaaaaggagttggggaaggctgggttttgcttcatcgtcccaaagattctctgaagtcagggttaacgtcatgaatgcagaaactgaggcctagagaggtgaaatcaattgcctacaaccccacagccagccagagagcagagcagagatgcaaagtgagactgtctaagggggttactgggccgctcagcagggagggcaggggagagaaataaggtgatgtgtggtctaagggccactgccccctgccctcgaacatgactgggaagaacatcttgactcatcaaaaccagtatcttaagaaaaatacaggatttccttgattttttgagtkaaaacacaaggtcttgtccaatgagtcagcaaacactttccacaaaacgtcaratggtggctgggtacagtggctcacacctggaatcccagcactttgggaggctgagatgggaaaatcacttgaggccaggagttggaggccagcctagccgagagagacccccgtctctataaaaaaaaggtgtttttttkttgttgttgttagtaagccaggcaggatagtgcacacctgtactcccaacctcttggaaggctaaggcaggaggatcatgtgagccaggagttccaggctgcagtgagctatgatcacgccactgcactgcagcctaggtaacagtaacaccttgtctctcacaccaccaccaccacccacccagccagatagtattttagcctttacaggctacatatggtcttgccgaatattcatcttctttaaaacaacccttaaaaacataataaatcattcttagagtaagggccataaaaacaagctgtaggccctgtccttctttcagcttgagtgttttagacagacatgcctgcaaaggctctgttcaacacaaacgatgccgtataccaccaactccatgggatcagacagatttgggagacaggaaacatggaaacaaaggactccatmttgtgaccagatgctaatatgccttgaatgacgcacaaacacatcccggatacatttctaaaaacctggcttgaatagaaattttcaaaaagattttttcatattttttaacttggttaaaaaaagtttttcaccactctgtgggaaaacattaaagtataaacatacaaagcctctttgaccagaagcccaacaagttcaacattcgtttctcttgattttattgatcttttaaaaaaataaaaggacatcttctgtggatacaggttaggatgtttctagggtaagaaacccaccatcgcagcgtaattctctgcggaatttcagtagcacttggaaagttctgttttcaacctgaaatttttgctgttcttccagaaaataacttagtaacaaaatgaaggccgtgaagctgcaggcacactccagaaattagtgtgttcttttaactcgtgtcccaaagagacagcagttcctaacatgcagtgatgagtggacacaccrtggtgcgttggaaatcccacgttcacgtctttgacaaggaagcctcctacaatgatcttgtgctttaattttacttgatggtcaccctggttacttcattatgcctttgaatgaagtcctgttcttagtggctgcattaccaaggccatcttgccccaaagacccctcagggtcctgaggcagaattccccccaccccaccaggggactcaggaaaatgaatgatcgcagtttgccaaaagaggtcagatttcccactgacgctggttggtctggaaaattactctgaaaactcgaacgcacctctaggaatctcaatgagaagctaagaagcaggctacagtctcagaggtttatgacacctttttttttttttttggagacggagtctcactctgttgcccaggctggagtacagtagcgcratcttggctcactgcaccctccacctcccgggtccaagcaactctcctgcctcaacatctggagtagctggaattataggcacgcaccactgcacccagctaattttttgtatttttagtagagatggggtttcaccatgttggccaggctggtcttgaactcctgacctcaggtaatccacccgcctcggccttccaaagtcttaggattaccggcctgagccaccgcgcccagcctattccagtttttaaaaaggcatgtgactgttaagttctctgttcttagacatgatttcagtacaccacaaagcactgggagattttgttctggaagacgattccacctggttgggagttggggggaagagcctctgagagaagctccatcccacatttacggagacttgggacattaaaaacacctgtcaagaccaatcaggggccaggcacggtggctcaggcctgtaattccagcactctgggaggctgaggcgggaggatcacttgaggccgggagttcaagaccagcatggccaacatggtgaaaccccgtttctcactaaaaatacaaaattagtgggtgtagtggcacactcctgtagycccagctacytgggaagctgagataagagaatcgcttgaacctaggaggcggaggctgcrgtgagccgaaattgcaccactacactccagcctggacaagacagggcaagagcatgactctgtctcaaaaaagaaaaaaaaaaaaaagaccaatcaggacctccgcttgggttagtgcaacacaatggggcatgggaacgatggctcatgcttgaaatcccagcattctgggaggccgagatgggaggatcacttgaggccaggagttcaagaccacactgggcaacatggcaaaaccccgtctctattaaaaatacaaaaaattcagccaggtgtggtggtgggtgcctgtaatcccagctacctggaagactcaggaacaagaaccgtttgaacccaggaggcggaggttgcagtgagctgagatcacgccaccacactccagcctgggtgacagagcaagactctatctcaaaaacaacacggtagcctcatcaccgacaacttagagcccttcccagagagccccttttgtccctctttgcaatgcacacggtggcaggtaaggatgaaaagacatttcccagggacaaaccccagagcacaggtgatggcctcggtcattggcttgggccgcaaagctaactaactatggtgactgctcttatttctcaaactaacttaaaacaaaaacctagtgtaaaaagacgacaaaaggtaacgacttccgcaccaacaccaagaccttcagcttccgtggttttcctaaagcaacatcttgactaccccctgggctgacggcagcggcgatgaagacatgtgtgaaggcrgcttcccaaattccaggcgcttccccaaccttcagacagagcaaaccaaattaagctgacataacagctgtgacaaactggctagcaccggggcccagagagttataagggtgaacatcaagagtcaggagcagggtctcacagggtctcaattttctctcctgtgaaatgaagaagaggacactggctacctggctctcagattccaaggtcacacaaaacgcccagtctcagacccactagaaaaatccatctcttacctattgtttgtttgttttacagcctacgcaacatagtgagaccctgtctctatgaaaaatgcaaacaaaaattagctgggtgtggtggcctgcatgtgtagtcccagctacttggtaggctgaggtggaaggatygctggagcccaggaggcggaggttgcagtgagccgagatcacaccaccgcagtytagcctgggtgacagagtgagaccctgtctccaaaaaaaaaaaaaggccaggcatgattgctaacgcttgtaasccccagcacttgggaggtcaaggtgggaagatcgcctggaaaattaatctgaaaactcacctctagaaatctcaatgagaagcagactacagtctcagaggtgtattctcaaactcaaagccaggaggtttgagaccagtctgggcaacatagcaagactgtttctataaaatataaaaaaaattagccaggggtggtggtgtgcacctgtagccccagctacttgggaggctgaggcaggaagatggcttgagcccaggaggacgaggctgcagtgagctatggtcgcaccactgcactccagcctgggtgacacagcaaaaccctgtctcgtagaaagaaaacaaacaaaaattaatttttttttttttcttgagaaagagtctcactctgttgcccagagtggagttcagtggtgcaatcttggctcactgcaacctccacttcctgggttcaagtgattcttgtgcctcagccacccaagcagctgggactacaggcatccgcgaccatgcccggctaattttcgtatttttagtatagatagggtttcaccatgttgcccagtttggtcttgtgaactcctggcctcaagtgatccacccacttctgcctcccaaagtgctgggattacaggtgtgagccacttcactgcacctggcctaaaaatccacgtgtaaaggtctcaaagttatgtgcatgccatggaaaatattcttaatttcctgtcacgtgtctgctacaaacccatcaaattcctacggcttggggcccagagagatggtagtcacacaccttgcagaattcctgaatctgaaagctgccccttttttttctgagacaaggtctcgcttcatcrcccaggctggagtgcagtggctgggaacacggctcactgcggcctcaacctccagagctcaattgatccgctgccctcagcctcccaaagtgctgggattacaagtgtgagccactgagcctggccctgattttctttaggcaagaaaattaatgacactgttagagatcagatctgyactgtcccatcgggtggctggtttcaggaacatagtctgggctagaagttagtgccagtttctcaaaggttctacagatttaaaaagaaaaaaaagggctggttgcagtggctcacgcctgtaatcccagcactttgagagsccgaggtgggtggatcacaatgtcaygagatcaagaccatcctaacacagtgaaaccccgtctcgactaaaaatacaaaaaattagctgggcatggtggcacacgcctgtaatcccagctactcaggaggctgaggcaggagaattgcttggacttgggaggcagaggttgcagtgagctgagatcatgccactacactccagcctaggcgacagagcaagacgtctcaaaaaaaaaacaaaacaaaacaaaaaaaaaaacttcaggggaagcagagccatgactgatgctcaattccccaaataagggctttatttttatttaactaattaattaactttttgatatggagtcttgctctgtcacccaggctgctgtgcagaggcacaattttggctcactgcaatctctgcctccagggttcaagtgattctccttcctcagcctcctgagtagctgggactataggcacatgctaccatgcctggctcatttttctattttttttggtggagatggggttttaccaatgttgcccagactggttttgaactcctgacctcaagtgatccacctgccttggcctcccagactgctgggattacaggcgagcgtcaccacacctggcccaaataagggcttttatacaggacattctcacagtgtaaccgtgagtagcagctgtagaatcaaatgataaaaatgaccttcttggccaggcatggtagcccacacctgtcgtcgcagcactttgggaggatgaagggtgaggatcrcttgaagctcagagtttgagaccaaactcggcaacatggcaaaacctgtctctagaaaaaatacaaaaaattagccgagcacggtgacacgcacctgtactcccagctactcgggggactgaggtgggaggatcgtttgagctgggaggcagagggtgagccatgatcctgccatcgtattctagcctaggtgacagagtgagaccctgtctcacaaaacaagaccctctctctagccctttgttcaagccacaagacaccacctaatgctgcctgcagggagcagaggagaggataaggtttgctgaaataatcctataatttaaaaagacacatggctgtgggctgggggtgagtgtctcttgcctggggcaggcgggttctccccgccagcgagaggtttattagaaggtactgaccccttatcacccaaaggcacgctggtgctgcttggccgtctctccccgccatctctgttcttgctgctccgcccagaggctgggccacctgttcggtttggggactgatcrtacacgaggttccggcaggaagcgagtttggactccagtgcctggacagaaatacacttttatctctcaagttataggcaaggactattctgtcttaccagagcctgtacagaagaacgaaccccagacagtggttctcaaactgttgtgcactggaattccaaggtgggaccccaagaggaatccaacgtatatgccagtctcagaaccaagcaccttaagtatttgggagctggctgggcacaatggctcacacctataatcccagcactctgggaggccaaggcaggaggatggcttgacatcaggagtttgagaccagcctgggccacaaagtaagatcccatctcagtttttttttttgttttgttttttacttttttagacgctgtgtcacccaggctggagtgcactggtgagatcacagctcactgcagcctcaacctcccaggctcaaccaatccctcccacctcagcctcctgagcagctggaattataggcatccgcaatcatgcccagttaataaaaaaaatttttaatgcaaaaaattttttttaattacgaaaaattttttaaaatgtttgggagctgcctggaaaaagatcacggctcactgcagcctcaacyavtccttccacctcagcctcctgaatagctaggactatgcacaatcatgcttggcttaaaaaaaaaaaaaaaattcttttttaattacaaaaaattttttaaaatgggagctttctggaaaaatcactaacctaccaattatccaactccgcttgtaggaagtaggaaatccacttctggaatccttcaccctttggtttaccttgttaaacctctgcagaatggcaagaagtttggtaaggacttggtctggctacaacagaccctgaggaaaccaaaaggacactgacagcaccccaggcttctctatactccaactaggctaaatactgaaatgcagacctgcttctagaatagcaaaccagacagccaaaaaccagaagtaaaaacaaaagaaatgagttgcaagcttctattaagttgtagctacaaatacactgtgtacagtgacaacttggtaggagttaaattatgtggccttctaggcatcatttttaaaaataaactacaaagaatacctatgtttttacttaagcacaaaaggatccctccctgtaattaacataaaagctgaaaggccaaattctttgccctaggctttcaagatttttttttttttttttttgagaccaagtctcactttgtcacccagcggtgcgatctcagctcactgcaacctccgcctcccggattcaaacaattttcctgcataagcctctcaagtagctgggatcgcaggtgcccaccaccattcctggctaatttttgtatttttagtagagatggggtttcaccatgttggccaggctggtcttgaattcctgacttcaggtgatccacccatctcggtctcccaaagtgtcaaaattcacttaaaccccaagaaacaaaccaaaaaaaaaaaaaaaaaaaaaaarggtggcagtttttttctcttctgagacaacgtcgtgctgtcacccaggatggagtgcagtgttggaatctcagctcactcagcctcaacctcccaggctgaagcaatcctcccacctctcagcctcctgagtagctgggaccaccagtgtacaccatcaggcctggctaatttttgcattcttgtagaggccaagtcggggcagggggtttcaccatgttgccygggctggtgtcagactcctgagctcaagtaatctcccaccttggcctcccaaagcactgggattacaggtatgagcacccggccaaaagagaaggcagtttccaagtgctccttaatttttcgagttaaggaaaaaacacasatatcaccctaatttcccaaatttcctagaggaaaaacggtaaaaggaaagagacatacatagggttcagagcagggcttcgagtcagagctctgagtgtctggcagtaactcccacaggaagctctaatgattcccagggatgctaaaggagcagccacacctaaaactcaccacactgctatgaaaggggctggacgcattggctcatgcctgtaatcccagaactttgggaggccaacctgggaggatcacttgaggccaggagtttaagaccagcctgggcaacacagcgatacccacattactacaaaaaaatgaaagtatcagccaggcatagtggcgcacacctgtggtccaagctcctcgggaagctaaggtgagaggatcgcttgaacccaggattttgaggctgcagtgagttgtgatcataccactacactccagcctgagcaacagagcaagaccctgtctctaaaaaaaaagaaaaaaagaagagagggaaggaactagatcaacccccttcacacatcctgaaagacaggcaggaaggcaccaaacgccaggaaagtgtggtcttaccccgactttccgcagtaggtctcccacaatgttgagggctgatatccgggcygcaggtgtgaggggggtccccccggtggagtcgtccaggcctgggtgtgcaaagggaagagcatgtaactcaccaacctatagtcatgtctgtgcgttaacatcgctagatccaaaaccacgggacaggagggacactgacgcctttcctcggatcccaaaagctaccctatttctttccgtagttaaccgcatcacacacccaaggcccgtatgacaaccaatttttcaagtccttgtgatgactgcaacaaatacttatttttacatgttagtcttgctctgtcacccggactggagtgcggtgatgtgatctcagctcactgcaacctccgcctcccaggttcaagcgattctcctgccttggcctcttgagtagctgggattatagccatgtgccaccacacccggctaatttttgtatttttagtagagacagagttycatcacgttgtccaggctggtctcgaactcttgacctcaaatgatctgcccgccttggcctccaaaagtgctgggattacgggcgtgagccaccatgcctggcctttaacaaattttttttttaatagagacagggtctcactatgttgcccaggctgatcatgaactcctagtttcaagcgatcctcccaccttggccgcccaaagggctggtatttacaggcatgagccaccgtgcccagccacattagtctttttaaacaaacccaaaacaaatccttttgaaattgtagaaaatccatatagttaattaacataatggcatctgtgatagatacaagaactatagacaggatgatccagctttacaagggtcccgctctgcagagcctctcttctccaagtggggtccatgcaccagcagcacatgagaactgttagaaatgcagaatctctcggccaggcacagtagctcacacctgtaatcccagtgctttcagaggccgaggcagttcgatcagttgaggtcaggagttcaagaccagcctggccaacatggcaaaatcttgtttctactaaaamtacaaaattagctgggcatggtaacaggtgcctgcctgtaatcccagctactcgggaggctgaggcatgagaatcgcttgaatccaggaggcagaggctgcagtgagccaagatcaatgccgctgcactccagcctggccgacagagcaagactttgtctcaaaaaaaaaaaaaaagagagaaagaaatttcaggccccacccaagacccacttgatctgaggtacattctaccaagatccccaggtaagctacatgcatattgaagtgtggaaacatagccaggcatggagttgcatgcctctagtcccagctactcaggaggctgaggcaggaggatcactggagcccaggagttggaggctgcagtgagctatgattgcaccactgcactccagcctgggccacagaccaagactgtgtctctaaaaacaacaatgaaataaagtatgcaaaatggctctagactggggctaggcacagtgactcatacatgtaataccaccactttcaggggctgaggcaggcagatcacctgaggtcagtagtttgagaccagcccggccaacatggtgaaaccccatctctactaaaaatacaagattagccaggcatggtggtgggcacctgtaattcaagcttactcaggaggctgaggcaggagaatcacttgaacctgggaggagggggttacagcgagccaatatcgcaccattgcactccagcctgggcaacagagcaaaactccatctcaacaaaactaaacagaagggctctgcaccggaattctagaagtctcactggtctcttcatgcccaggggacaagctaagggataaggtagtagatggtagggtaagccctggagcctgcctgcctgggtctgaatcccaaaccatctgccattcaattgcttcatgactctgcttaactcagagcctcactttcatcaaacggggacagcacctgcatcctgggcctgcggcgaaggctgcaggctggccagcacacactgagcactccttaactgtctgttattaatatctgctgtaaaaggcctgatcggaagctgtcagcagaggggctggggtgagaactgagattctttttttctgcccatgcagcacacgttacgctgagtctagctctcggtggatgtattactaaacccacagaacgctttttacttttttgtatttggtcagtgacatttcaaatttgggaggttttatattcaacaagaggatttttgaccaggcgcggtggctcacacctgtaatcccagcactwtgggatcagccgaggtgggcggatcacttgagtccaggaatttgataccagcctgggcgacatggcaagactgygtctccacctaaaatacaaaagttagccagrtgcctttagtcccagctactccggaggatgaggtgggagaatcacttgagcccacgatgaagaggttgcagtgagccaagatcacgtcactacactccagcctgggcaacagagtgagatcctgtctcaaaaaaaaaaacccaacaaaaaaaaagaggatttctggctttgaagaatggaaaaagctgcagatgaagggccaatcctcgtagctgcagagtggcagccacccgctctgggtggggtttccatttcatcagactccactactgcctcttacccagtcctcactgatctcaatgcccatccccaagaacatcccagtctactctctgctcaaagcctgagagcaaatcaggctctgagcctgatgcaaatcatcacacccccaggacccaccccagattcttacccagaaacactttgtgaaccgagaaaatcctgcaattcccactccccttaccacgtctgaagctcccaggtgtgtttaaacttgagctgggtcctcggtgagcaatgggcgtggacggcacggagcccgtggcctgcacagctgtgtctgtcctctcagcttccactgagctgggcatgggggtcctgggtttctcctgcttctgctgcacggccagttcctgccgcaaatctgtgccagaaaaaggattcaggaattcaagtcctcagccaggcgcagtggctcatgtttataatgccagcactttgggaggccaaggcaggtggatcgcctgaggtcaggagttcgagaccagcctgaccaacatggtgaaacctcatctctattgaaaatacaaaaattagcccagcatggtagtaggcacctgtaatctcagctactcaggaggatgaggcatgagaatcatttgaacctgggaggccagggtggcagtgagctgagattgctccagcgcactccagtctgggtgacaagagcaagactacgtctcaaaaaacaaaaagggaatttaagtccttgcttagggttggtggggtgcagggagagaggttcaacagtagataccagtcagaaaaaagacctactggggtgaaacactccaggtagaaaccccaaataaagggaaacccacaggaccttgccyagcagacttggaactctacaggatgtttctcttgactaacaaaatggtttcagatttttaaaaagctatgacagtgacacactaatgcttttattattgaaaaaacaattccaacatagcagtgtatttagaacactaaatgaaaatatgcccgggagcagtgactyatgcctgtaatcccagcactttgggaggctgaggtgtaagaatcacattaatccagtargtcgaggctgcagtaagccatgatcataccacttcagcctgggcgagagtgagacctctggctcaaaaaaaaaaaaaaaaaaaaaaaraaaagaaaaaaaaaaaaaaaggccagttgcactggctcaagcctataatcccagcactctgagaggtcgagatgggaggattgcttgaggtcaggaattttcaggccaacatggcaaaaccccgtctctattaaaaatacaaaaaattagccatgcgtggtggtgagcgcctgtagtcccagctgcttgggaggctgaggcaagacaatcgcttgagcctgggggacaagcagtgagtgcagtgagctgagatcacgccactgcactccagcctgtgtgacagagcaagactgtctcaaaaataaataaagtatgctttccagactatccccaaatgctcctcctcactcatcatcaccataacatgtgggagagcttttcaaccattgttctctgaattttttttttttttttttttgagatggagtttcactctcttgcccgggcttaagtgcagtggcacagtctcggctcactgtaaatctgcctcccgggttcaagtgattctcctgcctcagcctcccaagtagctgggattacaggcacgcaccaccacacctggctaatttttgtatttttagtagacacagggtttcaccatgttgtccaggctggactctaactcctgacctcaggtgatccacccaccttggcctcccaaagtgctgggaatacaggcgtgagccactgcgcccagctgttctctccattttcaaacataaactttatacatatgtatgtatctactgagcataaaacaagaaaattttttattaagcattactggaaacatacaatatgttgtcctgtgtatgacttactctccccacttcagtggtatgtcttggcaatgatttttgttttagagacagggtctgactcagtcacccaggctggggtgcggtggcacaatcatagctcaatgtaaccttgaactcctgggctcaagtcatcctcccacttcagcctcctaagtagctggaactacagacatatgccaccaggcctaatttttacaattttcatttttgtagagatggggtatcactatgttgtccaggctcatcttgaactcctaggctcaagcaatcctcttgcgtccgtctctcaaagcactgagattacaggcatcagccactgtgcctagccttggcaatctttctaccacaacatttctatctactgttcattttaaccattaacatttcacaaaatacatctatgtacttcatttaaccacttcattactgatggacatctaggaacaactactttattaaacttaagaatttttactttttatcccccacctactggttacacattagaaagcaaatcgacgttataaataattaattgggccagcaacagtgacccacccctataatcccagcactttgggaggccgaggcaggcagatcrcctggggtcaggagttcaagaccagcctggccaacatggtgaaaccccayctctattaaaaatataaaaattagccaggcatggtggtgcacacctgcagtcccagctactcaggaggctgaagcaggggaatcgctgaacctgggaggcagaggttgcagtgagcagagatagcaccactgcactccagcctggacaacagagcaagacgccatctcaaaaaaaaaaaaaaaaaaaaaaaaaaaggtaaaaacaacttggacaatccactaatgaatgtcttttttttttttttttttttgagacaagagtctcactctgtcacccaggctggagtgcaatggtgtaattttggctcactacaacctccacctcccaggttcaagcaattctcgtgcctcagcctcctgagcagctgggattgcaggcacccaccaccataccctcatgttttctatttttagtagagatggggtttctctatgttgtccaggctggtctcaaactcctgagctcaggtgatccacctgcctcagcctcccaaagtgctgggattacaggtgtgaaccactgtgcctggccaaatgcctcattacagtttcaacattctacctctggaagtgccaactgaaaaagagcaaatgctgatgaggtttcaaagttttagccaaatatattggttgccatcaagtcacaaaaataataggctagctggcaattccaccagaaatttctccccacaacatctttgcttcttaagagacagggtctcactctgtcacccaggctggagtgcactggtgccatcatagctcactgcatactccacctcctgggctgaagcaatcatcccaccttggcttcctgagtagctgggactacaggcacatgccatcacacccagctaatctttaaatgtttttgtaaagatggagtcccactatgctgcccaggctggtctcaaactcctgggctcaagagatcctcggcctcccaaagtgctgggattacaggtgtgagccactgtgccagatctccccacaaaactctctgttcctactgagcatcagggtagtttgctgtgtttgtgaattacagaccaggaagcatctttctggaaataaattctgctgcccagaggcagaatcccaatacaaggacttcatctgtgaaccccaaagctatttctctaaatacccataaggggcccttacagggctggatgtctgactgttctcagctccagccagggcccaaggcaagagtctgcccagtgcagtccgacaccctctgattagacaacctgggtgcagagcagggtgtggggtccctgtaaagataatgctgggagagcttgtgggacaagatgttgctcaggtagggagaggggaccatgctggtgaagacaccaaggcctcctgacctctggcttcatccttcagtctctgaacagattccaggagattctctttttcatcaagttcactttccaggaaggcatttctttcgatggcctgattcaagcgctgctcaaagtcttcgagagacatgatcgtggcgctggcgaagagaaaagcagagttatccaagaggacaaacsgcagcatccctccagcaccrcggatccaggaggtgcgaagggtcagacacacctgggcacaagtcccagccccaaacttcctagatgccacagagtgggmcaagtcccttaaccttctggggcatgggctctttaccygcagaatgggactcatcatagctcatggggtgcacgaggctgtcatgaggattaaataagatgctgcccacacagcactcagcaataagccaaagccctatcaggactgcatgtggcatttggtggtttgagaagaccactatgctccatcttctcttgcaagctcacaatgccaaccagcattaaaaataacctaatatgactgggcaaggtggctcatgcctgtaatcccagccctttgggaggccgaggcaggtggaagacctgagatcaggagttcaagaccagcctggcaagcttgggcaaatggcaaaatcctgtctctactagaaatacaaaaattagccagttgtagtgtaatcccagctacttgggaggctgaggtgggagaactgccaggaagcagaggttgtagtgagcccagattataccactgcactccagcctagacaacaaagtgagactccatctcaaaataataataacctaataaacacatataacaacatgattttttaagacacaggtttttgctgtgtctctcaggccgaastgcagtggtacaatcacagctcactgcaatctcaaactcttgggctcaagagatcctcccgcctcagcctcctgagttactgagattacaggcatgaggcattgtgccaggcataagatgcacttaagcaggtggaagagatcatatttaacctctcagtggaagttcaaaatgcccagtaccagcccagctgccctgctcacaaccccttcttgtgaagggcataaacactgtggtaaaggcactgccaagtgctgtaagaaaacaatctgttataattctgggaaaaccaccttctctgcacctcagttttctctcatgcaaaacaaggatagtaatagtaaccttcatgcaggattgtggtggggaaggggtggcaagaagtcatacaggcccggacacggtggctcacgcctgtaatcccagcactttgggaggccgaggcgggcggatcacttgaggtcaggagttcgagaccagcctggccgacatggtgaaacctcatctctactaaaaatacaaaaattagccgggcatgatggtgcacacatgtagtcccagctgctcgggagggtgagacaggagaatcgcttgaacccagaaggtgaatgttgcagtgagccaagatcatgccactgcactccagcttgggcaacagagtaagaatgtttcccaaaaaaaaaaaaaaaatcctacaggaagcacacaacagatgttttacacataagcacacatctataaattttcagcaatttttattattgaccctgtgtctgtccccagaccttacacaacctgctaactgtatcccacagtggtcagaagcacgtgtttggagaggaacccaggagttaacacccagctcctcctccacctagaactcactgagtatcattgcggaacttgatctccttcatcctcagttccttcaatcaccaaattaataactgcactgattaatggctgcatcagttcatttattcaacatatcctactatgtctagatggagtcatacaagtacctaccctcacagggtctttagaagtagtggataggataaagttaccacagtaccgattaaaaacaacaaagggacaagcacagtggttcatgcctataatcccagcactttgggaggccaaggtgtgaggaccgcttgaggcccagggttcaagaccagcctgggtaatatagagagaccctgtctctacaaaaagtaaaaaaattagccgtgcatgatgcgtgcctgtagtcccagctactcggaggctgaggtaggaggactgcttgagcccaggaattcaagggtacagtaagccatgactatgccactgcactccagcctgggtaacaatgccagaccctgtctcgaaaaacaaaaacaaaaaacacactactaccaacaacaaagggataatacttcggagtacaataccagaaacagttaaaacagccctaaggttgacatatcaaagataaaatattcacataataatatgtagagtagtacagaatgcttgcagaaatgcagacatactgagtatataaagaggaagacccattatcatgcagaaattaattctccacaagttaaactgataaatttaacactgtcttaatacgtttctactgggggaataaactggactgatttgaaagatcctgtgacaatgaaacaagaatgatcagaggaactctgtaaaagagatcagggaactagctctaccagagagtcagaacgcactactataaagcctcaacaatgaagaatagtatgctactggttgtaagaacaaaggaaccaaaggtccagaaatagacaagagtttaatttataataaaggtggcatcacagatcattggtaaaaagatggcaggttcagttctagttttagggaccactgggtacccaccaggaaaaaattattagattcgtacctcatactgtaccctaacacaaactccgactgaatcggaaattttaacaaactccttatttggtcaaaatctattttgcttctggaatgctagggaactggggaccagcttcagtgccttttttttttttttttttaagatggagttccactcttgtcacccaggcggagtgcaacctctgcctccggggttcaaatgattcttctgtctcagcctcccaagtagctgggattacaggcacgcaccaccacatcctgctaatttttgtatttttagtagagacagcattccaccatgttggccacgctggtctcgaactcccgacttcaggtgatgcacctgcttctgcctcccaaagtgctgggattgtaggtgttggacaccatgcctggcccttcagtggcatttctgaatttccctgcaacctcgacaccctgggtttaagtcatcctttcacctttttttttcttttttgagatgaagtctcactctgttgcccaggctggagcgcaacagcacaatctcagctcactgcaacctccgcctctcgggtacaagcgattctcctgcctcagtctgtcaagtaactgggattacaggcgcctgccaccatgcctggctaatttttgcatttttagtagagacagggtttcaccatctttgtcaggctggtctccaactcctaacctcaggtgatccgcccacctcagcctcccaaagtgctgggattacaggcgtgagccaatgcgcccagcgattctttcaccttcttacctcaacctcccgagtagttgtgaccacaggcacaagctaccatagccggctagtttttatatttgtttctagagacgggagtctcactatgttgcccaggatgtcctcaaactcctgggctcaagcaatactcaagcctcagcctccccaagtactaagatgacagattacaggcatgagctatctcacctagcgtatttactttgaaataaaggtcagcatgctagttgtaactggagtgaaaattgctttatgtattttatatgttgaaattctgtcaactaatgtataaaagcatatttagtgcctgtaatcccagcactttgggaggctgaggcgggtggatcacaaagtcaggagatcgagaccatcttggctaacatggcgaaaccccatctctactaaaaatacaaaaaaattagccggttcgtggtagcgggtgcctgttgtcccaggtactcgggaggctgaggccaggagaatggcatgaacctgggaggcggagcttgcagtgagccaagattgtgccaatgcactccagcctgggtaacagagctagactctgtcttaaaaacaaacaaaaaaaacccatatttagtataacagcaaaatattgcaataatttgtgactatgaaagctgttaatttcatgtgcagttattgagaacctgaaaatacttaaataggaaaacagattttcagtaaatataaagagatatactggttagataactaagaacatatcctttttgagccaaaaaatgctttaaaagtccatggaattggctgggcacagtggctcatgcttgtaatcccaacactttggcaagccgagatgggaagattgtttgaatccaggagtttgagaccagcctgggaaacactgtgtgaccccatctctttaaaaaaaaaaaatgtgtaagttggactgggtgtgagagctaacggctataatcccagcactttgggaggccgaggtggtggatcgcttgaggtcaggaccatggtgagaccccatttctactaaaaatagaaaaattagctgggcataatggcacatgcaatgtagtcccagctactcgagaggctgaggcaggaaaatcatttgaacctgggaggcagaggctgcagtgagctaagatcgcaccactgcactccagcctgggctacagagcaagactctgtctcaaaaataaataaataaaataaaatgaaaaacttatgaaaagagtaaaactagattaaatctatttgaatttttgtaaaactttttggcatcttagtactcatatgaaacaaagtaacctttaggaaatgtatttaatttttagttacttccaattaggtcctgcacacttttcaaggttattcttatacaaagtgcctgtcctcagttaaaagtgagtagtttcgtttgagggacrtatagaagaaggaccatgagagcaatcaaacagctgatggtgctgagaaactcttgttcttggagaagactgtcaaacgttctaaatataactattaaacttgcacaaaattgtaacattttcaagtctttaaaataaagctttggagcctaggcaacatggagaaacccggtctttacaaagaatacacaaattagtgagtcatggtggcacatgactgtagtcccagctactggggaggctgaagtgatcgtgccactgcactccagcaggggcracagagagagaccttgtctcaaaacataaatacataaaactttggtgacctagaactttattgattctataatggtgaactgggcttctacctcatccgatttttaacactaaactattcagcatttggccaaattgtattaacaaaaacaatgcacgtttagtacaaaaataaaaatagaaaagaaagaaaaaacaaaaatactacaagaaaacacttggctaattgctttataaaccttggagtgcacaaggcccttctaactatgactaagaaatctgactacaaaaaaatcaaataccagcctggccaacatggtgaaaccccatctccgctaaaaatacaaaaattagccaggcgtggcagtgggcgcctgtaatcccagctacttgggaggctgaggcaggagaatagcttgaacctgggagggtggaggttgcagttagccgagatcctgcacctgcactccagcctgggccatagggcaagactctgactcaaaacaaaacaaatcagtaactctgtacaataaaatatacatcagacaaagctggaaacaaatgacaaactcccaatactgtccattcatgtcacagacaaatatataaaaatctcctagaaatcatgggaaaaaaaacaacgaacaacccaattttaaaatatgccaaaggccgggtatggtggctcatgcctataatcccagcactttgggaggccaaggtggacagaccgagtccaggactttgagaccagcctaggcaacatggaaaaaccctgtatctacaaaaaatacaaaaattagccaggtatagtggcacatgcctatagtcccagacactcaggaggctgaggtgggagaatcacttgccccaggaggtcaaggctccagtgagctgtaattgcaccayggcactctactctgggcaayggagcgaggcccagtctcaaaaaaaaaaaaaaaaaaaaaaaaaaaaaaaaaggcagtgtttaacagtgctggcacaactgggctatccacctaaagaaaataaaaataaaattgaacttgtatcttatactagatacaaaaataaattcattgcagactaaggaataaggatacaaaaaaattaaacaattaaaaaatattgcaaaaaaaacacaaaacacatgaacaatcaagaaccaaggagacttccctagtgaaatctgcaaacctagaaggtatttaaaaaaagatgtaactgatgacctaaaaatgaaaaatacatgtataaaaaattttttttcaaaagagaaaaaaggaaatatttgtatggaaaatgatasaatagacaaagtcaacaaacaaaagattaccacggaaaaaattattttcaatgcaggagaaaagattagtagtaaaaatatacaaagggccaggcacagtggttcatgcctgtaattccagctttgggaatctgaggcaggtggatcacttgaggtcaggagttcaagaccagcctctccaacatcgcaaaactccgtctctgctaaaaatacaaaaattagccaggcgtggtggggggcgcctgtaatcccagctacttgggaggctgaggcaggagaatcacttgaagcaggaaggcagtggttgcagtgacctgagatcacaccactgaactccagctccagcctgggagacagagcgagactccatctcaaaaaatatatatatgcaaagaactcctacagattgacaagaaaggaatttccacttctggtaatgaccaggaaacctgtatcagatcaaacctcgtataaattctaagtaaaatgtttacaacaataatctgagtgcactggcaggaactggaaaacaacgcttagaaaaacagaacaagactgggtgaagtctgcatctttacaagatttttgcctaaagctccagggatagaaatctatcaccgtgggcccccccacattctgaatatagtatcttcccacatctctggcctcccccaaaccacacgtgcacagagcagacacaaagcagcccagttacggctaaaaaaagcaaagagatttcagctactgcccatcaaaggggagacagaatttgggctgtaagctcagccaagtaaaccacctaagaaaaccaaataaatcaagaacataaaagaattcatcatctctggctgggtatggtggctcaagcccgtaatcccagcactttcggagaccraggcaggcagatcacctcaggtcaggagtatgagaccagattggccaacatggtgaaatcccatctctactaaaaatacaaaaattagccgggtgtggtaacacacacctgtaatcccagctactccggaggttgaggcaggagaatcacttgaatctgggaggtggaagttgcagtgagcagagatcgcaccactgcactccagcctgggcgacagagcaagactgtcttaaaacaaaaacaaaaacaaaaaacaactaatagtctgtgggaaacaccacgtgggaaacaccactcacactgcctacaatacaaccccaaagttattgaatgcgtggagtataaagaaaatgtgacccagatgttgaaaactgcacaaaaggacctcaaagcagctcttacaactatgctcaaggatgtcaagaaacctcaatagaacagaaattataaaagaacaaacacaaatcctacatctaaaaatacaatatattgaaaattcaatatttcatctgctataatggcagattggagagagaagagggcgtctatcaacttgaaactggataaacagaaattattcaatttgaagaacaaagacaaaaaaataattagggaaaagaaaaatgaagagagccttaggaacctgcctgacaatataaaaaggttatgtgtatagatggcgtccgagacggacaggagaaaaagaatgaggcagaaaaaaaactctctgaggaggccgggtgcagtggctcatgccagtaattccagaactttgggaggttgaggcaggaggatcacttgctcccagaagtttcaggctgcaatgcactatggtggcaccactgccctccagcctgggtaacagagcaagaccctgtttccaaaaataaatawaagaaaaaacatctgtgctttttttgtttttttgttgttttttgttttgttttgtttttgagacagagtctagctctgtcgcccaggctggagtgcagtggcgcaatctcggctcactacacgctccgcccttcccagttcacatcattctcctgcctcagcctcccgactagctgggactacaggcacccgccaccacgcccggctaattttttgtatttttagtagagacgggttttcaccatgttagccaggatggtctcgatctcctgacctcgtgatccgcccacctcggcctccaaaagtgctgggattacaggcgtgagccaccgtgcctggccacatctgcgcatttcactgtatataattcatatataaattttttaaaaacaagtgttcttatccaaaaaaactgcttggctgagagtaattcttctgtaaatgttagtcattatcattctgctaaaccacagaacatcagtttaggaatcactgggctgggcgcagtggctcacacctgtaatcacagcactttggaggctaaggagtttgagaccagcctggccaacatggcaagagcccatccctactaaagatacaaaaattagaatggtgtggtggcacgtgcctgtaattccagctactcaggagcctgaggcatgagaattgcttgaatccaggaggcagggattgtagtgagccgaaatcacgccactgtacaccaacctggcgacagagactctccgtctccaaaaaaaaacaaaaaactgttctttgaaaaagcttccttcccaccttaggggcttagcacaggcttggtgttctgtctggaatgttcttgtctcacacccctcctggcatcatggctactcattcctctggtcttagcctaaatagcatttcccctggtaaggctcgcctgacgctcccaggccaacagccaaattaatacatcctattacacacccccacagcaccctgggctgccagccttgctgctgtaatgaaattgcacttcttcgactattgtccatttccccccgggcactaaaatccagaagggcactggctttgttctgctcactgcttagttccctatactcagcacagggcccagtacccagctgctggggacaaaaagcagagaggagagtctcccactcgtgcttttcccttccacccataccgcttggctctttccaggtcgtcatttgcttgctccagctctctgatgtatttctgcaattggtctttaatggctttggtctgcgcgaggtcatcctccaaggctgagatctgccggtagccttcagagtgctgcacttcaaacttctcctgaaggacaacacagacactgagtgaatgacttaagacttctgagaaggctagacrcagtagcacacatccacctggagtcacagctactcgggaggctaaactgggaggactgcctgagcccaggagttagaggctgcagtgagctatgactgtaacactccactccagcctgggcaacacagcaagactccgtgtttttttttttttcttttgaggccgagtctcactctgttgcccaggcttgagtgcagcggcaagatcctggctcactgcaacctctgcctcccaggttcaagcaatgctcctgcctcagcctcccaagtggctgggaatacagccacccaccaacaatagtggctaatttttgtatttttagtagagaccgggttttaccacgttggccaggctggtcttgaactcctgacacctcaagtgatctgcacgcctcggcctcccaaagtgctgggattacaggtgtgagccactgcacctggcctgaccctctctctttatgaaactactcctcccaccacactccctgggtggggctccaggctttctgtcccaccctcccaccacaatcgggagacaagccaggctcagtcaacagaaccttctctccagagctgactcttaggcaagtgatgtaacgtggtgggaacaggcaggtgtcattcaaagcaggcacaacggaccaactgttttaattatgtcctgagtgcctctgccccctgagcaccttgaatcttgcctactctcaacagggttgagattcctatagcctccatcattcttcmgacaaatcattctacccaaggtgtccacagccaaagcaagccacgtaaacctctccaagcctcatccacacggcaacatgggcctccttcacacatatcatcagtgtattacaaagagagtcaccagcccggctcacagagtgagacctggcctctacaaaaaataaaaactagcagggcatggtggctcttgcctgtagtcctagctactcgcraggctgaggtgggaggaccattcgagcctgagaggtcgaagctgcagtgggctgtgaaggcaccactgcactccggcctgggcaactccctgctgcctcaaaaggaaagaaatcataatgacgtccgttgtttgtgcccacaacaatgggagggcagcatgaacttggttttaaaacagtccgccattctgaatttttgatccaggactccccgttgtgacatggagaaaaaaggaacagtttgatctctaggttatttaaaaacataaagacaggccaggcgcagtggctcacacctgtaatcccagcactttggagggctgaggtgggcggatcacctgaggtcagaagtttgagacctgcctcgaaaacatggtgaaatctggactctactaaaaatacaaaaaaattagccaggcgtggtggtgcatgcctataatcccagctactcagaaggctgacgcgggagaatcgcttgaacacgggaggcggaggttgcaccactgcactccagcctgggcaataacagcgagactctgtctcaaaaaaaaaaaaaaaaaccagaaaaacaaagaaagaaagaaaaagaaggagggagaaaaggaggggataaaatgggggagggagagagaggagagaggaagggagacagaggagagaggaagggagggagagggaaggaaagggagagagatctatgttaattaccaaaggaacagtccagctgacttctcaatgattccctgttgccagctgcagcaataacatccattacatacttattctgtgccacctccaggctaagtacaccacctatgttgtctcattaatcccactttggagacatgaacactgaagctcagtgacctgactagcccagaatcaactggtagcaaatgactgagccaagatcaaaccccagcctcctgagcaggtgtccttaagcaattatgctaaccagccccaaaccatttcaatccagatcacctgcccactcccgagctctcttgattctgttccggctctgcttccaaattactttccttcaccaaacacccagagccaggtgtggtgcctcatgcctgtaatcccagcactttcaggtggcagaggcaggattgcttgagcccaggagttctcgaccagcctgggcaagactctgcctctacaaaaaatgtgaaaacagccaggcgtggtggcatgcacctgtagtcctagctacttgggagggtgaggcaagaagactgcctgagaccaggaggttgaggctgcagtragctatgatcacgccgctgcactcccgcccaggccacagagtgagaccacgacacttaaaaaaaacaagcaaaaaaaaaaaaaacccaaaatcaccagcctggcaacatggcgaaaccccgtatctactaaaaatacaaaaaattagctgggcctggtggcgggcgtctataatcccagctacttgggaagctgaggcaggccaatctcttgaacccgggaggcggaggttgcagtgagcccagatcgtgccattgcactccagcctgggcaacaagagcaaaactctctggcagtggtgggggactgggagggggcgggcaggcaggcacactgaataactgtttcaattatgtcctaagtgcctcccacctcctgccccttgagcaccttgaatcctgcccactcccaaacctggttcccacaatcttcagacaaatcattgtctgaagcccccagcaatcttcagacaaatcattctgcccaaggtgtccacaaccaaagaaagccacatggacctctccaagcctcatccacaggggcaacgcaagcctgctttcacacattatcaccgtattacaaagagtcaccagcgtggcccacagagccagactcagtctctacaaaaaataaaaattagcagggcatggtggcgtcgcctgtagtcccagttaggaggctgagatgggaacaccatttgagcctgggaggttgaagctgcagtgagccgtgattgcatcactrcactccaacctgggcaacagagtgagacccagctatctcaaaaagcaaaaaaaaaggaatctcaatgacttctgttgtttgtgcccacaacaatgggagagcagcatgtacttggtttacacaacagtcaattattctgaatttttgatccaggactctccgttgtagcatggagacagaaagaacattccaatctctgggtttaaaaacaaagacaggccgggagcagtgacccacacctgtaatcccagcaatttgggaggctgaggcaggtggatcacctgaggtcaggagttcaagaccagcctggacaacatggtgaaaccccgtctctaccaaaaatgcaaaaaaaaattagccgagtgtggtggtgygttgtctataatcccagcyactcgggaggctgaggcaggagaatcgcttgaacccaggaggcggaggttgcagtgagcagagattgtgccactgttctctagtctgggcgacgaacaagactccatctcaaaacaaacaaacaaaaactaagacagaagggagggagaagatggaggaagggaaagggagagaaaaggagaggagagagacagagagggagatcttgttaattaccaaagaaacagtccagcgcacttctcaatgattccctgttgccagctgcagcaataacatccattacatacttattctgtgctggcctccaggctaagtacacttcctatgttgtctcgtttaattccacttcagagacatgaacactgagactcaattacttaactagcccagaatcaaccagtagcaaatgactgggccaagaccaaaccccagcctcctgagcaggtgtccttaagcaattatgctaaccagccctaaaccatctcaatccagatcacctgcccgttcccgtgctctctcgattctattcctgctctgcttccaaattactttccttcaccaaacacccagagccaggtgcggtgcctcatgccgcaatcccagcacctcaggtggcagaggcatattagcctaggcaacataggaagactccatctctacagaaaatttaagaacagccaggcgtggtggcatgcacctgcagtcctagctatgggggaggctgaggtgggaggactgcttgaggccaggaggttgaggctccagtaaactatgatcatgccactgcactctagcccaggccaacgcttaaaaaaaaaaaaaaaatcaccagcctggggcaacatggcgaaaccaaaatacaaaaattagcccggcatagtggtrcacggctgtagttccagctacttgggaggccaaggcgggcagatcacttgaggtcaggagtttgagaacagcctggccaacacggtgaaacccccgtctctaccaaaaatacaaaaaatagctgggtgtggtggcaagtgcctatggtcccagctacccgggaggcaggggaatcgcttgagcccgggaggcggaggttgcagtgagccaagattgtgcccctgcactccagcttgggtgacagagaccccatctcaaaaaaaaatcaaaaccgaaaacacaaaacacccatcctagattctacaaacataagagaaaacacttcccacaagaaaggcgcaaggtctaatttaaaagttaaaaaaggccaacttctctttactcaatcaagtaaacaaagccgttgctagaaagtccggatgcacccagggtgatgtaatggtgcctaggccagagaggcgtggcgagagccattgtgcaagaagactccaaagaaagaacaaacagatgatttacagcgttggaaggatgaggagggcggaccacatccctgctgccgcccgcagcaccctccccatttcctggctgtaagcagagaagtatctgcacccagcaagtagaggcagaccaggccctgttcccaggcgtggctctcatcgcctcacaccctttatttgggaacatctccaaataaaacaggatcttaagtcattaacctaaattcaaacgcaggctccaggaggacgcagcgagtgggctccaccgactgcactggcgattgagagatctcctcggaacctgtggacatgaaaacctgttgctgaaatgttgtgctgccatttggggctaattcgaataagctgtcagctgatgggggcatcaatagatgctctgtttggtcccttaaaggctttttcattcaacccgtgatgaataagccagttgttaagaagtccggcccagctgaatatatttctcttaggtgactgacaaatacttgctggtggcagggtcctcgttattccaaggtaccctgtttcttcactgtgctgtgtgctctgagtctcctgcatctgacatgtggctgcagtacagtggcgcaatctcagctcactgcaacctccacctcctaggttcaagcaattctcctgcctcagcccccgagtagctgggactacaggtgtgcgccaccatgcccagctaatttttttatttttagtagagacggggtttcaccatgttagcgaggacagtctcaatctcttgacctcatgatccgcccgcctcggtctcccaaagtgctggcattacaggcatcagccaccacgccaggcccaagagctcagtcttgaagcagagaattactgagtaattctcttgatattttactcaggatccatggagggcctgttatcctctccaaactgcagttcataccactaatcttcctcctacccagcttttcaacccagagtccccttcaatttaggaactataatcagccaggcgcagtggctcacacctgtaatcccagcactttgagaggccgaggcaggcggatcacttgagctcaggagtcccagactagcatgggcacatgaacccgtctctacaaaaaataacaaaaattagccaggcgtggtgtggcaggtgcctgtaatctcagctacttgggaggctgaggtgggaggatcacttaagcctggaagtcagaggttgcagtgagctgagatcacaccactgcactccagcctgggtgacagggggagactctgtctccaacagcaaaaacaacaacaacaaaaagaacgataatcattgctcattgtgtgtagcaggtgttcagctgttaacaaatgggtgaagtgggccaagtacagggagaggcagatgacactaaggtctccgtgtcacggatatggggattgggggaaactcaacratgtgtgttctaaacaaccactactcaggttttttattttttaacttttgctctgtcacccaggatggagtgcaatggtacaatcatagctcactgcagcctcaacctcctgggctcaagcaatgctcctgcctcagcctcttgagtagcttagactacaggtgtgcactaccatgtccaatgaattttttrtttttatttttttgtagagacagagtctcgctatgtygcccaggctggccttgaactcctggtctcaagcaattctccctcctcagcctctcaaagggctgggattacaagtatgaaccaccatgcctggccagaaatccatctttttacaggaagctttacaaattttgatggatgggggaatatatataataaaaggcaagtaagtaggggaaatattattggtagagcctaggtggtggtggatacacaggtattcactggaaattctttcagccttatatgctggaaaacgttcatggggaaatgctgaacaaaaacccctgaaggcgatcaaacaacacctatggggcagatggatctgcagacggccagctgcactctgtggtctccaacagaaagcttcagcttcaatgaccaccttcaacgtgtctgggacctctcctccgccctgccccaaacccccaatccatttgttggtcccacaccctttcctatacattagtaaagctgggcttgccaaggtccacccgacacccattcttgtccacgtctgtgatgggtacagatcaactctccttcagccccatctccccaagcaccaagtgtcagcaacacatacacctacaaacaccctccacacagcctccctcaacccatgcagtcctttctttttctttctttttttttttttttgagacagagtttcgctcttgttgcccaagctagagtgcaatggtgcaatctcggctcactgcaacctccgcctcccgggttcaagtgattctcctgcctcagcctcccaagtagctgggattacaggcacatacaacaacacccagctaattttgtagttttagtagagacagggttttgtcatgttggtgaggctggtctcaaactcccaacctcaggtgatctgcccacctcggcctcctgaagtgctgggataacaggcatgagccaccgcacccagccagtcctttttctcttgaaaggcccccacatcagagttctgtgactgagcttcacgtccccaactgcttcatggcattaggtttgtcttcccaaagaaggcaaccagcacttcccctttcaccgtccatcatacctagccctgggcacmcacagttttgactcttccatgaagcagctcatcaaaatgtacattgggagtttaatgagaaaaagaaaaccacacagacatgccagggccccacccagacttactgagaaatggaatctcagagcaaggcggggagatggggatggggagagagggttcaggcctgtcggatgtttatgaagctggcctagtgatgctggctggcagctaaggctgagagccagtctctggggcacggtgttgacttagtgatcccttgctgagccctacagcatgtacagaagggatggtttttaccttgcagagcactgggtctccagatacctggctatgtctagaggtgcttttggttttcaccaccttggaggtgcggggaatgctactggcatctagagggtggaggccagggatgctgccaaacatcccacagtgtggtcaggcggggtgactcatgcttgtaatcccagcactttgggaggctgaggcgggcggatcacctgagctcaggagttcgagaccagcctggccaacatggtgaaacctcgtccttgctaaaaatacaaaaattagccgggcgtggtggctcacacctgtaatcccagcactttgggaggctaaggcgggtagatcacactgtcaagagatcaagaccatcctggaaaacatggtgaaaccccatctctactaaaaatacaaaaattagccaggcatggcggtgtgtgcctgtaatctcagctactcaggaggctgaggcaggagaatcacttgaacccaggaggtggaggttgcagtgagccgggattacgccactgcactccagcctggcaacagagtgagactgcgtctcaaaaaaaaaaaaaaaaaaaattagccaggcgtggtggagggtgcctgtaatcccagctactcaagaggctgaggcgggacaatcacttgaacctgggaggcggaggttgcagtgaggtgagattgtgccactgcactccagcctgggcaacagagcaagactccatctcaaaaaaaaaacaggctgggcacagtggctcacgcctgtattcccagcactttgggaggctgaggcaggcggatcctgaggtcaggagatcaagaccatcctagctaacacggtgaaaccccgtttctactaaaaatacaaaaaatttagccaggcgtggtggcaggcgcctgtagtcctagctactcgggaggctgaggcaggagaatggtgtgaacctgggaggcggagcttgcagtgagccgagatcgcgctactgcactccagcctgggcaacagagcaagactccatctcaaaaatacaaaacaaacaaacaaaaaacccacaaagcaaacctcagtccctcccaacggaggatgatccgggctccaatgtcaacagcagccaggtcgagaaacctgctctgaactggcagagtgcaacacaccttttggtaatgaaggaaatggtctgcagcccctctgtccactaaggaaactcactggccacacgtggctcctaagcacttgaaatgtggctactgtgactgaggaattaagtttttattttaattcattaaatttcaacagccaaatgtagctaagggctacaatattggacctgatgatattactctagcaacacctccataccctaaaaatgtctccctggccaggtggtggctcatgcctataatcccagcaatttgggaggccaaggcaggaggactgctcgcgtccaggagttcaagaccagcctgggcaacacagcgaaaccctgtctctataaaaaatacaaaaactaaccaggcatggtgccgcatgcctgtagtctcagctactcccgaggttcaggtggaaggactttggttttttttgagacggagtctcgctctgttgccaggctggagtgcagtggcacaatctcagctcactacagcctccaaccatcaagtgattctcctgcctcagcctcccaagtaagctgggactataggcgtgtaccaccacgcccagctaatatttgtaattttagtagagacagggtttcatcatgttggccaggatggtctcaatctcttgacctcgtgatctgcccacctcagcctcccaaagtgctgggattacaggtatgcaccacctcgcccggcccaggtgagaggactgcttaaacctgagacgtccagggtgcagtgagctgtaatccagccactgtactccagtctgggcaacagagcaagaccctgtttcaaaaaaaaaaaaaagtctccctgccatgtgccctataaaatcagtgtacacaaccaagaaagtccacgggaacatgtgtgtgacttgcttctcaaagctccacccatcatggatcccgaggtcaggagttcgagaccagcctggccaacataaaaccccgtctctactacaaatacaaaaaaaattagccaggcgtggtagcaggcgcctataatcccagctactcaggaggctgaggcaggagaattacttgaacctgggaggtggaggttgcagtgagccaagatcgcgccactgccctccagcctgggcaacaagagtgaaactccatctcaaaaaaaaaaaaaaaamaaaacaaaaagcaccacccactagaggcacaaagagttcaaagatcacgtctgccscacaggcccttccagagatgagcatgggcctggggtctggagtccctcattgcagggttccttcttccagccaagcatgccatgcctgtgttggacgcctgtctacacctgagcacacttcctctcagcccctcaccttgatggtttccagctccatgcgaaggcggttattttcggacaggaggtctctgttcctggtttcaatttgttgcagctgcgtctccaattcagcttcatattctcggcttccctcctggaattctcggagttcctcttgcgtattttctgccctacagcaaaattgttaatcatcacgtagtaatatttttgaagacagagtctcgctctatcacccaggctgcaatgcagtgctgcaatctcgtctcactgcaacctctgctttccaggttcaagcgattctcctgcctcagtctyccgagtagctgggactacaggcatgcggcaccacacccagctaatttttgtatttttagtagtgacggggtttcaccatgttggccaggctggtctcgatctcctgactggaggtgatctgcctgcctcggcctctcaaagtgctgggattacaggcgttagccattgtacctggccaaattcaaggaatattttaaaaatatcaagcctgaattacctttaagtcaaactagaataaagaaagtaggaagggctgggtacagtggctcattaagaattacttgaggccaggagttccagaccagccagggcaacatagtaagacctcatctctacagaaatgtgtttaaaaatcagccagacatggtggcacacgcctgtagtcccagctacctgggaggctgaggcagaaggatcacctggggtcccaggggttgcagtgagataggtcacacttgtgaagagccagtgcaattcagcctgggtgacagagtgagaccctgactctaaaataatttttatttatttatttgagatagagtcttgctctgtcacccagactggaatgcagaggtgtgatcatgcgtcactgcagcctcgacctcccaggctcaagcaattctcccacctcaggctcccaagtagctgagactataagaacatgccaccatgcctgctaatttctgtattttttgtacagacagggttttgccatgttgctagagctggtctcaaactcctgagctcaagtgatctgcctacccaaagtgctgggattacagatgtgagccactgtgcctggacctaaaataatttttcaataaatgaaagaaactaaggggactggaataaggcctctatgtacaaattataaagacccattataaataaaaacagtgccaaaccaaacgcacacacacacacctcccagatatgagccctgaccaaaacacgagtttcaaatcttaaaatctttagcaatatattttgctaggcatagggaaaagctctttccctgtgcacaaagaacttaccagatatggcatctaggaactgataaaaacccttctagaaaataagatggacaccgggcgtggtggctcacgcctgtaatcccagcacttagggaagccgaggcaagtggatcacctgaggttgggagttcgagagctgcctgaccaacatggagaaaccccgtctctactaaaaatacaaaattagctgggcatggtggygcatgcctgtaatcctagctactcgggaggctgaggcargagaatcgattgaacccaggaggtggagcttgtggtgagccgagatcatgccattgcactacagcctgggcaagaagagcgaaactccatctcaaaaaaaaaaaaaagaaaataagatggaaggccaggcatggtggctcatgcctgtaattccagaactttgggagggtgagacgggcagatcacgtgaagccaggagttcaagaccagcctgaccagcatggcaaaaccccgtctctgctaaaaacacaaaaaattagccaggcgtggtggtgggtgcctgtaattccagctactcgagaagctgaggcacgagaattgcttcaacccagaggtggaggctgcagtgagccaagatggcaccactgcactccagcctgggcaacagagtgagactctgtctcaaaaaaaaaagaagaaaaagaaaataagaaaacaaaatgtaaagtagcatagtaggataatcaggaccataggtctggagttcaaattccagctctgctacttattggctgtgtgactgtgagcaagttatctgccttcactgaggctcagtttcttcatctatataatggggtgctaatagttttttcacaggcagttttgagatagtgtaagttaagcctttcacactgcctggcacatataggcctgcaataaatggttgctgttctttttatagaaaaaagagagctcacacctgtagtcccaacactgtgggaggcagaggtgcatcacttgagtccaggagttcaagaccagcctgggcaacatagcgagacccctgtttccgccaaaaaaaaaaaagcctggcctgrtgaagcacacctatagtcccatctacttgggaggctgagccaggatgatcgcttaagcccaggagtttaaggcggctgtgcactatgatcacgcctaggaacagccaccgcactcagcctaggtaacatagcaggaccccatctcaaaaaaaaaaaaaaaaggaaaagcaggtgaactcggactgacctctgtttgtaggtcatcgccagatctttccaatagttagcttcttcctcctcggagctgaaagtctttccggagtcctccattgtgaaaacaggggaagagatcactctccttgtggcatggtgtctaggagagaaggtttcaaaatgattacccacatctggttaaacagctgatcccctttaacagaaaaaaaaaaaaaaacttggccaggcgcggtggctcacgcctataatcccagcactttgggaggctgaggcgggcggatcacgaggtcaggagatcgagaccaccctagctaacatggtgaaaccccgtctctactaaaatacgaaaaattagctgggtgtggtggcgggtgcctgtagtcccagctactcaggaggctgaggcaggagaatggtgygaactcaggaggtggagcttgcagtgagccgagatggcgccactgcactccagcttgagtgacagaccgagactctgtgtcaaaataaataaataaataaataaactttatgctgggttaaatgattaaatactgccaaaaatctgaagctaaacccaaacaaaacacaatccactcacctgttatattccctgggttaacatcaaggctcatggatatccctatgcaaatatttattgagcacctactaaaggacctagggagccacataaaacgtctccaagatgcctgccttccctaaaggggcctcacagtctggtggagggagtgggggagtgggggctggaatggaaattacgcataaaataataattataattattatttgagacagactcttgctctatcacccaggctggagtgcagtggcgtgatctcrgctcactgcaacctctgcctcctgggttcaaatgattcttgtgcctcagcctcccgagcaactgcgattttacaggcatgcgccaccacgcctggctaatttttctatttttagtagagacagggtttcaccatgttggccaggctggtctcaaactcctgacctcaagtgaaccacccacctcagcctcccaaagtgctggtattacaggcgtgaaccaccgcacccaaccccatgtaaattatgataaaactatgtgcctagtatagccacagaaatgtgcacaggattttgacatgcaataaattgcatatatttgagtatacacattggtgtgttctgaaatatgtatgcacctgaaaatacatttctatcagtgcccaggatatttaagaagttcaaaactcaacccgaaagtcaaggaaggcttcctagaagaggcgacacatgaggagcatgtgaaagaatatgaaaaagccaggtgcagtggctcacgcctgtaatcccagcacactgggaggctgaggcaggcagatcatgagggcaggagttcgagaccagcctggccaatatggtgaaactccgtctctactaaaaaaaaatacaaaaattagctgggcstggtggcgggcacccatactcccagctactcaggagactgaggcggtagaatcacttgaacctgggaggtggaagttgcagtgagctgagatcgtgccgctgcactccagactgggcgacagaatgagactccgtctcaaaaaaaaaaaaaaaagaatatgaaagaactggaaggcaatggtaattgagcaggggaagaaggaatgaggagaaacagccaggcacttgtaggggagctagagggagtctggtaagcctgggttgaaaggtgacgagtggaagggaacctacctggacagactgaaataaaggggctaagtcacagacggcttttgcaagatgttaagaaacttagtggcaatgggaaaccattggagaaagttagggaagagagtgatgtgatatgatgggctctcctgcttaaaaagctggtcctggtggccatggacaggcagaggaaggacaaggcctaagatggggagctcctgcagcaatgcaagaaagaaaggaaggtggaggccaggtgcagtggctcacgcctataatcccagcactttgacaggccaaggtaggcagatcgcttgagcctgggagtttgagaccagcctgggtaacatggagaaactccgtctctactaaaaatagaaaaatatcagccagctgtggtggcacatgcctgtgttcccagctactcaggaggctgagatgggaggatcacctgagcacaggaggcagaggttgcggtgagccaagatagtgccactgcactaaagcctgggtgatgaagtgagatcctatttaaaaaagaaaagagaccaggcacggtggctcatgcctgtaatcccagcactttgggaggccgaggcaggcggatcatgaggtcaggagattgagaccatcctgtctaacacggtgaaaccctgtccctactaaaaatacaaaaaaattagctgggcgtggtggcaggtgcctgtagtcccagctactcgggaggctgaggcaggagaatagcgtgaacctgggaagcagagcttgcagtgagccgagatcacgccactgcactcaagcctgggcgacagatcaagactccatctcaaaaaaaaaaaaaaaaaaaagaaaagagaaaggaacgtggcctgaattagaaagtgagaataggccaggtacagtggctcacacgtataatcccagcactatgggaggccaaggcaagaggaccacttgggaccaggagttcaagaccagcctgggaaacacagcaagaccctaccttgacaaaaaaactttttaaaaaattagactggtgtggtgcaacacatctgtagtcctagctactctggaggctgaggaaggaggatcacatgagtccaggaatttgaggctgcagtaagctatgatcacggtactgcactccagcctgggcaagagagtgagaccttgtctaaaaaaaaagaaagtaggaatgaagatggagggaacagaaatggactccaaaaatatttagaagscaaacttaccagaacttgatgaattatgacttttcggggcaggggagagagaaaaaggaggtgaggacatcttctggggctctaccttaggcaattgggtgccgccaccatccccatcaccagagataaagacttccagaaggtggctgggtgcagtgcctcgcacctgtaatcccagcacattggtaggccaaagcaggtggaatgcttgagcccaggagttccagaccagcctgggcaacctggtgagaccctatctctacaaaaaatacaaaaactagctggtcatggtggtgtgtctgtagttccagctactcgagaggatgaggggcaaggagaggtcgaggctgcagtgacccatgaccatgccactgtactccagcctgggcaacacagcaagatcccgtctcaaaaaaaaaggacaatcaaaaggaaaactcggccgggcgcggtggctcacacctgtaatcccagcactttgggaggccgaggcaggtggatcacgaggttaggagatcaagaccattctggctaacatggtgaaacactgtctctattaaaaatacaaaaaattatccaggcctggcagcgggtgcctgtagtcccagctagtcaggaggctgaggcaggagaatggcttgaacccgggaggcggagcttgcagtgagccgagatggcgccactgcactccagcctgggygacagagcgagactcaaaaaaaaaaaaaaaamaagtaaaactcttgggtaggtgggtgggttaaggagagataacaaacccagtctcagacattcacagcttgacatgtccatgacacaccaagatgcaatatcgcagctgaaactcagggttgaaattgggtcaacaatatccatttgaaagtcatgcgtctatagctggtttttctcttttcctcgtgaccatggaagaatcgcctagggactgtgtatggaacagtgaagaatgccaatattggaaaggtgggcagtttaagaaatggtaaccgaaggaggcagagaagaaacagagtgagagagatgagaatcaggaagactgtgctgtcctgggagtgggcggtttcaagggaaaaaagggaaasattccagtgtcacaaggatgcaacagagaagcagggaagataagggctggaaaatatccacaaggctgagcgaaagtcggtcactggcggtgtgagcaagaacagtttctacacagtggaggaggaaagacgaagaactgagtgcaggagtaactgggaggtgaaaaagaggaaagmgatggaattctggagaattacctaaaagacgatgaaataaattagccaacagctagaggatgtgggcggtaggggccttggctctcaggactttgagctgtttcacagcagaggtgagggaagcaattttttttttaagagatagggtctcaatctgtcaacccagctggagtgcagtgacacaatcatagctcactgcatctttgaactcctaggcggcactgatcctcctgcctcagcctcctgactagctgggactacaggtatasgccactacgccaagctaattttttttttaagagatggggtcttactatgttgcctaggctggtctcaaattcctgggctcaagcgatcctcctgccttgtactcccaaagcactaggattctaggtgtgagccaccacacccagcaagaaagcagacttctattaacagttgggctaacggtttgtatactccctgttgatagaggctgtttgatgtaatcacctattttctgaatttatttgaggctctgagcttgtcaaaagggcatgaggaatccaagtaagattgtgtccaggccagactcagtggctcgcatctgtaatcccagcactttgggaggccgaggcgggcagatcacaaggtcaggagtttgagaccagcctggccaatatggtgaaaccccatctctactaaaaatacaaaaattaggcgggcgcagtggcaggtacctgtagtcccagctactcaggcggctaaggcaggagaattgcttgaacccaggaggtggaggttgcaatgagctgagatcgtgccactgcactccagcctgagtgacagagcgagactccgtctcaaaaaaaaaaaaaaaaaagattgtgtccaaggccgggcgcagtggctcacacctgtaatcccagtactttgggaggccagggcaggtgaatcacctgagctcaggagtctgaaaccagcctggccaacacactgaaaccccatctctactaaaaatataaaaattagccgggcatggtggtgtgcgcctgtaatccccactactcgggaggctgaggcgggagaatcacttgaacccagaaggcagaggttgtagtgagccgagatcgcaccactgcactccagcctgggtgacagagtgagacttcctctcaaaaaaaaaaaaaaaaaaaaaaaaaaaaagattgtgtgcaaggtcccttccttccctcaagagaacttagaggctggtgtgtatccctggggacaaaagaatgagcaaaaaccatcactttctaagatataaccaacaagctatatagttttggttaaaacatgaaatcattaggctaaacatgtaagtgtcaacacagacaccaccactaacttctggtggaagttagtgagcctcacccatgttgagccaatgacagaggtgggcctaattcatgcagaaccaggaaatgcacaattgtacctagattcaagcacaaaacttaccgataactctgcatttgttgggactcatattcacatcctttctccctcctactttttcaatcctttccctcattcagagaaaacatgctatttcccgacccactcatccctctggaaagcagattctctgaaagtttgatcaaggcagaaaggcgaaatgtcatacaaagctggccagacgtggtggctcatgcctgtaatctcaacactttgggaagctgaggcaggcagatgacttgaggtcaagagttcaagacaagcttggccaacatggtaaaatcctgtctacactaaaagcacaaaaattagctgggtgtggtggcaggcacctatgatcccaactactcgggaggctaaggcatgagaatcgcttgaacccgggagccagaggttgcagtgaaccacgatcacaccactgcactccagcctgggcaacagagcaagactccatttcaaaaacatataaacaaaaaataaataaatgtcatataaagctaatgatttgtagttttgcttgttttttccagacatgcattcatttttccatcttctgtgacagcacaatattcccttgggagaataccctactcatttcatgagttcagagggatctgacatcatcctccacacctgggaagaggcatatgcctattcacgaccttagtgatcagctcatgggtgggcctaacccacgatgagccagtgacagaggtgggcctaattcacgcagagccaatgatagggtgagcctaacccccatgctcagccagtgacagtcacggatctaacccatgctgagccaatgattggcttaaggatgggcctaacccatactaagccagtgagggcccaggtccagaccttttgcatagctgtcaaaaatgaaactctctttccactagggttggtaaggtaagcctgaagctggaggtaagcctgaagccggaggtaagcctgaaactgccggtggtcatcttgctatcacaagggagagcctgcctcagagtgaagccaaaacagaggaaagctgggccaagggatggagagcctgggtcctgacaatatcatttgaacacctagatgcagccacacctgatttaaggttatgagataatcaattccttgtcttggttataccagttggggttagatttctgccacgcaggaatcttaatgaatgtatggaatcaacgaccttacttgctcaaagtcaaaagggtagagtggtgcctggcgcaatggctcatgcctgtaatcccagccctttgtgaggccgaggcagacagatcacttgaggtcaggagtttgagaccagcctgggcaacatggtgaaaccccgtgtctactaaaaaaacaaaaacaaaaatcaaacgggcacggcggtgcgtgcctgtagtcccagctactcagaaggatgaagcaggaaaaatcacttaagcctgagaagcrgaggctgcagtgagccaagatcactgcattccagcctcccagcctgggcgacagaacaagaccccatctcaaaaaaataaaaagggggtagagtgttaatagcagtcattaacaaggccaggagcagcataaacctaggccaaggagtccctgctcaagccataagctctaatgagcccagatctcatgtaatatgtactcatcaaaccaattctatagcaacaatagcccagggccaaggcatctatcaatgagcactgtgtggccattaagatattggtggctgggtgcgttggctcatgcctgtaatcccaacactttgggaagccaaggcgggtggttcacctgaggtcaggagttcaagaccagcctggccaacatggtgaaactccatttccactaaaaatacaagaaattagccaggtgtggtggcaggctcctgtaaccccagctactcggaagactgaggcaggaaaatcgcttgaacccaggaggcggaggttgcagtgagccaagatcacgccattgcactccaacctggacgacaagagtgaaactctgcctcaaaaaaaaaaaacaaaaaaagacattggtgatactattgagggcagtctcagtcccatggtatggaaggttgtcagcatacaataaagtgcggaagtgaggaaccagtaacaacaamagcagaatgactcctcctgaggtttggaaaaagatgtgcaagatccaatgtgatcaggcccctgcatagttttctacacatttcttaccctaccacctctcattcacttatgtcccagccacactgccttctttctcttcyttgaacacccaagcctggcagggtgctgtggctcatgcctgtaatcctgatactttgggaggccacagcgggtagatcacttgaagccaggagttcgagaccagcctggccaacatggtaaaaccccatctctgctaaaaatacaaaaattagctgggcatggtggcacatgcctgtaatcccatctactcaggaggctgaaacagaagaawctcttgaacccgggaggtggaggttccagtgagcagagatcctgccactgcactccagcctgggtgacagagcaagactccatctcaaaaaaagaaaagagtaataataataataataataawaaaagaaaagagcctcttaaaacactgttatcttggccaggaaggtttaaaaacttaatcctcaggaaagaaatgaatctgagatgctttaggaggtgcgtctattgtggggcaggttctaattacaacgggccaatgggagggatctggttttggatttcaaggactgaggagaaaataagcagagaactggatttgtatcacagcctgcaaaatctttcactccaaccaagagacaaaaaccacaggaacagcatttcaaccaaaaactcttacattttaaaagcaatccttagggaagagagatgctggaagcaaagaaggaagaagtaacagctgcacttcactttatcataaaacagcaatctttttttttctttttctttattattattatactttaagttttagggtacatgtgcacaatgtgcaggttagttacatatgtatacatgtgccatgctggtgtgctgcacccactaactcgtcatctagcattaggtatatctcccaatgctatccctcccccctccccccaccccacaacagtccccagagtgtgatgttccccttcctgtgtccatgtgttctcgttgttcaattcccacctatgagtgagaatatgcggtgtttggttttttgttcttgcaatagtttactgagaatgatgatttccaatttcatccatgtccctacaaaggacatgaactcatcattttttatggctgcatagtattccatggtgtatatgtgccacgttttcttaatccagtctatcattgctggacatttgggttggttccaagtctttgctattgtgaataatgccgcaataaacatacgtgtgcatgtgtctttatagaagcatgatttatagtcctttgggtatatacccagtaatgcgatggctgggtcaaatggtatttccagttctagatccctgaggaatcaccacactgacttctacaatggttgaactagtttacagtcccaccaacagtgtaaaagtgttcctatttctccacatccttaaaagtataagatttttgcctttgccattcaaaaatgtcagagagaggccgggcacgatggctcacgcctgtaatcccagcactttggcagactgaggtgggcagattgcttgagcccaggagtttgagaccagcacaaggtgaaccccgtctctactaaaaatacacaaatcagcagggcgtcacgatgcacgcctgtagtcccagcactttgggaggctgaggtgggtggattgcttgagcccaggggttcaagaccagcctgggcaacatggtgaaaccctgtctctactagaaacacaaaaattagccaggtgtggtagagcgcacctataattccagctacttgggtggctgaggcccaagaattgcttgaacccagaggcagaggttgcagtgagcagaaattgtaccactgcactccagcctgggcacaagagcaagactctgtctcaaaaaataaataaataaacaacatgaaaacgtcagaaagttctattgcagtactctctgtggcagaaagcaggcaacatgacttgcaagggttctcttattttatcagcattaagtactgaatttgaccttctgtttgctgtgtgctagacatttcaaaaattgtttgcaaacattatcttctttaagctgtgtgactgtaagagatggctaaacaggacaaccactctgtttcttggaagcagaaacaccgtatgccttggccatctctaaatgtgcatgtgagcagcagaggcaaactagatccaagttcaagggatctttgcattcaagtccaaggcttcccaggggttgcaaactgactgactgcagatcagattcacttgtttcatttggtccagttttgttttttttttttttgttttttttttttttgagtcggaatctctttctctgttgcccaggctggagtgcagtggtgtgatctcagctcactgcaacctctgcctcgcagcttcaagcgattctcctacctcagcgtccctagtacctcggattacaggtgcatgccaccacgactggctaattttttgtatttttaggagagacggggtttcgccacgttggccaggctggtctcgatctcctgacctcaggtgatctgcccacctaggcctcccaaagtgctgggattacaggtgtgagccattgcacccggccctcacatagtgttttaaaaggcactgtaataggcaagtgttaatgcctggtctcagtatatacaactttgcacctgctatcttaaaaatgcaccccacatgcatttatttcatctgtgtgccactaacctgcgttcttaatacgccaccacaccatcatgccccagcagctctgtagacaaatctgatgggatcatgcaaggaacaatgacaaactaggacccagtggtacaaaaagtatctattttgcacaacagagatctatgcctccttcaaaaatttgtttccggccgggtgtggtggctcatgcctgtaatcccagcactttgggagggtgaggcaggcagatcacctgaggtcagcagataagagaccagcctgggcaacatggtgaaaccccatctctaccaaaaacacaaaaaaattagccaggtgtggtgatgcacacctgtggtcccagctactcaggaggctgaggtgggaggatcacttgagcatgggaggcggtggttgcagtgagccgagatcgccccacagcactccagcctgtgtgacagagcgagaacccgtctcaaaaaaaaaaaattgtttccacatgctttttttttttttgcatgttttacatgattaaagctaacaaaaaagtctgaaaatacactcgagacacacacctctgattttaaaactctggaaaaaagcaaagcaatctctttcagctttcctctgagagaagaaacccagcactgctagtcaggagcaataaacatacagaaaccatcgataattactcaacacccttctccatccccactccatatccttcccaatcaaaacaaacagaagagcaggagggaagagaaagaagctgccaaatgtccacacatgctccgacagccaggacgcaggctttgcattttgcaggagtgacatcactggggcaacatcagtcaagagtcagcaagcctggcttctgtctttgtgctttccaagtttacaatgatcaacctacaaaaatacttaggcaggcaaggacccatgttcaaagatgcacaccatcattcackaatgtggaaaactggaaacctcaatgtcaacagaggactgaatggaaaacgatgcagttgttaagaactgtaagtactaatatggaagaaagctcaggatatgttaaaaatgggtgcccatttttgtttatttccctctctctgtacacagaatagaaaagggtctggaggatgcaccagaatgggggtaaagcaagccctgtggatttgtacctgacaccttgctttaaggtaaactacatacacatatatacagtaagcatagatcgctttagagattttaaaaagcttaggccaggcgcggtggctctctcccaccccggcacgttgggaggctgaggcggaaggatcgcttgaacccaggagttcgagaccagcctgggcaacatagtgagaccccaatctctacaaaaaattttaaaaattagccaagcatggtggcatgtgcttttagtcccagctacttgggaggctcaggcaagaggattgcttgagcctgagaggtcgagactgcagtgagctgtgattgcatcactgtgttccagcttgggcgacagagtgagatcccgtctcaaaaaacaaacaaacaaaaacttggacaaaaagtaaaatagctattgttccaggataattttattctactgaaccaagtgacagggaaagaatttttcctactgtggttttgcctcctccaacccttttcaaacatttcttgaatacctactaagtgctgggcactgctgaaggaggcagacaaaaagcacccacatccattgcacgaggtgcacgtgtagtactaactgcaggcacaaactttctgtacacaggaatgctcatgttaggaaattaccttgtgaggaaaaggagtgtcaattctcggctcacattctaaggcaaaagaacacactttgggctgcatgcagtggctcatgcctgcaagtaatctcagcactgtgggaggccaaggcaggaggactgcttgagcccaggaatttgagaccagcctgggcaacaaagcaagattctgcctctacataaaaaataataataatgatagagtcgggtgcagtggctcatgcctgtaatcccaacactttgggaggctgaggtgggcagatcacgaggtcagaagtttgagaccagcctggccaatatggtgaaaccccatctctactaagaattagccgggcatggtggcacgcacctgtaatcccagctactcaggagggtgaggcagaagaatcacttgaacccggaggactgaggttgcagtgagtcgagatcatgccactgcactccagcctggacaagaacaagactccgtctcaaaataaataaataaataaataataaataacacactttggaaacaaaaataagtcaagttaataaactgttatccaacatgggataaaatatatgaatcacaggcccctgagacttcagcggcacagatcatctgcatttaatcctacacaaaacacacactaagaggaaaggctcaaaatgggttgtaggccggcacggtggctcacgcctgtaatcccagcactttgggaggccgagggggcagatcacgaggtcaggaaatcgagaccatcctggctaacacggtgaaaccccatctctactaaaaatacaaaaaattagccaggcgtggtggcacgcacctgtagtcccagctactccggaggctgaggcaggagaatcgcttgaacccgggaagcggaggttgcagtgagccaaaatcgcaccactgcactccaacctgggcgagagtgagactctgtctcaaaaacaaaaacaaaaaaaamaaaaaaaaaacgggttgtataccaacgaggtgatggaggctggggtggtcgggtaacaagaggctttaggagtagctgggatctaattaatcttcaaaacacccgacccatgtcctaaaatgccatcctatgctagaatacactataacaaaactaaaaatgatgaacctgcctaggtcgtgctgcaaaggccttttctttagaaagttaaaaggggcctgaggctcaaagtagaaattaagaggcacaacctggtagtaaccacggacaaagcaatcaaggaagctcaggccctcaggaggcagaaagcctgagatggctcggagaagataaagtcgcctccccaaaagcggtgtcaaggtgacagcggggtttcccaggacctcagagactcaggtcctcagtgagcccagccatcactcaagctgcggaataagcattttcgtcctttacccaatccctccccaaagtgctgtcagaagaaacctgaaccgtcctgcggcagagacgggagcaaagcggagagcagactgccccaaacgtgttcccggagggagggagcagggtgggtttttggaaagaggcctgcaggggcgggacagtgggtgtgagggcaggggcaacgctgcaatcgaggggtctggggtcgcagagaagsgggtggcaggatggaggaataggagagagagagaaaagaaacgagggtcatctaggagaggagtatggggaggaaggaagaggagaaagaggatggagcctggcagcggggtttggggaccggcaaggcttaaccacccaggaagtcccggaaggagaagagggcaacggggtgggagagagaccaacgcagaaagagaaacaaagttgccaagggcgaggggccagcgcgaggaacgcaccggtggcaaggcactcagtgcctaactttttaggacgggaggctccagggaggcgggattttggagcccagggaccgggggagtccaggcggccgggaagcgacgcgcaagcgaggggcgtaggggtccctgccaggcggtggcccggggtcccgggatcctggggcggggcagaggagcttttcagccgcggtggaggtccccggacagccaccccgaccccagccccgcgcagcgcctcacttacccgagcaggggcggcgaggccaacgcggcggcggcggcagaggcggctgcgaagggcggtgcggccccggccctccggaccccgcccccgccccggagcctgcggtcggcgcctcccattggctgctgctctacggtaccgcgtccgcctcggccaatcagcgcagagcagcgtcgtttggaaacttttttcccaggccgggcgcggcgcggccaagcggcgaaggctcctggccggagggggtttgagaggcgccggctgccgggcgctgggctgcggcgggctggcgggcattggagatgctgcagaacgctgcctggacacccgggaaacgggtttgggcttgcgggccgcgcatttcaggaaaatacgccggcctctccttcacttcgattgcattttcccattcttgcactttctccaaatcagaaggaaagacaaagattcaggcccactgaagctagcagtgccccgtgcccttcctactcctttacaccaaaagtagaatcttcagcatcattatcttctccagaagcaggagaacgtagtgcaccagaatttggtcataaacttggctttgagtcctagtcctgccccttactaactgtgtggtcttgggaaagttgtttagcctctatgactccgtttccccatctataaaacgccattatgggtctggcgcggtggtcacgcctgtaatcccagcactttgggaggccaaggcgggtggatcacgaggtcaggagttcaagaccagcctggcacatggtgaaaccccgtctctactaaagatacaaaaaattagccggatgtggtggcacgcacctgtaatcccagctactcaggaggctgaggcaggagaatcacgggaaaccaggaggtggcggttgcagtgagccgagatcacaccactgcactctagcctaggcgacagggcaagactccgtcttaaagaacagacaaacaaacaaacgacattatgcagaggactaaatgacttaacagcatttgtaaaaacgtttagaacagaaatttgaacttagtaagtacaatatatgtatttgttaaatgatcttgattttgtttatttatttattttgagatgaaatctccctctgtctcccaggctggaatgcagtggcgtgatctccactcactgcaacctctgccttctgagttcaagcaattctcctgcttcagcctcccgagtagctgggatcacaggcccgcatcaccacacccggctaatttttatatttttagtagagacggggtttcaccatgttggccaggctgctctcgaatccctgtcctcaggtgatccacccacctcggcctcccaaagtcctgggattacaggcgtgagccaccacacactgcctgaagatcgtgatttttaaatggctgtgtgtgccaggcacaattctcacagcaaccctaattgttcactaacaaattaaaattaaaaaataatttttttcttttcgagacagagtttccctcttgttgcccaggctggcgtgcaatggtgcgatctcggctcactgcaacctctgcctcccagattcaagcgattttcttgtcttagtctccctagtagctgggattacaggcgcccaccattacgcccagctaattttttgtatttttagtagagacacggtttcactgtgttggccaggctggtctcgaactcctgacctcaagcaatacacctcagtctcccaaagtgctgggattacaggcgtgagccatgtaactcagaaggcagaggttgcggtgagtggagatcacgccactgcattccagcctgggagacagagggagacttcatctcaaaataaataaataaataaaatcaagccaccatgcttggctggaatttctttttttctttattttcttctaaaacatcctgtcataacatgttcattaacaaataccgaacattctggttagtgggtacaaaaatagagttagaatgaataagatctagtatttgggagcacagcagggtgactacagtccacaacaatgtattgtacattttaaaataactaaaggagtataattggagtgcttgtaacacaaagaaaggataaatgcttgaggtcatggacacccatttaccctgatgtgattatgatgcattgcatgcctgttatcaaaatatctcatgtaccccataaatataaacacctacagtgtacccataaaaactaaaaatatatatattattatccagcttttttttttttttgtgagacagagtctcaccctgtgacataggctggagtgcagtggcataatcaaagctcactgcatcctggacctcccaggctcaagtgatcctcccacctcatcctccggagtagctaggaccacaggtgtgcaccaacacgcccagctaatttttacatttttttgtagagacgtggatctcactatgttgcccaggctggtcttgaactcctgggctcaagtgatcctcctgcctcagcctccctcccaaagtgctgggattataggcatgaaccacagcacccggcattatgagcattcttctgtacaatgcacccttacagcacagtgaatacagtcagacaaagtacctgtcctcaaagggcttatattgttaagagagaaacatactaaatctataagcagaaaaagtaacgtcatttcagatactgataagtgctatgactaaggcaagcccatttgatacaacgggctgggaggggtcacttcagatgctatagtcagggaaggccactgtagagaggagaccatgcaactgaaccacaggtgatgaaccacaggaaagcattaaattgtatccatgttaaagataagaaaataaaggtgcaggaagttaattgagttgtccgaggtcttacaactagtaattaacaaatcaggcttcagagctggctctgactcctaaaccctccttcttcagcactatgctagaggcaaagagatcttagctattacaggatctcccaccccatcttgccttcctgctatcctacaacagcctttctcaaattctactttgaactccttgctaattcctaaaaactgcttagaggcacaaaggggaaccccaccacctatcaacaggtttaaggaaagtaccaaatgtctttcaggaaacttcccaaacattaatgaatcatttacatgctgcttcacactttactacgtctgatgccttcccccttggaattttattttatttcgagacagagtttcactctgttgcccaggctagagtgcagtgctgcaatctcggctcactgcaacctccacctcccgggttcaagcgattctcctgcctcagcctttcgactagctgggattacaggtgttcaccaccatgcccacctaatttttctattttagtagaggcagggtttcaccatgttggccaggctggttttgaactcctgacctcaagtgctccacccgcctcagcctccaaaagtgctgggattacaggcatgagccaccacaccaagcctccccttaggaattttattacttatttacttattcattaagatggaatctcactctgtcgcccaggctagagtgcagtggtgcgatctcggctcattgtaacctccaccttccagttcaagcgattctcctgcctcagcctaccaagtagctggtattaaccccccttggattttttttttcttttttttgacggagtctcgttctgttgcccaggctggagtgcagtggcacgatctcggctcaccgcaacctcttcctcctgggttcaagcgattctcctgcctcagattcctgagtagctgggatttcaggtgtgcaccaccacgtccagctaattttgtagttttagtagacacagggtttcaccatgttggtttggccaggctggtctcgaactcctgacctcaagtgatccacctgcctcggcctcccaaagtgctgggattacaggcgtgagccactgcgcctggcccccctcggaattttatttggccctaaccactctgtgacgtttctggacaggaactaatcacctcagcttacagagaaaccgaagcacaaactgatgaggtactggtgttgcctaaatggctttgatcaaggtatttaaactagttggttctcaatttcccaaattttccataaagaaaaaagagagggcattgaaataataatccttaaagtcctatttgggaacaacatttagggaaataggtttgtcattgggtaaaaccttaaaaacatttaaaatgtttttcttgttctttttaaattcaatttgttttccttgtagctttggactatggctgagcagataactcaatttaacttccttaggtccttccatgatcatttattaattcaaaccactgaacctaatacaggtagaagattggtttctggggagaaactcctttaataacagcttggttagttgaaaagctgaattgcatgtaaagtagctacttaaatagcacacaaaaaagtctttcggttttcatacatgtgaagactataatttggacaagggaaaaactgaaagttacttgtactctctaaagttttcccagcaaagaaacaggaatacaattaatagaggatacatacttaaaatatatcttaagagaaaatttatgtattttgattcataattgtctcctaaggcctggtatactttgcttaggctcctagtctttagaaagcagcaataaaattacatttcttttaaaagtatttgtaattcagacttttattagccttccacttaatacgactgttttgtttttaaaaatttttttaatagagacaagtgtcacaccatgttgctcaggctggttttaaacaccaagcctcaaggggtcctcctgtctcagcctcccaaagtgctgggattacgacatgagtcaccatgccccgcccattttcaatcactacatttacttgttgtgactagttacagctttggacttgaaagaatgccaagctaagtcaaacaaaatgtgtctgcttggtaaaaaggaatctaaaagaaaaatatacatataaagaaaatgtggtcaagctcgttggctcagccctgtaatcctaaagaggccgaggcgggaggatcacttgaggctaggagttcgagaccagcctggccaacatggcaatatcccgtctctactaaaaacacaaaaattagccaggcatggtggtgggcgcctgtaatcctagctactcaggaggctgaggcatgagaatcggttgaacccgggaggtggaggctgcagtgagccaagatcctgccactgcactccagcctgggcaatgaagcaagactttgtctcaaaaaaaaaaaaaaaaaaagtaaaaaggaaatgtgtctgcattctttgatgttttctggctaaaaactattttttaaaaaaagcaattagaaacctacaattaccttgtttcttaagatttttagttaatatggcttgtgttgaaacatactcaactgaaataaaatggggaaaaaacacctctgaagagtagcgtatttgtttggtactttgaaaaaagccaaaacgctagaaacgggtttttcatctattctaatctccacttggaaaatactacctatacacagacataatgaagatttttttctttttctttcttttctaaatagtgatagggtttcaccgtttcccagtctagtctcaaatttgtaggctcaagagatcctccctccgtagcctctcaaagtattgggaatacaggcctgagccactgcgcccagcccacagtcaagatttagtcagcagtaataaatacctacgcagggagaggatgtgtgcttgtcatctgccttctggaaaattaaatacaggcacaaaggattcttcagctacatgtctgatcctgccctccacaatacccgtctacagggatgtttacagggatgtgttaatccccacgtaatggggattgcctattgaaataacctcccagtaaggatttttttgggcaaaatattctcgtttggcaatttcgacttactgattcttttgcaaagtcaacttgtttctgggcaaactttaaaaataaactcctaaggtagcatttagctagcagctagcacatcctaaatcgtgtctagatttaacttacacaatatgtgctttgcttttttcctaatttgcaacagaaaatagtaatcagctggtagtttcagaaatcacccttttgctgagtcttaaatttttttttattccagggaaacgtgaagattgtggggcgctatttttttttttaaagcaaaccacacagcatatctggccacctaaaacacaaagtgtttgaaactaaccgtaagatttcctttctgctcgcccaacctgtcactggaaacgcagtattcatttgtaaccagctttggagcagggcttttaaaaataacgttttcttgctaaagtccccaaaaatctcttgattcttggtggcaatgtccagttgagtctttgcacacactgtatttttgccaactgggtcgcaactttgcgagaactccgggggacctcgtaggaagccaggttggcagttatttttttctccacttgccactaggttgcactagatttaggatgctggggaatatgcgccatttaatttttaaaaataaagtaggaccatcacgtgacgagacccgagagaggaaaaaaaaaaagccgaagggacagggtttttcattgaaatcccgttcaaatcgccttccctccaaagcctgaaagagctgaattctattaaatcctggttggcaggttttttcctcgggtccacgtcacgagctcattctccgcttcaaggttcctttcgactccacaacgtgaagccagggggaaggcctccttaaactgggggttttcgccaaaaaagccagggtcaccccccgggaaagtccctatttaggggtttatcgggaggggactgagcctgacgaggctgcagggccgcgaggccccgccccccccggggttcccagcatgccccgcgcggacaggacgcggcggcggaggcggggcgaggaaggggcggggcgaagaggagagaagggcgtcggttttgcgacaggggcggtgcggtgcggaagcggaagtgaagggtgcgcttggcggcggcggcgggagctgcggagtcgggaatcaaaacaaagggcctggggggggcggggggaaggcggcggggccggaatgtgagcggaggtggagccggcggcagaggtgagtttgcagacagtcctgcgaccagaccccggcaggctctgctccgaggccagcggggcgggacggaggacagtgtcccctctttccccgcctattgctggtgggatggtggtggagaggggaggttagctaactgggacgcgccagttgggccccccacgaaagagttggcttgtctccctttcgggtccattcactactgtcactgttggcgccgctgttccccttcgagggcatttggctccccgcccgcccctgtctgacccctggtggggccctccaggagtgaagtgcacagctggaaggttaagagagaaggaaaggggcgggtgtttttgcaacacactcccccctccccggccgttttgcattctcctcggccttttagcaacacatagggtgtagtctcagggttgacaatgtctagggcttcagccactctcactagtagttgtaacgcgacctcgtgatacaccttttagagtttctcaagcacctttccggtattaccaagagctgtccaattgcatttgtgtcttttggacttctctgagcggtaaatattcttctcttttgcatatcggtgtattgaaacctaaactgttttcctatttattaagctttattcgttcaacagttatttattaaaatatgccaggcattgtactaaggacaggagttggaatagtggataagaaaacatagtctctgctgtcatggagtttatagcctaatgggggagaaagataataaaataagctaaaaaggccgttttggacagaagagctatgggggagaaaacggtaatgggatggggtggtgtggggtcaaagactagattgggtgctaaggaaacaacatttgctaaatgttccccgtggattacctcatgtaatccaaacaacggccttgtaaggtggtttctattattatcacacccattttagagatgggatctgaggttcagagaggttgtgagttgtccaaagctgcaccgcagtcaaattggagaccaaaatgcagacagtcgacagagcctatgctctcctcattgaattggtcaaaagacttgaagagagtgacagaaaggagactgtcgctcaagtcaaacagaacctgcttttggctacctaagttgcttcgtggatggtatttgggaagttttcagggtgcaggcacctgaaagtttttacttttaatcgcttgtattgagcagtattgaaggcaccttgatgtagtggaaaggggtgaacaagcctaatcttgtgtcaggctcgctacaaaacttcattaagtttctttttctctctctgcaaaaatgtagctaatttctcccctgtctatttcacaggattattgcaaaaattatataagaggatcccaccgtctgggtttttttcatcattatattccttgtgccaagcacaggcctgctgcatagtagatactaagtaaatatttgctgaatgaagacataagtaatgttaagtgaaaatactttataaactagattatactgtgaatgttagctcactttcaggatttggctttgaagaagtttgagagaatgtttaagttatgaacactgtgaatatcacagattcttacgattttgagaggagttttttgggggacataaaacctgtatctaataggaaagacaagaatcgtaatttactatcagtggtagcagttaaatccatctccaaattaaccactcccaatagtgtgtagtaggtaatgtttactttgtatttacagagtagggagcattttggttggcacaagagatacagtggtgaaaatagacagtggggttcatttatctaattttttttttctctgtaatgcagtggcggggagaaattagccacattttgcataggaggaaacagaaacttgaaaacaaaaatttttttagagatggaatctcactctgttgcccacgctgaagggccagtggcacaatatagttcactgtagcctcaaattcttgggctcaagagatcctcctacctcagtctctctagtagctgggactaggcgcatgctgccacactatgc

SEQ ID NO: 8725 - DNA, 46964 bp, Homo sapiens
  misc_feature (1)...(46964): n = A,T,C or G, or insertion/deletion polymorphism (see Tables 1-2)
tgacaaaccttccatcagagctaagggcctgtgtgtcctggggaaggctctccagggagatgcagccagggcccctctctctaacccgacagaggctgcctgccaccagggaagctggagggatggctagttccactcctgggcagcagttatctctctggggatgcagcatctgtgctcagggaataaagtttctccatgcagcccaaccaggtccaggctggccccttcccagagtcacccccactccattctgactctctctcaaaaactgccactgcctcctccccaccaggtatgttcctataaaattccctcctctttcaggaagaacctgtgcagcccctcccacacacataaatcacttacccttgacttttacatatgacacgtttaaacttatctctgaatgagtttattattattattattattattttgagatggagtttcactcttttgcccaggctggagtgaagtggcgcgatctccgctcactgcaacctctgccttctgggttcaagcgattctcctgcctcagcctcccaagaagctggggttacaggcgcccaccaccacacagggtggtggaggttcagcgagccgagatcctgcaactgccctccaccctgggcgacagagcgaaactctgtctcaaaataaataaataaatgaaaataaaaaaataaaaggagtcttctggccaggcatgatggttcatgcctgtaattccagcattttgggaagccaaggcaggaggattgcctgagctcaagagttcaagaccagcctgggcaacattgcaaaacaycttctctaccaaaaaaaaaaaaaaaaaaacccaaaaattagcagggtgtgatggcatgcacctgtagttccagctactggggaggctgaggtgggaggattgcttgagcccaggagggtggaggttgcagtgagccgagattgtgccactgcactccagcctttatttagacactctgtctaaataaataataaataaataaaagtaatcttctgactgttgtgttgagaaggaagtgggggaggggaggccaaggagacccacttagaaggatgttgaagtaatccaggagagagatgatgagggctcacagtgaaggcagtagttacctggagagggagctgtgagtggagagaggcctttcacaggaccccctgctagcaatatgtttcttgatttacctgtgtgatgactacataggtgtacttttttttttttgagagagagtcttgctctgtcgcccaggctggagtgcagtggtgtgatcatggctcactgcaacctctgcctctcgggttcaagtgattctcctgcctcggcctctggtacagctgggattacaggtgtgtgccaccacaccaggctaatttttgtatttttggtagagatggggcttcaccatgttggccagcctggtcttgaactcccgactcgaggtgatctgcctgccttggcctccgaaagtgctgggattacaggagtgagccaccacgcccggccagacatgtatgtttatttacttatgttctatttcacaataaaagaagaaataaagcaataacatgaggaacatagctataaatggctgggacacactggaatccaattctagcactctttatcctgctaatcgaacccaaggaataggccccaacccagctcacttatatccttgtgctgtagcctggagcaaaccttgtcatttctctcagcctcagagtttctcatctgtgaaaccaggaaaccactgactggctctttacttcactagggtgttgtcaagctcacagtgctttataaattgccagaaagcacacattatgattggtattttatggtttttgttttgttttgtttttttgagatgaaatctcattcttgttccccaggctgaagtgcaatggcacgatctcggctcactgcaacctccacctcccaggttcaagcgattctcgtgcctcagcctcccgagtagctgggattacaggtgcctgccaccatgtccggctaatttttgtatttttagtagagacagggtttcaccatgttggccaggctgatcttgaactcctgacctcaggtgatccgcccgcctcggcctcccaaagtgctgggattataggcataagccaccacgccaggccttattgtgtttttaaaacagctttcttaatatataattaatgtacaataaactgcacataaagtgtacaatttgatgaggtttttggtcttttttttgagatggagtttcactgttgttgcccaggctggagtgcaatggcacgatcttggctcatcacaacctccgcctcccaggttcacgtgattctcctgcctcagcctcccgagtaactgggattccaggcatgtgccatcacgcccagctaattttgtatttttagtagagacagggtttctccatgttggtcaggctggtcttgaactcccgaactcaggtgatccacccacctcagcctcccaaagtactaggattacaggcttgagccaccatgtctggccaatttgatgagttttaatacatgtatatacctgtgaaacaattaccacaatcaagataatgaacatattcctcacctccatgagtttccctgtactcctttgtaatctacccctcacttccctactgccatgttcccaggcagttagtctgcattttctagaattgtattttatttgagatgtgatgtcactatgttgctcaggctggagtgcagtggcctgatcatagctcaaccgtgttagccaggatggtcttgatctgcccgcctgggcctcccaaagtgctgggattacaggtgtgagctaccacacccggccacatttaaatatttctagttaatttttgtatatggtatgaggtaaggatcaaggtttagactaggcgcagtggctcatgcctgtaatcacagcactttgggaggctaaggtgggtggattacctgaggtcagaagttcgagattagcctggctaacacagtgaaaccctgtctctaccaaaaatatgaaaattagccgggcatggtggtgcacacctgtagtccctgctacttgggaggcggaggcagaagaatcacttgaacctgggaggcagaggtggcagtgagctgagatcacgccactgcactccagcctgggtgacagagtgagactccatctcaaaaaaaaaaaaactcaatatttatatttagacaggcatggtggctcacatctgtaagcctggcactttgagaggccgcggtgggaggattgcttgagttcaggagttcaaaaccagcctgggcaacatggcaaaaccctgtctctaccaaaacaacacaaaaatcagctgggtgtggtggtgcgtgtctgtagtcccagctactcaggaggctgaggtgggagggtggcctgagcccagaaagcagaggttgcagtgagtcaagatctcactactgcactccagcctggtggacaaggccaactctctctcaaaaaataaaaataaaaattaattaaatacatatttacattaaaatatttccagttgatttttgtatatagtgtgaggtaaggatcaaggttttttattttggattttgtctttccatatggctatccaattgcttcagcacacatttgtggaaaagagtatcctttctccattgaatctctttggcaacttcattgaacatcaattgatcatatatgtgtggatctatttctgttccattaatccatatatatttacatatttatgctaataccattaccgtagctttaaaataagtcttgaaatcacagaatgtaagttctcttttgttcttctttttcaaaatggttttggctattttaggtcttttgcatttccacataaatcttaaaatcagcttgttaattactgaaaaaaaaaaaaggctgctggggccaggcacagtggctcatgcctgtaatcccagcactttgagaggctgaggcgggcagatcacctgaggtcaggagttcaagaccagcctggccaacatggtgaaacctcatctctactaaaaatacaaaaaattagctgggcatggtggtgtgcacctgtaatcccagctactcaggaggctaaggcaggagactagcttgaaaccgggaggcggagattgcagtgagccgagatcacatcactgcactccagcctgagtgacagagtgagactccaccataaaaaaaaaaaaaaaaaagctgctggagttctgattggaactgcactgaatctgtagatctcttccttgcaggaggtttttttctgattaatcctggttgctccagcaacagtcctcaactcatcaatgagcccaccttaacttagaacaggaccagtttcactgcaggtccttaaacctgttgctgctccttaaacaccctgtgaatgtacacacctccagcctttgcacatgttatttccttttttttttttttttttgagacagggtcttgctttgttacacaggctacaatgcagtggcccaaacatggctcactgcagcctcgacctcccacgctcaagtgatcctcctgcctcagcttcctgagtagctgggactacaggcacacgccaccacacccagctcacttttgtatttgtggtagagacagggcttcgccatgttgcccagactggtctcgaactcctgagctcaagcgatcctcccacctcagtctccaaagtactgggattacaggcatgagccaccacacctagctctcattctctacttacgtctactgggctccaccatactcaccctcagctcaaatattacccctctatgaacatgtctctaacccatcccagaccctggctgaatcattcatttgcctgggtttcacaccactttgtcctcatctccctcacaggcacacagaacttttaattactagttaatatcacttaagtggccgttacttgtttatacatctttctcccctattagataaaactccttcaagcagggaccatattatttcttatattttgaattaaaccttttgagataatcatagattcatatgcagttcataagaaataaatacaaaagagatcccatgtacccttttcccagtttctcccaatggtaacatccttaaaaactttagtacaataacacaaccagaaaattgacactgatacaatccactgatcttactcaaatatccccagttttacatgtatgccgtgtgtgtgtgtgtgtgtgtgcatttgtagttaaagacatctttttactatttaaactttaacaatgacattaggacgttttggaagtaacgtagtaaaggcagttaagcaagctacttagggtatcgttggagcccagaagaagcacctagtccacttttggaggagtggtgatggtgagggaatggggaaggacgtcagaatatgccttggtcaaggcccgctactagtagctgctcaaataactgcgttaaattatgttgaacccaacgttattttccatgttttcttatgcaaatcctcgcatccctgagtgttccattattttcatatttatttggcaggtggaacattcgaggctgggagcccttacatgccccgcgagaggtcacgcagttaggaagtgacaggagcgaagtcagcccaagtctgctgactccaagcccagtgctctctccccctaatggcggtacgccgtgcacatatccttaccacgtatgcctcatccctattcggaactttgcctccaaccctcttcctgttttcttggctgtcttacaagggagccttttcaggcagcaactccagagagaaccgccagagcgtgcaacagcaaacactaaccagcccagccgtcagccacgcaatcatcactccctggcccagtgcgcggcagaactggcgcaagcgcacgccggcaggttgtacccagaatccgggcccttgccagacgggggcggaaccggaagtcgctgtacatctcatggttgctaagaaacggagcttccacaaaccagatagaggttctccagcttttctttgattgtctctgctttagcgtctctaaatccggtcaccatgtcggacyccgaaggcgagaccttgcgaagcacctttccctcttatatggscgaaggcgagcggctctacctgtgcggggaattttctaaagccgcgcagagcttcagcaacgtgagtcgagctctcaacctatccatcaccccatcacccgtcactttttttttttttttttttttttttttttgtgacggagtttcgctcttgttgcctaggctggagtgcaatggcacgatctcggctcgccgcaacctccgcctcccgggttcaagtgattctcctgcctccacctcccaagtagctgggactacaggcgcgtgccaccatgcccggctaattattttgtctttttagtagagatgggggtttcactgtgttggccaggctggtctcgaactcctgacctcgtgatccacccgcttcggcctcccaaagtgctgggattacaggcgtgagccactgcgcctgccccctgccctcaccttttgattgcagataacactgaggtcttgatgatgcctggaggaccctgttgtttctattattcactgatttttgatggacacactgctgtcacagataagccctgtggttggccattttctaccagttcccacttgcaatctccattctctgcgttaacagtgaccttttcctccacttttacttaaatgtttcatgattaaccggcctccttccacagagcagccttaccttcccatcatttgctggcagattggatgggaggttgcatgcagaagcctcaatgtccccagcacaccgttgcttataaaaggtggccagtaagcaacatatgattattattatcaattttgagacaaagttttgctatgttgcccaggctggagtgcagtggcaagatctcagctcactgcaacttccgcctccccaggttcaagcgattttcctgcctcagcctagggagtagttgggattacaggcatgtgccaccacgcctggctaatttttgtattcttagtagagacagggtttcaccatgttggccaggctggtgtcgaactcctgacctcaagtgatacacctgcctcggccccccaaagtgctgggattactgaggtgagctgctgcaccaaccagcaacattattatagtaaccctagtataaattgcatcatcccaccctaaggggattgggtgatggtttgttgttgttgttgttgttgttgttgttgttgttttggagacgtagtcttgctctgtctccaggctggagtgcaatggtgcgatcttggctcactgcaacctccacctcctggattcaagtgattctcctgcctcagcctcaggcacactgctaagcagactggatttttgttgttgttaagatggagttttgctcttcttgcccaggctggagtgcagtggcgcaatctcggctcaccccaacctccacctcccaggttcaagcgattctcctgcctcagcctcccgagtagctgggatcccaggcatgcaccaccatgctcggctaattttgtatttttagtagagacggggtttctccatgttggtcaggttgatctcgaactccccacctcaggtgatccccccccacctcagcctcccaaagtgctgggattacaggcgtgaaccaccccacccagtgcatactcaattttatagattaggaaatatacagaagttgagcaacatgcccaaggtcgctaaactagcaagtggcagaggaaggattcaaagccgggctcagactccaatgctgaggtgctaaccacaaaactacacatctgacatctgcataaggaaactgttgttttttttttgtttgtttgttttttcagagacaggatctcgttctgtctcccaagctggaatgtggtggcacaatcacagctcaatacagcttcaaactcctgagctcaagtgatcctcccaccttagtgttccaagtagctggagctacaggcttatgccaccacgcctggctaattttttcttttcttctttttttttttttttttgtagagataggtgttttgctatgttgccctggctggtattgaacacttgagctcaagtaatactcccgctttggcctcacaaagtgctaggattacaggtatgagatacagtgccctaaaaacatgtttttatgaccatttcttttgctccaaattgcccacttcttctgctccaaattgcccacttcttcttctagatggagtgataggataaccctgtagttttgagacttcctgtaagatcaagcttctcaacagctccccagagtcgtttgtccctttcagtcaccaaccacaccctaaaaccagaaatgatgaccagataagtgaacaattgagttcggtagccctgtccccacttattctcctcctgctggatcatgtcccatcctgaagtacccaccagcagagaaaaaagaacaccctgagggaagggtagccttggatgagaagcagtcactttccagaaagacagtagctacttcctcttcttagaaaagtaggaaggtcttagaaaggggtgggtaccaggagacagagggttgcagtgagccaagatcatgccattgcactctagcctgggcaacaagagtgaaactctgtctcaaaaaaaaaaaaaaaaaagaccaggtcagrtggctcatgcctgtaatcccagcactttgggaggccaaggcaggtggatcacctgaggtcaggtgtttgagaccagcctggctaacatggtgaaaccctgtttctactaaaaatacaaaaaatcaaccrgacgtggtggcgagtgcctgtaatcccagctactccggaggctgaggcaggagaattgcttgaacccgggaggcggaggttgcagtgagccgagatcgtgccattgcactccagctttggcaacaagagcaaaacgccatctcaaaaaaaaaaaattagccaggtgtggtggcgggcacccgtagtcccaggtactcgggaggctgaagcaggagaattgcttcaacccgggactcggaggttgcagtgagcagagatcgtgccactgcactccagcctgggtgacagtgtgagactctgtctcaaaaaagaaaaaggggggtgggtacagttagatgcctcaggaaggacagtacaccacagactatggtaatcatctcacacagaaaagaggacactgggagtggggatattgccctcaaccccactttagggtcaaaatcagtttcattttcctggcattttcttttttttttttctttcttgtttttcatttttcttttccctttctttcttttttctttctttctttttttttttttttttttttgagacagcgtctcactccatcacccaggctggagtgcagtggcatgatctcagttcactgcaacctctgcctcccaggttcaagcgattttcttgccttagactcccgagtagctgggattacaggtgcttaccaccatgtctggctaatttttgtatttttagtagaaatgggtttcaccacgttggccaggctggtctcaaactcctgacttcaagtgacccacccaccttggtctcccaaagttctgggattacaggtgtgagccactgcacccggcctctttttgttttgttttgttttgttttttgagacagagtctcattctgtcacccaggctggagtgcagtggtgtgatcatggcttactgcagcctcgacctctccaggttcaagcaatcctcccatctcagcctcctgagtagctgggactacaatcatggaccaccacgcccagctaatttttttgtatttcgtagagacagggttttgccatgttgcccaggctggtctcaaactcttgggctcaagcgttccgcccacctcgacctgccaaagtgctgggattacaggtgtgagccaccactcccagccttttcctggtattttcatcttaatccccggatatagtgattagttcttgattagctacataaaaagagaaggctactggaatggttaagccacatggcagattgtcctcaagtccacttcagaatgcttagcctttgaaatttgctttgagtatgatgtgttgccatttcaggtttgtagttgagtttggtgtgcacaaaataccctacagttctattgcctgaggggactgaggggctctcagacattggtggaaagtcagygtatccacagagcagcatattcctactcttcagccagtggcttccacaatagccatgatttgaccttgttcaaggtgagccatatgcagataatcaagttgactgagcgcagatcggagttgttctgcttaggagccagaggcctgtgtgctggcctgaagaatccccttgattcttcagagccttgatttcttcagagcctgaagaaatcccctctgcaggagggtttgggctgcccttcccactccagcttctaccttgctcttcatgctggctgtcaacctgactggtttctttgtcaggctctttaccttcaggatggagacaagaactgcctggttgctcgctcaaagtgcttcctgaagatgggagacttggagagatccctgaaggatgctgaggcttcgctccagagtgacccagctttctgtaaggtgactgcatgggyrggaggactggatcctgccattgcctgtagcaacttctggttacaagtagttgttacaagtagaaccagccagactgcctagtgtttgatgccattttctcttcctaggtcattgcctaagtccctgccccctgtattccaaccttgaccttcaacccaggacccttctgttccaccacatgtgagtcctataaggccttatctgttcacattgatttgatttcctcccattccaggggattttgcaaaaggctgagacactgtacaccatgggagactttgagtttgccttggtattctatcatcgaggctacaagctgaggcctgatcrggaattcagagttggcattcagaaagcccaggaagccatcaacaactcagtgggaagtgagtgaccacagggcctatgcccttatccaggaaggtccttggaatccttaggtttagaggaaggttgagtcacagcaggtgagcagccaccaccaggcccgcagggagtcctacayctggatttggctgctgcagtgttgttgaggattagccgggcatggtggcgggcaccacctgtctgctgggaggaccattccctgatgcacacactgatctctgagcgctgcagccttgggttttcctaaaggtcagattagaagggctgtttcaaagtaggcctgtctttagcctggtgtcaaaagctataatgcggtcctgagcccagccttctatagtccctggcttctttcctcaccagacgcataccaagggctggccttagccatcagcattatggcagggggagaagggaagcaagtgagagcaagtgagagcttgctctgtcggtggcaaggcctggaaatggacagtttcccctgcatccttggcctccctttgtttggaaatctggctgccatagccttgggctagcgggggctgttagctcctaggagttataccaaacagcctgcaccatttgcctgctaggctggcttagggccagctttgccacagcctccaccatccccctgccaaaggcagccatttctacataaaaatatgtgataagtcatgcctggggggtctggccgacctgagctccagcttctttccttgcaggtccttcttccattaagctggagaacaaaggggacctctccttcttaagcaagcaggctgaggtaagggccctggttctgtggttgtatccctccaagggaagaggctatgtgtgcctgagaaggggtcttgggagtctagctgcaacctgaccaggcatactccgtgactcttggcccacagaaaggtcctggagttggaggaatctgggatcacagaccctagggccatggctgggtacactctgctccttgctgaagctctgttgggtgttgctccattttctcagaatataaaagcccagcagaagcctcagcccatgaaacacctcttacaccccaccaagggagagcccaagtggaaggcctcgctcaagagtgagaagactgtccgccagcttctgggggagctctacgtggacaaagagtatttggagaagctcctattggatgaaggtttcggacactttgttggcacggggccttgggggaaaggaaatctgggtggatgcttcatgcatgagctgaaggcagaacctgtcatataatattagctgacgtgtacctgtggacaggttttattagcattctcattttacagatgaggaaactgaggcgcagaccaacagaaactaaggtcatatataggtaggcaatgacatggcttatattcgaatccaggaagtccaattttagagcaatgctcctaagtgctatggtaccctgggagggaacaacagagatttggtctcctttaccaccatagtccctgaagggacatcccctttgccttcaatccttacaatgggcaaaggaatccagcggatatgtgcttaaatccgaggatattagttctagaatgctctgaaacatcatctggtccaagttctccttttgtagataaggaaatagagaccctgattgggaaggaactttcataagttgacaaacaagttcatggtggagtcaacatcagaacccaggcctctgacctccagtccagtgctctttcttttaaagacagagtcttgctctgtcacacaggctggagtgcagtgaagcaaattcggctcactgccacctccacctcctgggttaaagcgattctcctgcctcagcctccctagtagctaggactataggcgcccacaaccacatccggctaattttttgtatttttagcagagatggggtttcaccatgttggccaggctggttttgaactcctgacctcaagtgatctgcccacctcggcctcccaaagtgctgggattacaggtgtgagccactacacctggccagtccagtgctctttccaccacactgctgccagtgacaggatgaaggacagaagcctgagatgaatgtcccacatcaacatggggatgggagtattgccattagctgataagcctgagcagggtcacctgtgaatcaaatgcctcttctccagaattggcttcccaaggtcatgtgtagggttccctgttctgtgacacaggaacagcttcactgctggcacatctccttagcaacaggcctgaatgcctcctattctccagaggacccgctgcggagggaagaggtggcttgaatattacctcaagtggccttgtagctttgcttctggctgtaacctctggccaggcagtgggcaggacttgggcacccgccttccagcttccagcatgcacaggcccactgggcacctgggaaatcactgggcactggcagcctgggccagatcgtgcatttagactcagtgttatctgaggacacagcttgaactggggaagccccgaggcttctcagcgagccatccaccagctgccccttctggctagctcctcatatcttgccataaggggcccatagcatggaactccctgatagtggggctctggctgcctcctggcctggataaacccactctgccactatgcgcactcacactcctctctgtttcaacaactccaagcagagcaagttcacagagggccctgcagcggccaccgggaggaaacaggaggcaaatcccttagaggcctgttctccttggcgcctcctcacaccccttccccacagacctgatcaaaggcaccatgaagggyggcctgactgtggaggacctcatcatgacgggcatcaactacctggatactcacagcaacttctggaggcagcagaagccgatctacgccagggagcgggaccggaagctgatgcaagagaaatggctgcgggaccacaaacgccgtccctcacagacagcccattacatcctcaagagcctggaggacattgatatgtgtaggtgttgttctcagagggtggggcaggtgcctccagtgccttatcaggtggggaaggagcaaccaggtgtctgagcccctggtctctcagacctgcagatggtgtctgcaggaagaggagttaccctgtcagctaagaggaggctgccctggcctccacagmacccctttcctttctcagtgctcacaagtggcagtgctgaagggagtcttcagaaagctgagaaagtgctgaagaaggtactggaatggaacaaggaagaggtacccaacaaggatgaactggttggaaacttgtatagctgcatagggaatgcccagattgagctggggcagatggaggcagccctgcagagccacagaaaggacctggagatcgccaaggaatagtgagtgccctaggggaggccactggcgtgagcctacggagaaggacacctggggctatctgaggcccttgccagggctgctggtggcttgactcccattttctgctctgcatgcctgaggtagattctcctggaggtggggaccacctgcccaggactgagggtgggggcacctagactgttagcttttttgccaccaaaagggtagtggctcaaaattccaaaaagctacccaatgatctggctcttagggatgtttatattcttacatcagcttaacgagcatgcatgaagccccagacatgccagatgctgctagtgtgggaacacagtaataaccagacacaagggccatttccctgcagatgtcaagcaaaaagggacatagctaattaattgcaattgtgataagtgccatgaaagaaaagtacaggatccagtgtggtgagaaatacattccaggaggacttgatgacattggggaacacacagggcctatggaaaggccctgagacaggagggtacttaagcctggagagcacagcatattgccagggagaggggccaagaggaggctgaaggaagtgggcaggggatggatcaagcagggtcttttaaaaccggtgctgatcaagagcacgggctgtggagtcaggcaracctaggctgtggaacttgcaccgcccagccgtggaacctgagataagccacttkagctccctcagcctcagggtctcctcctgttagctgggcaccctgtagggcagaagggaggatgaaatrcagaagtacctgtgcagaccttaggacagtgcctggtatccacaatagtagtaacaccagctctccagaaatgagatcttctcaagacttgctgacttccacccggaggttccatcgctttctcagcatcctggttctaccctttggagtcattcttgacttcctcctgcctggtttctacccatctcaccagtctgagcctccttgatctcccatcatcccatttgccctcacagtgcccagccctcagccgacctgagtcctrctgcttcccctgcctctgctgtctctctccagctcctcccacaaatctccagagacacatgctatgaactctccctcccctgctcacaagtgggcctgggcccctcactgcctgcaggttaaaggtcaagcccctttgcttggccctcaggccctctctaaacccaccctggccctcttatagcaatcttcccttggggtcaaacgttcctgaacattcctgcctcctgccctttcctcttcactgatccaagccccatatgctttccattcccagttcatttctcgcctgcctccactgtgctgagcaggaatatcccatactggccatcccatattagaaaaaaatagctttagggacagacctgtcttcgatccctgtcttctaactggctctgccacttagaagctgtgtggatttgattaagttgctcctctactcagtttcctcatctctaatgaaggcataataataccaacccacagggactgtggggattagatgtgatgtatatatatggtaccttggatccaaccatctcccatgcacaaatgagttagaaatctttacttctcgccagacctctctcctgagcctcagacctgtgtgtccagcagattctaagacatttccatctggatgtcccacaggaatcctaaacttaacatgtccaaatcggaatcccttatcttcctcccaaacttacttcttgagggttccccatccccgaggatagcactgttggccactgagtcccaagccagaagaccggaggcttcccagatacctccttcccctctctgtttttgccatatcgctcaagttggtctggatgayaggcgtgagccactgcgcttggccccctcactgttcatgcccagcaatggccatgtcttgtcctgtccatactttctctgtttccctcccacaactcagtccagaccatccttacttcttgcctgtttcctctgacctgggcttcctacagttcagctgtcctttctctgaaaaacaactcctgtggttgggatgaaatttcaatgccctgctcaacacaggttgcccttcttcacttgacttctcctggcctgtcttgacctggctttctccaggcccccaggcattctgggccccagccagtgcagagctctgtgcatatcctccagccccaggaatgctttcccttttcccagcacttgctttatcaagctgccgccacccattcttcaacatttcaataaaggttgaaaagcctgcctcctagcctgagcggtggctcacgcctgtaatcccagcattttgggaggccaaggtgggtggatcacgaggtcaggagatcgagaccatcctggctaacacggtgaaaccccatctctactaaaaatacaaaaaaaattagccgggcgtagtgttagccgggtgtggtggtgtgcgcctgtagtcccagctacttgggaggctgaggcaggagaatggcgtgaacccaggaggcggagcttgcagtgagccgagatagtgactgggcgacagagcgagactccgtctcaaaaaaaaaaaaaaaaagagagaaaagaaaagcctgcctgctgccccaggggttacaaatccctcccctaggctccctctccacaggtagcctttctgtcctgttagactttggactttggaaggtgctattcccagcatctgccacacagtgggcatgtaatgaaygtgtgctaagtgactgaataatttgagatggagtttcactcttcttgcccaggctggagtgcaatggagtgatctcggctcactgcaacctgcaacctccgcctccctggttcaagtgattcttctgcctcagcctcccaagtagctgggattattggcagcccggctaattttgtgtttttagtagagatggggtttcaccatgttagccaggctagtctctaactcctgacctcaggtgatccgcccacctcagcctcccaaagtgctaggatgacaggtgtgagccaccatgcccggcctattagtttttaacatccacaaatgagcctcacccaggcttactccagtcttccttgtgagtcccatgtgctccaggagctccctcattctaatcagccacttgctagattagccacttactagtctaagtggttttttcagtgcccacggcactcatttatttctctgaataatctataaattatttgatcacatgctttatttttgctattatgatttttagtacatattgttatgaaaaatggacatattacagcttattcactcattcaactcgccagaacagagtacccactctagaagaggggatccactccgacgggctgtgacagcagcaggtgcacagtgtggcccaggggccaaggagacaggcaggtgggagcttggcaggggcctcagggaaggcagcagggtcagcaaggtgggcaagggggagggagaaggggaccttgggcagggcagaaagatgtggcagggatggaggacttggagaaccataggtaggttaggtgtggcagggctagggaccagggcctgcaggcagtgggaggtctggatgccatgcctcgaaaccggttcagccctcaggcactgaggcccagtgtttttgtgtgtgtgttttgttttttttgttttgttttttagcaacagggtattgctctgctgcccaggctggagtgtagtggtgcaatcatatttcactgcagcctccaactcctaggcccaagcaatcttcctacctcaccctcctgagtagctgggtctactggcatgaaccattgtgcccgcgttttgtttttacacaagtactataatgtcaggcttgcaggcttgaaccagaactgcgtggtactgagagcaaaacctgaaagttgtcccccgcaacccacttcccgtcacttcccaggatgatgttgttggaatgtgtcctctggctccttttcaatgtgtttacctacatactcatgtacatatgcaggattttttaaaaccaaagcagttccttgctatttttttatttttttaaaaaagaatatgtcttcctctcaaatataaccacaggccaagcacagtggctcatgcctgtaattccagcactttgggatgtcacacgtgtccatgtgaagagaccaccaaacaggctttgtgtgagcaacaaggctgtttatttcacctgggtgcaggcgggctgagtccgaaaagagagtcagcaaagggtggtgggattatcattagttcttataggtttgggataggtgtacaaaatacattcttaagggagggggagaatattacaaagtaccttcttgagggtgagggagaatatatcgtatcagggtggagcaggaacaaatcacaatggtggaatgtcatcagttaaggctattttcacttcttttgtgattcttcagttacttcgggccatctggttgtatacgtgcaggtcacaggagatatgatggcttagcttgggctcagaggcctgayatgggaggcttaggcaggaggattgcctgagaccaggagtttgagaacagcctgggcaaattagtcagatgtggtttcttgagcatatagacctagttactcaggaggctgagtcaggaggatcccttgagcccaagagtttaaggctgcagggaactatggaggccaggggtttgagaccagcctaggaaacgtggcaaaactccatctctattaaaaatacaaaaactgttgggaggccgaggcgggtgaatcacgaggtcaggagttcaagaccagcctggccaacatgaagaaaccctgtctctactaaaaatacaaaattagccaggcgtggtggcacatgcctgtaatcttagttactcagggagctgaggcaggagaattacttgaatcctggaggtgaaggttgcagtgagctgagatcgtgctattgcactccagcctgggccacaagagtgaaactccgtctcaaaaaaaaaaaaaaaaaattagctgggcgtggtggcatgtgcctggagtccctgctactcagtggctgaggcatgagagtcacttgaaccccggaggcggaggctgcagtgagccaagattgtgccaccgcactccaacctgggtgacacagcgagactctgtctcaaaaaacaaacaaaccccaaacacacatacaccacacacacacacacacacacacacacacacacacacacacacacacacaccccgcatacacagaaattgcctttcttagagcactgataacatttagattattttttttggccaggtgcagtggctcacatctgtaatcccagcactttgggaggccaaggtgggtagatcacctgagatcaggactttgagaccagcctttccgacatggcggaaagcttgtctctactaaaaatataaaaattagctgggtgtggtggygggcacctgtaatcccagcaactcaggggctgaggcaggagaattgcttgaacccggcaggtagagttgcagtgagccaagatcatggcactgccctccagcctgggcaacagagtgagactctgtctcaaaaaaaaaaagtaattatttttaatgcttattattataaactgtgctttaatgactgttcttgtcacattatctttttgaggtagattcctagaaaggcaattgctggttcaaagggacatctttgcaagctgttgattgattactctccagaaaagtcctgataatgttcattcttggccccagggcacagatgtgccacatccttgctgggctggacattgtccctccaactgaaaccctgagtttctgaggccagggctcctgtctttgccttctttcctatttccacagtgcctagaacagctgatttctagtgaatggcttgttttgcttcttccccacagtgaccttcctgatgcaaaatcgagagcccttgacaacattggcagagtttttgccagagttgggaaattccagcaagccattgacacgtgagtgaccaagaattgcctcttccccacctccatggttagaacttctcaccataacatgaaaatttgtttccggtaataagaatccagcctgggcaacataggaagactccctctctacaaaaaaaaaaaaaaaaaattagccgcgcatactgtcctgtgcctgtggtcccagctacttgggaggctgaggtaggaggattacatgagcctgggaggttgaggctgcagtgagacatgatcacactactgcactccagcctagacaatatgttaccagtggaaggtatccaagttattgccggtgaatctgtacaggtctgcagcaacctcaattcttgcctcctcagaagaaagaatttgaatgaggaatgggaatttattaaaaagctaggccgggcgcagtggctcatgcctgtaatcccagcactttgggaggccgaggcaggcggatcacttgaggtcaggagttcgagaccagcctggccaacatggcaaaaccctgtctctactgaaaaaatacaaaaattagccgaacacgttggcacgtgcctgtagtcccagctgctcgggaggctgaggcaggagaatcgcttgaacccggaaggcggaggttgcagtgagctgagatcatgccgctgcactccagcctgggcgacagagcaagatacagtctcaaaaaaaaacctttagggcaggaaagaaaggaacgtatacttggaagagacccaagtgggcactgagaaggacaaatgcagtgttggtgtttaaccttgatcctaggactttacaaactggcccctttcccctgattcttcccttagggttggctgcccatatgtgcagtgccctccttacccttgggaggtgagcacgcacagtgtgttgaggaagtggcatgcatgcttatctgaggctttcttcctctcaccagtggagtgccccccgaaggtcaagctccaccattttgtctcttaatgtgcatgcctgggaagttgcttctccctggcacctacattcagttaacactttagtgcgacagctgtggaccatcaggaaatgccctctccatgacactggctgccaatttatcacttttttttgtttgtttgtttgttttgagacggagtctcactctgtcacccaggctggagtgcaatggcacaatctcagctcactgcaacctctgcctctaggttcaagcaattctcctgtctcagcttcccgagtagctggcactacaggcgcccgccaccacgcccagctaatttttgtatttttagtaaagacgaggtttcaccatattggtcaggctggtctcaaactcctgacctcaggtgattcacccgccatggcgtcccaaagtgctgggattacaggcgtgagccaccgcacccagctcaatttatcactattttattttatgttatgttatgttgtttttatttttattttatgttattttatttttgagaaggagtctcactctgtcacccaggctggagtgcagaggcgtgatctcagctcatggcaacctccaccttccaggttcaagcgattctctcctgcctcagcctcccaagtagctgggactacagttgtgtgccaccatgtccggctaatttttcttttcttttttttttttgagacggagtctcgctctgtcccccacgctggagtgcagtggcgtgatctcggctcactgcaagctccacctcccgggttcacgccattctcccgcctcagcctcctgagtagtggggactacaggcgcccgccaccacgcctggctaattttgtatttttagtagagacggggtttccccgcgttggtcaggctggtctnnnnnnnnnnnnnnnnnnnnnnnnnnnnnnnnnnnnnnnnnnnnnnnnnnnnnnnnnnnnnnnnnnnnnnnnnnnnnnnnnnnnnncatgagccactgtgcccgggtgtgcattttccaaattaatattttaataataagcgcaggccaggccgggcgcggtggctcacgcctgtaatcccagcactttgggaggcagaggcgagcggatcacaaggtcaggagttcgagaccagcctggccaacatggtgaaacactgtctctactaaaaaaaaagaaaaaaaatacaaaagttagccaggcatggtggcgtgcacctgtaatcccagctacacaggaggctgaggcaggagaattgcttgaacccaggaggcgaaggttgaagtgagccgagatcacgccactgcactccagcctgggtgacgcagcaagactctgtctcaaaaaaataaataaataaaaaataagcacaggccaggtgtggtggctcacgcctgtaatcccagcactttgggaggccgaggtgggcggacctcctgaggtccggagttcagaccagcctggccaacgtggggaaaccccgtccctattaaaaatgcaaaattagccaggcgtggtggcacactcctgtaatcccagctactcaggaggctgaggcaagagaatcacttgaatctgggaggcggaggttgcagtgagctgagatggcgccactgcactctagcctgggcaacaagagcgaaactctgtctcaaagaaaaaataaaataaaataaaataaaataaaaataaaatggctgggtgcggtggctcacgcctgtaatcccagcactttgggaggctgaggcgggtgatcgcctgaggtcgggagttcaagaccagcctgaccaacatggagaaaccccgtttctactaaaaatacaaaattggccaggtgtggtggcacatgcctgtaatcccagctacttgggaggctgaggcaggagaatcacttgaacccgggaggtggaggttgcagtgagcagagatcttgccattgcactccagactgggcaacaagagcaaaactccatctcaaaaaaataaataaataaaaataaaaataaaaaatattaatttggaaaatacagaaaaatagagaaaagtattcagtctcaccacccaaagacaagtactaattctaatcctactcttttattgatactgtgttttttcattccaatcttttttgttttgatttttctctcatatattcttagtaatttttttctttctttccttttttttttttttgagacagggtctcactttgtcacccaggtgggagtgcagtggcacgattatagctcwctgcaatttcaacctctcaggcttaagcgatccccctaccttagcctcccaagtagctgggctacaggcgcacaccactgtgcctggctaaattttgtatttttttgtagagatggggttttgccatgttgcccaggcttgaactccttggctcaagcaatccacccacgttggcttcccaaaggctggggttacaggaatgagccaccatacttggtaataatattcttaaacattatttatgttgtgtgtatgtgtgtgtgttttgagatggagtcttgctctgtcacccaggctggagtgcagtggcataatcttggctcactgcaaccttcacctcccgggttcaagtgattcttctgcctcagcctcccragtagctggactacaggcgcctgccaccatgcctggctaatttttgtatttttagtagacagacagggttttgccagcttgtctaggctgatctcraactcctgacctcaggtgatctgcccacttcagcctcccaaagcgctagagacatgagccaccacgccagcctcaactgttgtattaaattccacattccataggtgttaccaaaatagtctcagtagtcttaaaatatctttatgcttatgaactccacccttgtatccaaaagaactggtagctggagaacaagttttattccgccacccagcaggaagccttggcatcctgtggcccagtgcatggttttgggggatgaagctgactctggttcttcatgtccccaggtgggaagaaaagatccctctggcaaaaaccaccctggagaagacctggctgttccacgagatcggccgctgctacttggagctggaccaggcctggcaggcccagaattatggcgagaagtcccagcagwgtgccgaggaggaaggggacattgagtggcaactgaatgccagtgttctggtggcccaggcacaaggtatgggctcagagatgaccaccctaccttttccagccttcrggcccagctcacaccagggctaggagtcttgtggactgagtttaccatcccagtgtttctccttcccagattattctgagagtggggataagccactctattttgaccagcacgtggtaagtgctttcattaagcaaagcttggttagagcttggggtaccttgagcctacctctgcccttgaggaggtcagctgcagacccacacagcatcgtgtcatcctcacaacagtgcccatgtattgagccactttccttctgccttggtactttttttttgttttgtttcattttgtttttgagacagagtttcgcttttgttgcccaggctggagtgcagtggtgcgatctcggctcattgcaacctctgcctcccaggttcaagtgattcttctgcttcaggctcccaagtagctgggattacaggcgtctgccaccacacctggctaattttttgtgtttttagtagagacagggtttcaccatgttggctaggctggtctcaaattcctgacctcaggtgatccaaacgcctyggcctcccaaagtgctaggattacaggcgtgagccaccatgcccggccctgttttgttttttgagacgaagtctcactakgttacccaggctagactgcaggggcacgatctcagctcactgcaaccttggcctcccgggttcaagcrattctcctgcttcagcctccagggtagctgggattacaggcgcgcaccaccacacccggctaatttttgtatttttagtagagacggggtttcaccacgttggccaggctgttctcgaactcctgacctcaggtgatccacccgcctcagcttcccaaagtgctgggattacaggcatgagccaccacacccagccagcattcttgtattgaatcattatgatgtaggtaggcattatcatccttattttagagatagggaaactgaggcacagagaggtccagtagactccccaagtcctatgagggaagctttttttttttttttgagatggagactcactctgtcacccaggctggagtgcagtggcgcgatctcagctcactgcaacctctgcctcatgggttcaaatgattcctgtgcctcagcttcctgagtagctgggattacatgtgtgcaccataatacccagctatgtctttgtatttttagagacgcagtttcactatgttggctggtttcaaactcctggcctcaagtgatccacccacctcagcctaccaaagtgctgggattacaggtgtgagccactgcgcctggccgaggaaaccttttattttttaatttattttatttctttatttttattttttgagatggagtcttgctgtgtcacccaggctggagtgtagtgacacaatctcggctcactgcaacctctgtctcctgggttcaagcgattctgctgtctcagcctcccgagtagctgggattacaggcgtgtgccaccactcctggctaatttttttgtatttttgtagagatggggtttcaccatgttggtcaggctggtctcgaacttctgacctcaagtgatctgcccgcctcggcctcccaaagtgctgggattataggcatgagccactgcacccggcctccaagggaacctttcagagtgatggaaatgttctaaaatgggattgtggtggccactgtacaactctgtaaattttcttcttttttttttttgagatggagtcttgctctgtcacctagactggagtgcagtggcacaatcttggctcactgcaacctccgcctcccgtgttcaagctattctcctgcctcagtctcctgagtagctgggattacaggcgtgcgccaccacacytggctaatgtttgtatttttagtagagacgggatttcaccaagttggtcaggctggtcttgaactcttgacctcgtgatctgcctgcttcagcctcccaaagtgctgggattacagttgtgagccactgtgcccggcctcaactctgtaaattttctcaaaatcattgaactttatccttacaagccggtgaactttatttatttatttttttgagaaggcgtctcactctgttgcccagtctggaatgcagtggcgcgatcttggctcactgcaacctccgccnnnnnnnnnnnnnnnnnnnnnnnnnnnnnnnnnnnnnnnnnnnnnnnnnnnnnnnnnnnnnnnnnnnnnnnnnnnnnnnnnnnnnnnnnnnnnnnnnnnnnnnnnnnnnnnnnnnnnnnnnnnnnnnnnnnnnnnnnnnnnnnnnnnnnnnnnnnnnnnnnnnnnnnnnnnnnnnnnnnnnnnnnnnnnnnnnnnnnnnnnnnnnnnnnnnnnnnnnnnnnnnnnnnnnnnnnnnnnnnnnnnnnnnnnnnnnnnnnnnnnnnnnnnnnnnnnnnnnnnnnnnnnnnnnnnnnnnnnnnnnnnnnnnnnnnnnnnnnnnnnnnnnnnnnnnnnnnnnnnnnnnnnnnnnnnnnnnnnnnnnnnnnnnnnnnnnnnnnnnnnnnnnnnnnnnnnnnnnnnnnnnnnnnnnnnnnnnnnnnnnnnnnnnnnnnnnnnnnnnnnnnnnnnnnnnnnnnnnnnnnnnnnnnnnnnnnnnnnnnnnnnnnnnnnnnnnnnnnnnnnnnnnnnnnnnnnnnnnnnnnnnnnnnnnnnnnnnnnnnnnnnnnnnnnnnnnnnnnnnnnnnnnnnnnnnnnnnnnnnnnnnnnnnnnnnnnnnnnnnnnnnnnnnnnnnnnnnnnnnnnnnnnnnnnnnnnnnnnnnnnnnnnnnnnnnnnnnnnnnnnnnnnnnnnnnnnnnnnnnnnnnnnnnnnnnnnnnnnnnnnnnnnnnnnnnnnnnnnnnnnnnnnnnnnnnnnnnnnnnnnnnnnnnnnnnnnnnnnnnnnnnnnnnnnnnnnnnnnnnnnnnnnnnnnnnnnnnnnnnnnnnnnnnnnnnnnnnnnnnnnnnnnnnnnnnnnnnnnnnnnnnnnnnnnnnnnnnnnnnnnnnnnnnnnnnnnnnnnnnnnnnnnnnnnnnnnnnnnnnnnnnnnnnnnnnnnnnnnnnnnnnnnnnnnnnnnnnnnnnnnnnnnnnnnnnnnnnnnnnnnnnnnnnnnnnnnnnnnnnnnnnnnnnnnnnnnnnnnnnnnnnnnnnnnnnnnnnnnnnnnnnnnnnnnnnnnnnnnnnnnnnnnnnnnnnnnnnnnnnnnnnnnnnnnnnnnnnnnnnnnnnnnnnnnnnnnnnnnnnnnnnnnnnnnnnnnnnnnnnnnnnnnnnnnnnnnnnnnnnnnnnnnnnnnnnnnnnnnnnnnnnnnnnnnnnnnnnnnnnnnnnnnnnnnnnnnnnnnnnnnnnnnnnnnnnnnnnnnnnnnnnnnnnnnnnnnnnnnnnnnnnnnnnnnnnnnnnnnnnnnnnnnnnnnnnnnnnnnnnnnnnnnnnnnnnnnnnnnnnnnnnnnnnnnnnnnnnnnnnnnnnnnnnnnnnnnnnnnnnnnnnnnnnnnnnnnnnnnnnnnnnnnnnnnnnnnnnnnnnnnnnnnnnnnnnnnnnnnnnnnnnnnnnnnnnnnnnnnnnnnnnnnnnnnnnnnnnnnnnnnnnnnnnnnnnnnnnnnnnnnnnnnnnnnnnnnnnnnnnnnnnnnnnnnnnnnnnnnnnnnnnnnnnnnnnnnnnnnnnnnnnnnnnnnnnnnnnnnnnnnnnnnnnnnnnnnnnnnnnnnnnnnnnnnnnnnnnnnnnnnnnnnnnnnnnnnnnnnnnnnnnnnnnnnnnnnnnnnnnnnnnnnnnnnnnnnnnnnnnnnnnnnnnnnnnnnnnnnnnnnnnnnnnnnnnnnnnnnnnnnnnnnnnnnnnnnnnnnnnnnnnnnnnnnnnnnnnnnnnnnnnnnnnnnnnnnnnnnnnnnnnnnnnnnnnnnnnnnnnnnnnnnnnnnnnnnnnnnnnnnnnnnnnnnnnnnnnnnnnnnnnnnnnnnnnnnnnnnnnnnnnnnnnnnnnnnnnnnnnnnnnnnnnnnnnnnnnnnnnnnnnnnnnnnnnnnnnnnnnnnnnnnnnnnnnnnnnnnnnnnnnnnnnnnnnnnnnnnnnnnnnnnnnnnnnnnnnnnnnnnnnnnnnnnnnnnnnnnnnnnnnnnnnnnnnnnnnnntcgagaccaggctgggcaacatggtgagaccctgtctctattaatttaattatatatatatatatagagagagagagagagagagacagggtctcactctgtcacccaggctggagtgcagcagtgcaatctgggctcactgcaacattgaccttctgggatcaagggatcctcccatctcagcctcccgagtagctgggactacatgcatgcggcctcacacccagctaattttgtatttttggtagagatcgggtctcactatgttgcccaggctggtcttgaactcctggttcaagtgatccgcctgccttagcctcccaaagtgctgggattataggtgtgagccaccgcacctagcctatgtatgtatgtatttatttttaattaattaatttttttgagacagtcttgctctgtcacacaggctggagtgcagtggcgcgatctcggctcactgcaacctctgcctctgaggttcaagcaattcttctgcctcagcctcccgagtagctgggtttacagtcgcccgtcaccatgcctggctaatttttgtatttttagtagagatggggatgtcaccatgttggccagggtggtctcgaactcctgacctcaagcaatccgcccaccttggcctcccaaagtgctgggattacagacgtgagccaccacgcccggcctgacatatgtatttaattttttaaaatgaaatgaagctctgagggctcaaatcaatcactcaatcaatctgctaatcatttcagtcccagctccagcactaattggcacggagagcccagatgagccgctttttctacgggttcagattgtacctgagtggggcctggactcgagacagctgaggttccagcagctggcccatggattgcatccagccctctgtgctttggtctgcatatcatttttgaaaaaaatgaatgaccatttaaaaaatatgaatttctggccgagcggtggctcacacctgtaatcccagcactttgggaggccgaggcaggtggatcacctgaggtcagggtttaagaccagcctgaccaacatgacgaaaccccatctctacttaaaaaacaaaattagccaggtgtggtgtcatgtgcctgtaatcccagcttctcaggaggctgaggcaggagaatcgcttgaacctgggaggcagaggttgcagtgagccgagattgccccattgcactccagcctgggcaacaagagtgaaactctgtctcaaaaaaaaaaaaaaaaaaattcgtcttccagaacaatctaaagatggagcaggatgcggttttctcctccactctggagacatatgatgtatgcactagactgcaccacagtccccttctctcaccaacgcctttgaatgaggcccaggttcctcagtcctggttctcgatggtgacatagcccaggaacacggtggaaaggatggtgctgagcagctcagtgatgcttccctggggcctgggtccgactacagctcacacaagcttctgatgggccctggcagtgctcgagtagccagaggctccatcatgcaccacacgttgtcacactctacctgtgttgtgccttctccccttgctctccagtgaagctgagagacttcgagtcagccgtgaacaattttgagaaggccctggagagagcaaagcttgtgcataacaacgaggcgcagcaggccatcatcagtgtgagcctttccacccgccgggcttcgggtgtcaggagtggggttgggtggtcaggccttcagttccccctcagcctgcttgggcgccattccacagccgtttttttgtttgtttgtttatttgttttgagacagagtcttgctctgttgcccaggctggagtgcaatggcgtgatctcggctcactgcaagctccgcttccgggttcacaccattctcctgcctcagcctcccaagtagctaggactacaggcgccccccaccacgtctggctaattttttgtatttttagtagagacagggtttcactgttagccaggatggtctcgatctcctgactttgtgatccgcccgccttggcctctcaaaatgctgggattacaggcgtgagccactgtgcccagccagaaacaaaaattttacaaaatatatttacctctgctacgtactctgcatgctgatatttcctattacattctgttttcttatttttatttatttatttatttattgagacagggtctcactcccgttggccaggtcagaatgcagtggcactgttatggctcattgcagcctcgacctcctgggctcaagttatcctcctgcctcattttaaaatttttttgtagagatgaggtctcactatgtcttgaactcctgagctcaggcaatccaccctcctcagcctcccaatgtgctgggattacacgtgtaaactgtacttagctttttttttttttttttttgagactgagtctcacttgtcacccaggctggagtgcaatggtgtgatcttggctcactgcaacctccgcctcccgggttcaaacgattcacctgcctcagcctcccgagtagctgggatcacaggcgcccccccaccacgcccagctaatttttgtatttttagtagagatggggtttcaccatgttggccaggctggtttggaactcctgacctcaaatgatctgtctgcctcggcctcccaaagtgctgggattataggtgtgagccactgtgcctggccataatttttgtatttttaatagagatgggatttagccatgttggccaggctggtctcgaactcctgaccttaggtgatctgcccgcctcggccttccaaagtgatggtattactggtatgagccaccatgcctggccttttttttttttttttttttttaaatagagatggggccatgtatggtgggacctagcctgggacccaacgtgttgctgggactcggcaacatggcgaaaccctatctctaaaaaataaaaaaaattagccgggtgtggtgactcactccagccacttggaaggctgaggtgggaggaccacttaagcctgagaagttgaggctgtaacaaggagtgatctcacccctgcactccagcctgggtgacagagcgagaccctgtctctaaataaataaataagtagagacggagtctcagtatgttggccaggctagtctcaaactctttgcctcaaatgattctcctgccttgacctgccaaagtgctgggattacaggcatgggccactgtgcctagccttattttcttattttctttttgctttttatgtatttatttttagacagagtgtctctctgtcacacagacttagtacagtggtgagatcatagcttactgtaggcttgacctcctgggctcaggcaatcctcacaccttagcctcccatctagatgggactacagatgcatgtcaccatgctgggggctaattttttattttttgtagactcagggtcttactctgttacccaggctggtatcaaactcctggactcaagtgatcctcctgcctcgggcttccaawgtgctgggactgagccactgtacccagccctcattttctcttatcagcagtccccaagctttttggcaccaggctccagttttgcagaagacagtttttccatggaccggtggtgggggaaatggtttcgggatgaaactgttccacctcagatcatcagacattagattctcatgaggagcatgcaacatagatccctcacgtgccgttcacaatcgggttctccctcctatgagaatctaatgccgccactgatctgacagcctaatgctcacttgccgaccctccgcttacctcctgctgtgtggcccggttcctaacaggccatggaccagtcagtggcccagggtctaaattgacgttaggacttgcagtttgaaaaataccacctccaggagacaagaaatctagtgtgatttcctcattctcttgcctaaaccttttattacttcctggctgtctctgttcctgactttttcccacaggggtaggaaggcactgggtaagctctcccctgtgggcctctccagcttcctgctggtcagtccccagcccccatcaccttgcattccagctccagccaataccagcttcctgtcttcctaaacaggctttcttttttcttttctttttttgagacaaggtcttgctctgtcacccaggctacagtgcagtggtgtgactacagctcactgcagccttgatctctgggctcaagagataagtatctgggactacaggtgtgggccaccatgcctggctgatatttttaatttttattttttgtagagatgaggtctcactatattgcccaggctgggcacttgagagctcctgcactcaagcgatcctcctgtctcagccttttaaagtgttgggattacaggtgtgagccaccacacccggcctaaacaggtttcttatgcctcataacatatgctgttatctctgcctggaatattctaaaccttcccttcccacctccttcacctggctaactcccactcaacctttaggtttcagcttagatgtcccctctttgaggcggccttctctgacccctcagtctgggtgaggagccctcacatcaggtttcacagccttgatatgtcccccatcaaagtccacgttgtgcacttgtaattgcctagacttccattgcttaaggaggcagctgctagccacgtgaggctaaagttaattaaaactaggctgggtgtggtggctcatgcctgtaatcccagcactttaggaggccgagatggatggatcacctgaggtcaggagtttgagaccagcctggccaacatggtgaaaccccatctctattaaaaatacaaacaattagccgggtatggtggcacacacctgtagtcccagctacttgggaggctgaggcaggagaatcgcttgaacccgggaggtggaggttgcatgagccaagatcatgccattgcactccagcctaggcaacagagcgaaactccatctcaaaaaaaaaaaaaaaaaagtaaataaaatgtaaaattctcagtcacactagccacatttcaagtcattatagccacatgtgaggcygggtgcggtggctcacacctgtaatccgaacactttgggaggccgaggcgggtggatcacgaggtcaggagattgagaccatcctggccaacattgtctctactaaaaatacaaaaaattagccaggtgtgatggcacactcctgtagtcccagctactcgggaggctgaagcaggagaattgcttgaacctgagagatggaggttgcagtgagccaagatcacgccactgcactccagcctgggcgacagagcgagactccgtctcaaaaaaaaaaaaaaagctacatgtggcctatgggtgctacataatacagatctagaatattcccattgtcacagaaatttctgttgaatagtgctggcctagactgtgtcaggaggcagagaccaggggagaaacttggaggtgctctgggctcccccaccccacccactcccagtgcatccaggtggacgcacaagcttagtaaagtctgcacaccaacttcacaggtgcacactcacccaggcctcttcctcctgcttctgaccagacagcttccttaagcccttcccacagccaaattccagagcaccactggcacgcagctggaccccaggaagtatctgctggagtgaagtaaatggggcccctgtccttggggagcttatgccatcattgaaagaagccagattgcataacttgtgggcagcaaaggggcatggcctcagggaccagcctggggtctgcaggcactgggcaaagagagcagggaccctgagaagtgaaggctcaggacactcccagtgggaggaagacctcatgctgtgctctgaaggacaaggatagcagagctggccaggccgaggaggggcaagtgcactgaagacgtgggaggtcggcgctgagggctggtggccggcagaagagagatcctggcctgggtcccagagctggggggttcccggtggcgggggatggtggtgacagagccccagacagtcagcacaccagcctggacttgaagggctgtggacagcagagaagtgatctgatcacctctgttttttgggaggcaggttcatggtgagctgtttgtgaggactgtggtaaggctaacactgccctctcatggcggagaaatcatacccaaaagaccccagcaggcgcagtctatcctctgccaccatacggcccagggaagcccaggcctagcatgttgtcgtcctcgtcataaatgccatgtccccagctctggcttccaggcgaagagcacccacctcactgcagccctgccagatgtaccatgcgccacatacttccatgtgatcgccctgcagacagacagcatggccgttcagttcaggaaatattcgccgagtgtagattggctccaggctgccaagctcaaatgtgtgcggccattgtcctagcccacaagaagattacaacgaaaggccagacacagtggctcacacctgtcatcccagcactttgggaggctgagggcaggaggatcacttgggtccaagagttctagaccagcctgggcatcatagcaagaccctgtctcttaaaaagaaaaaacaaacaaacaaaaaaacagttactcaggaggctgaggcaggagaatggcgtgaacccaggaggcggagcttgcagtgagctgagatcgtgccactgcactccagcatgcatgatagagcgagactctgtctcaaaaaaamaaacaaacaaacaaacaaaaaacaaagcacaaaccctggttcatgaccagtgccataggggactaggggaattcagagtgagagagccccagctgggaggcagagctggaggctttccaacaaggaggatctgaggtcaccttgaaggctaggcagtagtttgaagggttaggggcagagagaaggtacctgtgaccctcactgactcctcatgggaccaggcccccgacccctcaccctcctggattggcaactccaggtaggaaggctcacagtgggagggaggtggggggtgggcagaccaacaccacaagagagtgcatccaggccccggagctgctcagtagacactaccatgtgtagctggtgttctgtcagtgccagccacgggcctgctatgagcaagaaggcaagacctgccctccagaggctcacaggggctccaggcccctgtggatcatgcactcgagttggggaaactgcagacattctggaaggcccttctgaaggcaggccagcccccagcctgtccccttggtgtgtttctgggtcttttcagtgctgccttgctgagtgcttgcaggtttggattgtctttttgcattgactgaagccaaaagcagctttaggtagttcatctaaaggtagaaatgagtagatagacacaactcccaatacatgcctaagccaaagagaaatgcatttgactgactcgcagtcatgtatctcccagacacaatttgtgtggatcattctgagtcagtaagtgtagattaacctgagggtaggggtcattggaggggccagagggaaaccaagggtggcaggttcccaccagagccctgccttctgggattgatctgggtggggaaaattaatggtgtaggtgccaaacacaggggctaagctccctctaccatccacaggccttggacgatgccaacaagggtatcatcagagaactgaggaaaaccaactacgtggagaatctcaaagaaaaaagcgagggaggtgagttcctgaaactctgaaaaggcaacttcagcattctccctctgctttcttttcctctagtccgagacacatgcgacagcagctccccaatctgggggcttggcactgcccatcgtgcattctaatttcagtgccaccagcagccctagcctatctctggggcagtagagggtgaggattcagcccaccatgggctggactgtctggccccagagcgcactcatttctctcttcaattgattcatcaagtatatggtgagcacttgtcatgtacctggaaggtgttagattctggggagagaggcccatccctgccctggaggagcccatggccctttgggcaaggctgaccagtggagttgtcagctgctgggatcctgcacacaggtgctacaccgaggtggaggtgtgctgccatgagggtgcatgcaacggggcgtgggctcctctggggaggcagaggaggcttcgaagaggaaaaatcttctacctccaactccaaaagatgcccaggagttttccaggagagaagtgggagaagaaaggcatttttccagcaggraacagcagggccagaggcacagagacagaataacagtagctacactttgggggctcttactgtgtgctaggcactgggttaagcaccagacaggagtgatcttgttgggtctttaccccactaggaggtgtaggtgctgtggggggaaagggaggctgagtgaggtgagtgctctgccagagtcatgtagctagggaggggtgactcggggccccactctccccacctgcggcgctgctctcgggccagcagtgtgatgggcaggtgcagaggggcataaggtgcagaggctgcctgacagctgtgccttaccacattctttctcacaaggtctccagggagtaaacaggcctttggccccctgcctttgggctctcctttcctgcagggagggagtgagggaaggagaagcagaagatggctgagcagccctaccccactggagaggggcctagaggaacaggggtgttaagcgcagtagccgacccccattcrtgcttcccgcaggccaggcattctttcaaagactgtgtgcacggactcatcctatctgtatctgttcaggaacactatgaaggaagtgttattagcttgactttatggagracatggaggcagaggggttagaggctacagtggttttcagtcttgggcagtctgctctagaacccacgcgtcggcccgtgcmacactgtttctagtgacacagacagccttttcctgccccagtctgtggagctctcactccagccagactgcagygaacagagctggggctggaggtccgggaggacagagcccaatgcagattcttggctgcagccctccaggctgcaaggctgaaatcctttctggtccaggcagggcagcgggaggtttctgggcacctgagcagccagatgacagccctttattatccagcacctgctctgtggtggctggaccccctcagaggggctctgtctccrcccccacatgccctttgagctgctctgagaagccacaggagcaacagctgtggagagagactctgcggggaagcagccaacaccccagtctccctaccctggcctgcgtccttgtgcctggagaactgccgggcacgtccctctcagaacagcaggtggcagcattgcatctgttttcaccaccaaagggctgtgaccccctgagacctgagaccctctgcagatacctcagtaactagtggtttccaggaggagaatgtaagggagacgcagaaggggatgtaacttttctccataactgataaaaaaaaaaatttaggagcaaggatccctttgcttgtaaaataactcttcagctgaactttttgttagcagcgtatatctttataggaaacctatctttttccttatgttttttctatattttcataggaaacctcccaacaaataatgaatgtgcttcccagggacaaagagaaagtgtcagaatgaagatgctggagaaaatccttctgtcattttccagcacctatgctatttcttgcagggaaaagaggtgttctggggtcagactgtcctgggttcaaattctgtctcacttgcacacttgcagtgtgaccattgtgtgatttcttttctttctttttttttttttttgaaacggagtcttgttctgtcatccaggctggartgcagtggtgcaatctcagctcactgcaacytccatctcagcctcccaaagtgctgggattacaggcatgagccactgtgcctttttttttttgaaatggagtctcccctctgttacccagtctggagtgcagtggcgcgatctcagctcactgcaacctccatctcagcctcccaaagtgctgggattacaggcatgagccactgtgcctttttttttttttgaaatggagtctcccctctgttacccagtctggagtgcagtggcgcgatctcggctcactacaacctccgcctcctaggttcaagtgattctcctgcctcagcctcctgagtagctgggactacagtcttgtgccaccactcccggttaattttttttttttttgagatggagttttgctcttgttgcccaggctggagtacaatggcacaatcttggctcactgcaacctccgcctcctgggttcaagcgattctcctgcctcagcctcccaagtagctgggattacaggcgcctgccaccatgcccagcttatttttgtatttttagtagagacggggtttcaccttgttggccaggctggtctcaaactcctgacctcaggtgatccacctgcctcggcctcccaaagtgctgggattacaggcgtgagccatgccgcccggccgtgtgatttcttttctatcgatctcaggtcccttgactgcaaactcaaatcaacggcagtgcgcattttcatgatgtctggatgggataagctatacagccctcacgtgatgcacaggacggagctgggctcagtcaatgatggttccctttctctgcttttggaaaggtgtgctgtcaacaccaatttaaagagctggcaaaaacagtcattctcagggcctttctctcatcggcctctcaaaagcacaggcctccacagagatgaacagtttctttcttttttttcttctttcttttttggagacgggtcttgctctgtcacccaggctgcagtgcagtggctggattttggctcatcacagccccaacctcctgggctcaagcgattcttctgcctcagcctccgggtagctgggactacaggcgccaaccaccacgcctggctaatttttgtatttttagtacagacagggtctcactgtgtcgcccaggctggtctggaactcctggcctcaagggatctgcctgcctcagcctcccaaagtgctgagattacaggcgtgagccaccgcacccggcctgacatgaacaaacttttatctttcttcccgcttttctcttatttttcagaagcttcactgtatgaagatagaataataacaagagagaaggacatgaggagagtgagagatgagcccgagaaggtggtgaagcagtgggaccatagtgaggatgagaaagagacagatgaggacgatgaggcttttggggaagctctgcagagcccagcaagcggaaagcagagtgtggaagcaggaaaagccagaagcgatttgggagcagttgccaagggcctgtcaggagaattaggcacaagatcaggagaaacaggcaggaagctactagaagctggcagaagagagtcaagagaaatttataggaggccttcgggagaattagagcaaagactctcaggagaattcagcagacaggaaccagaagaactaaagaaactttcagaagtgggcagaagagagccagaagaactgggaaaaacacaatttggagaaataggagaaacgaaaaaaacaggaaatgagatggaaaaggaatatgaatgaagccatcggtagagatgaggatcaggaagctggtgttcagagggatcatgggattttattaaactggattttcaagcgatttgtctgttataggaaaaatgagggttttacttctgctgctttccatcactattttgccattaaataggtgtctttcactcttgcaaaccctgagtctgtcactttgcctcttcacccctgcccattcttggaagagcatcgtggaagaaatgagaaaggtgccaagaagaaagggtttcaggagggtgaagatacgggcgctacagggaacaagaagtcacagggaggagaggggaaggcctgggaggagaggtgcttcccacacaccggtgactgactgagtccctccagtgcgcaggacagcggggaggctttatggatggaacagtggtggggcggccccagctgtcacaggtaggagaatgccgcaagccagaaccaagcgaatgctgggagtgaggccaaagataggggagtggcctgggagtcgggagggcagacagactccgcctctgacacctctgggtggcataatcaggtaaatcaggctctccaagctggcttctcctctgaacaatgggatacctgcctcaggggttgctgcgaggactgagtgcttagcacagcacttggacaggaaactcaaaaatccaacggagctctcagtggtttcacagaggaggtggcagctgaggatctggcctcagaggatgttaggatttcactccgttactcatctgtccctttggccattgccatcctggtctgtctccacagctcctagaaggaaaggtcggggctgagactgactttcggctggcacagggcctggacgaatgaggccagtgaggcatttcagatgcagagtttaccggaatgccagcaaattgcatgataatattttaatccaatgtggtaaaaaaaaaagtttttaattaatgcaaaagtccatgatgaataaaatatcaaaaattaaagacaggatccgactttgcacgaccctgcctcactcacttcctgctaatccacrggaccggggagggtgactgagttacccctcaacacgcagaaaaagctagtggccgctcagctcgcaggcgcagtgggtgggtgcgcgtggggagcaggcgcgcgcagggggcgggaccgggccgaggttcccgcgcgcggcgagagtttcgggttttggttcgcagcgcctgcgcgcagaggagacggcccgcccccagcccgcccgggtgcccgctccgccccccgggctatgtaaagcggccgggctcgggtcgtgccaccgctggactcccgtgtccctccgcgcaggcgggcggccccggagcgctggtgccggcagaggcggcgacggtggcgcccctcctcatcatggtgagaggccgggcggggccgggcacggggtagcaccagggcgggaaacgagtgtcggggcccctcgggaggaagcgtcttgcaaacgaggacccggggctccgggttcgacttccagttttcttggtactcagggcggccctgaggtctgggagaagcggaggggttttggggtgccggagaggccgctgtaaagggaaacggtggtgtttctcaggagggaactcgggaccgcagaagctgctgcgcctctgggagcctgggtgggcctgggccgggagcccgggagctgctcccgaccccacgcaggcccgcgctggggcagccgcttcggcgccccctccccgggcccagtctcatcacgcggaaccgctgccccgcgcccgggtgcgggcgggaggtggagccagttcagaggaggggaccctttacggtaaaagctgccgtcccttgtggcttctagaagataggaaaacaagtggctccgagaggcgcttctgacacacagcacagcggcgggtagagctggatcctaattgcaggtgccctgtgctgccctgttctggacaggcacaaagaccacgactttgtgggggccgggagagggtagaggaggaggtggcaggcttggtgaaagagggcctttgtccagtgctctcctgccctgccccccaccagcccttctgtgggaccattgtacccgcatgccagacaagagagtattatctgttgcggccattgttgggggaagggaggcagtcttggggtaacccttctccactcccccccttctctgtgcactcagccgtggcagctgtggcttggcccagacacagagacccccacctccaaagaggacgtccttagtaggtgccaagcatataagagtgaggccagtcccagaaccgcaggctcctggcgcgccccgcatgcctccagcacgtttacctttccgaagtggcaggaatggggaaagcgcacgcttaggagagcttcagacaagcttccctcttcctcctccacgaccagaagcggaaaggtgctcccggaccgaaagggaaagaaggtccagcactgccccgcttgggaaggcacccacaaccagtctagggactaggggtaaggccggcggggagcccgcgaatgacctgggctgacatctcttcccctccttacacagaacagaggcttctcccgaaaaagccacacattcctgcccaagatcttcttccgcaagatgtcatcctcaggggccaaggacaagcctgagctgcagtttcccttccttcaggatgaggacacagtggccacgctgctagagtgcaagacgctcttcatcttgcgcggcctgccaggaagcggcaagtccacgctggcacgggtcatcgtggacaagtaccgtgatggcaccaagatggtgtcggctgacgcttacaagatcacccccggcgctcgaggagccttctccgaggagtacaagcggctcgatgaggacctggctgcctactgccgccgccgggacatcagaattcttgtgcttgatgacaccaaccacgaacgggaacggctggagcagctctttgaaatggccgaccagtaccagtaccaggtggtgctggtggagcccaagacggcgtggcggctggactgtgcccagctcaaggagaagaaccagtggcagctgtcggctgatgacctgaagaagctgaagcctgggctggagaaggacttcctgccgctctacttcggctggttcctgaccaagaagagctctgagaccctccgcaaagccggccrggtcttcctggaagagctggggaaccacaaggccttcaagaaggagctgcgacaatgtaggtggcagggtggggccttataagcccaccttgctgggcacagggtgctgcgggcaaaggaccatcattgtactcaaaggatggagcacgaagcagcaggaggcagagagaggctcacctcagcgggggcaggggcaagcggtgcgtcccagtggtagccttggggagttggcagcacattgggaacacgggggcttcccagagcgcctttcctcccaccacacctatccttctagccctcttctctccgacacccttttcccagcctgaatgtagaccactgtcccttgtcttggaggtgggaaaaacaaattactgtagtaacaggaaacatgtcctcttctaatgtaaccttagagggggaatcaagcccagtgttttccaacgcatttttagcagcagaatcatgttccaaaaaataataataataatcacatgaaattgtaagctgcaaaaaaattaaaactaggactattgtggcttcactggggatggttctcaggcctcggactactcaatttactcatgggtttgtggcatctgcagctccagaggacacaagtctcacacttaggccaaaacccgttttcagatggaaaaacatggacccaggagggatgtggggtttacgggctggaaccctggactctggccactctagcagggttctctcttggcatgggctttttgctccaatgataggtttgagataaagaagggtcctggtggctctcctggagtgacctgttggagaagtgccacccactaatccatctatatgcctttaggccatttctggttgcctccaattttatttatttatttattgtgacacggagtctccctctgttgcccaggctggagtgcagtggcgctatctcagctcagtgcaacctctgcctcccagattcaagcaattctcctgcctcagcctctcgagtagctaggactacaggtgtgcaccaccacgtccagctaatttttgtatttttagtagagacggagtttcacaatgttggccaggctggtattgaactcctgacctcaggtgatccgcttgccttggcctcccaaagtgctgggattacaggcgtgagccaccaccgcacccagccacccccaattttagatgatcttcatgcctgaaatagccccactctggtttgttgacattgtgtatattgcacagaagcagggaatttgtgcctgtatgggttctcagagagcttttttctcagctcctaaacttgaactctgcagtgaactgtggtgcttgcagtgacattggccaggagcaagccctgtacctgtgagctggtggctctgccctgggagtgactactgctcaaagttgcttttaatatttatttatgagacggagtcttgctctgttgcccaggctggagtgcagtggcatgatctcggctcactgcaacctccgcctcctgggttcaagccaattctctgcctcagcttcccaagtagctgggaatacaggcgcctgccaccatgcccggctaatttttttttatttttgtatttttagtagagacagggtttcaccatcttgaccaggctggtcggtagcacaaaagaaaggaggggcccttggcccaagatgggacgaatcaagcttgacaggatgattgccagatcttttttttttttttttttgagacgggggtcttgctctgtcgcccaggctggagtgcagtggggcaatttggcttactgcaacctccatctcccgggttcaagcaattctcccgcctcagccacccaagtagctgggattacaggcacccgccaccatacctggctaatttataaatttttagtagagacagggtttcaccatgttggccaggctggtctcaaacgccccgcctcaatttcccaaattgccgggattacaggtgcgagccactatgcccagcctattttatttgtaaaggaaaactggatttttctgcccaggattagagcaggagaaatgtaatgggccagcaaggctgctctcaggagaggccttcctcccctgtggagggcgagacatcctcatggggactcaattcagaacataacaggaaaaagcgagtgactccaaagacagccacaggtgtggagtctggaaatcaaaatcacagatactccactcctctttgtgtcttccagccccataatgtcaccccattatagtccaagacccttcctgtaccaggaggcccccccataggcctgcaaggtgtgtattaaactgatggtgacgttgtgactgcttgtccagatgggcccctgagtgaaatggggcactactgatagttccctggtggtcctgggaacactggggtatatggtcaccctaactgttgtgctggattgatagatagggttggtcacttgcccgaggccgatggctggtacatggcagagctgagatattcactgtgttctggctgtttccaccgtaccatgttgttcccagccctctgttttctttccaccccacttcccatgacttgcttcccctttgagacgtggtgctagtaaatcttagattcccttggcctgtactgcctgcctctgttacaaatgccttagagtttggagaagagatggaaagatctatacaatgtaaagccagagaattttaacttttttttttttttttttggagacggagtcttgctctgttgcctaggctggagtgcagtggcactatctcggctcgctgtatcctctgcctcctgggttcaagcarttctctacctcagcctcccaagtagctgggattacaggcgcccgccaccacgcctggctaatttctttgtatttttagtagagacggggtttcaccatcttggccaggctggtcttgaattcctgaccttgtgatccacccacct

SEQ ID NO: 8726 - DNA, 51749 bp, Homo sapiens
ccagaatctctggcacacatttaaagcagtgtgtagagggaaatttatagcactaaatgcccacaagagaaagcaggaaagatctaaaattgacaccctaaaatcacaattaaaagaactagagaagcaagagcaaacacattcaaaagctagcagaaggcaagaaataactaagatcagagcagaactgaaggaaatagagacacaaaaaacccttcaaaaaataaatgaatccaggagctggttttttgaaaagatcaacaaaactgatagtccactagcaagacaaataaagaagaaaagagagaagaatcaaatagatgcaataaaaaatgatagaggggatatcaccgctgatcccacagaaatacaaaccaccataagagaatattataaacacctctacgcaaataaactagaaaatctagaagaaatggatacattcctggacacatacaccctcccaagactaaaccaggaagaagacgaatccctgaatagaccaataacaggctctgaaattgaggctataattaacagcctaccaaccaaaaaaagtccaggaatgtttatatggacttcagaggagagaataagttggcattgatcaggagaactgtaaggaaattaattgtttaggagagaaatgagatgtgatgaaggtgagaaagagcggattgaagcagcatgaaggtgatagaaatggcagagctkttgatcatttagtgaagagaactgggaagggatgcacccaggtttctgagagatgtccagttgtacacaggtaacgtctacagctcaagagccaggttagcgatatggatgaaataagtaaaatttgaaacttgaacctatggatacagttaaggtcatatgataagatcatgacaagatcatattataatgaaaagtagagggcctagaatcggaggaaaggaatctggataccaagcaaaggagttgagcaagaaaggaagggggctctggacatccttggaaggccgaagacgaaagggctaaaagtcgccaacaaacaaaatgagataagacctggggcatatcttttggccatggcagttaaaaaaggagtggtgaccttatcaggaggaatttcagagaatgttggggtggacttctaactgcagtggggtcaggagagaatcaaacgtgaaaaaaagacaacactctgtgtatacactttttataaagaagcttgatggagaatggaaaaatgaaaaggcagagttttatttccaaggtataaaaaatgaagactcccaataaactaggtattgatggaatgtatctcaaaataataagagctatttatgacaaacccacagccaatatcatactgaatgggcaaaagctggatgcattccctttgaaaaccggcacaagataargacgccctctctcaccactcctattcaacatattattggaagttctggccagggcaatcaggcaagagaaagaaataaagcatattcaaataggatgagaggaagtcaaattgtccctgtttgcagatgacatgattgtatatttagaaaaccccattgtctcagccccaaatctccttaagctgataagcaacttcagcaaagtctcaggatacaaaatcaatgtgcaaaaatcacaagcattcctatacaccaataatagacaaacagggagccaaatcatgagtgaactcccattcacaattgctataaagagaataaaatacctaggaatacaacttacaaggaatgtgaaggacctcttcaaggagaactacaaaccactgctcaaggaaataagagaggacacaaacaaatggaaaaacattccatgcttatggataggaagaatcaatatggtgaaagtggccattctgcccagagtaatttatagattcaatgctacccctatcaagctaccagcgactttcttcacataattagaaaaaaaaaactactttaaatttcatatggaaccaaaaaagaccccacatagccaagagaatcctaagcaaaaagaacaaagctggaggcattacgctacctgactcaaactatactacaagactacagtaaccaaaacagcatggtactggtgccaaaacaggtatatagaccaatggaacagaacagaagcctcagaaataacaccacacatctataaccatctgatttttgacaaacccgacaaaaacaagcaatgggggaaggattccctatttaataaatggtgttgggaaaactggctagccatatgcagaaaaccgcaactggaccccttccttacatcttatacaaaaattaactcaagatgtaataaagtattaaatgtaagacctaaaaccatgaaaatcctagaagaaaacctaggcaataccattcaggacataggcatgggcaaagacgtcatgaataaaacaccaaaagcaatggcaacaaaagccaaaattgacaaatgggatccagcttcagcacagcaaaagaaactatcatcagaatgaacaggcaacctacagaatgggagaaaaattttggcaatctatccatctgacaaagggctaatatccagactgtaagaagaacttaaacaaatttacaagaaaaaaacaaacaacaccataaaaaaagtgggcgaaggatatgaacagacacttcttaaaagaagacatttatgcggccgacaaacatatgaaaaaagctcatcatcgctggtcattagagaaatgcaaatcaaaaccacaatgagataccatctcacrccagttggaatgacgatcattaaaaagtcaggaaacaacaggtgctagagaggatgtggagaaataggaatacttttacactgttggtgggagtgtaaattagttcaaccattgtggaagacggtgtggtaatttctcaaggatctggaaccagaaataccatatgatccagcaatcccattactgggtatatacccaaaggattataaatcattctactataaagacacaagcacacgtatgattattgtggcactgttcacaatagcaaagacttggaaccaactcaaatgcccatcaatgatagactggataaagaaaatgtggcacatatacaccatggaatactatgcagttcatgtcctttgcagggacatggatgaagctggaaaccatctttctcgggaaactaacacaagaacagaaaaccaaacaccgcatgttctcactcataagtgggagttgaacaatgagaacacatggacacagggaggggaacatcacacactggggcctgtcatgggggtggggtctaggggagggtagcattaggagaaatacctaatgtagatggcagattgatgggtacagtaaaccaccatggcatgtgtatacctacgtaacaaacctgcacgttctgcacatgtaccacagaacttaaagtataataattaacagtaataaaaaattaattaatgaaaaataaaatatataatctgatacatttggatatatgtatatatacacgtacacacctgtaaaaacaaactagatagtgaacatatccatcacaccaaagtatccccttctcctttatactgcctctcacccacctctctctgccctctcctcagttccatgttccatgcaactattgatctaccgtatgtcactatagatcagtttgcattttcttgaaatttatgtaagtaaaatcatatacaaaagtaaagaaagtgtgtttttaaaaatatataagatattgagtataattatgagataagacttcaaaaaagtgaagaggttaaagatgaaggagtgaaggtaaatatttgcttaactaatgtagtgagttaagtaatggattcaatcacagatgatttaatccactagtttacatattttactcacccaaggttagagtttactatttagacacttaacatttcttggcttactggacaatgtgagtcacctctccagaaaaattcatggcattgaatggatacgttaaaaaagtagaaactttgttttaaaaactctaaaatcaatcaccacagcttctactttagaatatcagaaaaagaagagtaaattaaacccaactaagcaaaacaaaataaataataaaaatgggggcagaaatgaatgaaatccagagagaaaatcaatgaaaacaaaagctagttcttttaaaagaccaatgaattgatgagactgtacccaggctaagcaaaaagaaaagcctaaattactaatatcagaaatgaaagtggtgaaatgctaaaaatcccatgtacagtaaaaaatcataaaggaatactcaggacagctctgtgcccacaaatttgataaactacatgacgtggatcaatttcttgaaagacacaatccgccaaaagtcacacaacaggaaatagaacatttgaataggcctatatctactaaaaaaattaatcaataattaatagccatctaaaataattaccagacccagatgggctcactggtaaattctaaaaacaaattaagaaaacgtttactccaattctctaaatctctttcagaagatagaagcagaagaactactttctaattcattctatagggctggaattactctgataacaaaaccagacaaagacattagaagaaaagaaacttaaagaccaatatctttcattagtatagatgcaaaatcctgaacaacatattcacaaatgaaatcaaactatgtgtaaaatagttggattatacattgtgactaagtaagattgattgcaggtgtacaagactaattcaacatttgaaaatcaaaggaatccgtcatatcaacaggtaaaaaacagaaaaaatcctcaaaaaattgctagcaactccaattcaacaacacattaaacagatcactcaccacgatcaagtgagattcacccgggtatgcaagtatgattcaatatacacaaatcaataaatgcgatacattgcattaaaagaaccaacaacaaaaactgcacgatcatttcaatagatgccgaaaatgtattcagtaaaatcctacatctctttatgataaaaatccttaacacattgggtatagaaggaatatacctcaaaacaataaaaaccaaaatgaaaaacccactgctaatatcatactgaacagggaaaaattgaaaacctttcctataagatctgcaacaagacaaggatgcccagtttcaccccctttattcagtatctgactggaagtcctggccggggcaattaggcaagaaaaagaaacaaaggacacccaaactggaaagaaagatgtaaaattagctttgctcaccaatggtataatcttataatcggaaaaaccaaaagactcccctcaaaaactactagaactaataaatgaatcagtaaagttgcagaatacaaaatggatataaaatatccgtaagatgtctatacatctacagtgaacagtctgaaaaagaaatcaagaaagaaatcccacttacaatagctataagaaatatgatgtataaaatacctagtaatcaatttaattaaaaaagtgaaagacttctacaaggacaactataaaacactgatgagaaaaacgtgaagaacacacacagaaaatggacacatattcatgctcataggttggaataattaatgttaaaagtacaatgctacccaaacaatttacagattgaatgcaatccctgtcaaaataccaatgtcattcttcacagaaatagaaaaaaaaaaaaaccctataatttgtatggaaccacgaaaaaccccaaatagccaaagcgcattatcgcttcttgactgaaaactcccggacagttggggctttttcctgcacagagattggccacttcctgcacatcaggagatccccgcggcctgcgggacccgccccgccctcctgcccaggcgcccgctaggtggtgcctggctgggcccgactccgcccgcctccccattcactgggaactaacacccggcgccgctcagacatctctattcccgcctctccgacccggtctcacttcgctcctgggcagctgcgcggagaactgggrwaggtgtttgactttgggagtggttcccacacgctggattctcgttacctgctcytgagcccaggaaaagggcgggaacctacgaaagggaagcccagtgaagtgctcagcgcacctgttgctccagacctttccctggggctgtccttctttactcggtctctggcgggggctccctaagggcagggacttggctgcacttggctgtgtgccctatgggtccaggcgcggggaggggaggccagggcgaatgggcgcggagctggggggtgaaagtcctgcctgggctccactcatcctgcaggagctggaagtaggtacaatgaggcctcccaccctggtgaagtttwtgttgggcgctggaaggggctgtgaggcctgggacctccaggaaaaacaacagcagcagtatttatttgtcggtaccgaaactcgtatgctctcagtattcagaatttgtacttgacattcctcctcctttaaaagaaaccaggagaggcgttgatagtatgtttttggactggaaaaaaatcaaaatgaggacgatactgttgccagaaagcaaaagtgttgggatagtgtaaaaagaaagtaaccaatttacagagattcccagtagacaagttgtgagaatttgytcaagaacaaaaaccagtatgtgttaattgaaatacatgttacaacaaagccaagaaagagtcctttagtaaattcagataaaacaagtaaaatgggccaggcgcggtggctcacgcttgtaatcccagcactttgggaggctgaggggggcggatcacgaggtcaggagttcgagacccagcctggccaatatggtgaaacccagtctctactaaaaatacaaaaattagccgggtgtcgtgacatgggcctgtagtcccagctactcaggaggctgaggcagaagaatcgcttgaacctgggaggcagaggttgcagtgagccaagattgcaccactgcactccagcctgagggacaaagcgagactctctctcaaaaaaaaaaaaaaaaaaaaaaaaaaatgtaagatgagtttaaaggaggcaggaaataatttcaataatgtttacaagaaatgctgtgtgatgattcatatacgactgctgtgtaggaatagtgactataggcacctaggttgacaggcacagtggttacaaaaaccaacctgaaggcctaaatattaaaccaggagactttgaaagccaacttgtggatagaactctgtgttacgcaaatcagatgcacgagaacctcaaatagtatttcatttcaaggaaaggcatttggcaaaaaaaagaaaaaagcaaatttaatagttgtctttgcaaaatcccaatgtaggaccaaactgcaaaatggtccttacatttgtttggctttaaaaagcagtatgacctgaaaagtagcagtgtcaggtcagtcagagcccatgtcccaaccatcaatctggcagccccatcctattgtttttgtgaataggagatggtctgttattaatttaaccccagaaaagtattaaaataagcattaccatcaccctaggaaatataaaaagatagagtgaagataaagtgtataaaacccacagtattactagtggggtgctaraaataagttttataatcactgttgtacagttgtattttaaaacatgtttgaaagtcttaggagaatctagtttaacagatttataagtgttgatttattcagtttattattgtacaaatgcttatattaatgatatagttgttaattttgtaagtttgttctttaaagtgattacatctttaaaacatctgatacattaagctttatcatcaatgcttaaatgtttaaaataacgtatttgctgtgttagcagtgtgctttaaagtttaaggaaaacaatttgtttaccaaattaacaagaaattaattgatcattgactaaataaggtataataatagaaaaaattgktctctgtttatgaaaattctgcttcgggaatgaaaatcttacagactaaataaacctgcactcaccagcaggggggaaactgtgggagatgagaaatgggagtgatagattactcatatgtggttgagcatacgaagaaattactgaaagagcttgagtgatctgtagaatatttggtgggaggggaatttgccatagatttttaaaaagtgaaaacaagaaaagaggggaaggcaatagtgacataaggaaaaacagacgtgtaaaaaaagcaatgcatccattattgattaattggcttagcagcgaatactatttagttgcaataaggcaaacacttggagagaggaagtgaagtacggtaagtgataaaagaaaattaatcatcagccctaaattaggaaggcaatttataatgtcaaaaattgtggggttaaaaatagtcatatacacaattatttctaaatatgaaagtaaataccaagagaaagggtgcactgaggtttgattgtttctggggagttgggagtagtgggaagacactggttgatttgtgtaacaccatggaatactatgcagccataaaaaatgatgagttcatgtcctttgtagggacatggatgaaattggaaatcatcattctcagtaaactatcgcaagaacaaaaaaccaaacaccgcatattctcactcataggtgggaattgaacaatgagatcacatggacacaggaaggggaatatcacactctggggactgtggtggggtggggggaggggggagggatagcattgggagatatacctaatgctagatgacgagttagtgggtgcagtgcaccagcatggcacatgtatacataactaacctgcacaatgtgcacatgtaccctaaaacttaaagtataataataaaaaaaaaagatctcgcctagtgttatctcacttttcaactacatgcaagtccattaatttcataaaagcacaatgaccaaatgacactgaaacaaatataggcacattgtagggaaaatagcaaaggatataaataaaattagaattactcattatccagaaatatgtgatgttcagtgtttccctgtagtctttttatctatgaattatacttacatgtaactttattcttaatttatacttaatattgtattttctcatggcatgactgtaatttttaatatctccatttatattcaatcatggatttgacagaatctaactggttctctgttgctgggtatttaaatattttctctgtagcatataaagtgcttcagtagtcatctttctgcatactgtttttatcagtacttgtgagctttatctttagtgaaattctttgaaatggaatttttcatcctaaaggtataaatattttcatggcattttctttttcctacccttccaccatccctgtgttccttcctccatttataaaaacataattctaagttacattctgaaaatattgrtgtcccaatttacataatcacatatggaatataggagggaatacctattttaccagtattggaaatcaatagtttttcttcttacaaatttcatgttttaagcaagtaactttcttgctttctgctgctgcttttgttataagtccttataccatggtgattaagaggagccctggaaccacaaagacctggtttctaatgcctacttttctgtttgtagttgagtgatctcaggcacaacagacttaaacagtgaaggctcaatttctttgcttgtaaagtgcagacattcactcacagcacctatctcatcagcttgtatggattaaatgacatcttgtaagaaaagccctagtgtagtttttgtgtgtgtacctatttgttcaatgaaaacaagtatccatttaactagtaataaatagagtgaaaagtaaatacacatgtaagcctatattaatgtaatattgtttaaaaatccattgtttcaggctcaccgtcatggatgctctatcagaagcaaatggcacatttgcattaaaccttttgaaaaagctaggggaaaacaactcaaacaacttatttttttccccatgagcatatcatcagccttggccatggttttcatgggggcaaagggaaacactgcagctcagatgtctcaggtacgtaaagccacttcaagacaacaataagtgctatcaatttatcagttgagctggacttctgcatttcaagtcttgaagaaattcctcctttaacagacaactctggtagtctcacaggatgtggatggagaattggcaggatggagcatgttttcaaggcctgaccttcttggtgacctggggtcactcatgtgggtgcttctgcaggcaactgggctagaaggtccaagaagataccactcccatgtctgggccttggttctggctagtggatgggccctcagttccctaaaagcaagtctttccattcctccttttatgtggtctttcctcaggatagcttgggcttctcgaccacggtagctgggttacaagagagggaaagtggaagctgccagactttttaagggctaagcctggaacagagccagttctgcattctgctgtttagagcaagtcacatggccagcccagattctgaagaaggggagagagactccatcttttagtgtcaggagcaccatgtgtatgcagagacaggacacatggttggcagctgcgtttttagaccaagtatcataaatagcacaagaaatccgagtcattttgttagggtttgcaaaaggcatatccacttataccaakacttagataacattcgtttcttttaggatgtgcttatagggaggcctgagaagaggcataggtaggcagacagggttgcttttgagacactctctatcttttattagattgatcatcttttaagctgtagtaagcatctgtaaatctcatattgctgagtttactgttgtgcctatattttgaagtcacagaatactgagaatgtgtatgtttattattattttattttcaggcactttgttttagtaaaatcggaggtgaagatggagatattcatcgaggttttcagtcacttcttgttgcaattaacagaactgacactgaatatgtgcttagaactgccaacgggctctttggagaaaartcttatgatttcctcacagtaagtcatacttstttattaggaaaataaagatagcaatgtggtgggaagtaggagaatgaatatgggctatgaattcctgcaggtggtcctgaactcagaactccacgcacgaatctcacacgcatcttgtgattcagtttgatcatctgtagcacaggctatatagcaaataccgttcagaattttgtgaagctttaatgagataatcttcataaaagaactgacacagagcgtaacacagttgaaaatgaatcagccaaaacaaagatgtggtgaaaatgactgtttctcrtaattgctttgcagatatttttaattttctatgcatgatgacactataatgtatgcattaaatagtttgactagatgtttcagcaatgaaaatcttttaaaactaattttggctaattacactggttgcwttcgctgacaatgctttcatgacttttctagtttttgaaaagaaaagtaccgaagtaatttcttgttatttaaaaacacaaacaacacatataaaccaagagatgtcatcagcttctttcttatgccacaactcccctttttaacgttagagctttcatagatttgatgtttcctccttcacatataaaaactttgcttcatgagtttttctcctatgtaatgttattgtactatgcatattgttttatactttgttagcttttccttaaaaatatgtcctaaattccttccatctcagtatatgtggatytgtattactctttttaacccttgtctggtattcctaagtatggctgtaccatggtataatagacctttcttgcattgacgagtatttaagcttatttactctggcccattacagacaggagtatttctttacacagttttgtgcatatgtgtatgagttactatctaaaatggatttgtagaagggaggaagggaatgaagctttgaggttttcataaatattgccaaattgctctccacagttttgtagccatttacattctgcagggggtatttataggatcctcagttccacccaccatcagcagaactgcataatgttaacctttaaaacttttggaagggtggggccaagatggccgactaaaaggagctcctgatgctggcgtcaccgagaggaaacaaaaggggtagtgaacactgaccctgaaagccgatcatctgagaaaccatgtcgagatccatctaggcagcaggggaacacacagagcagacaggaatgaatctgggcaccagcctgtctgggatcagtgcggtcaggaggacccctacaaaatggggaaggatgagtgaatgagagttcctagtgggattcacactgtccacagggacctatgcaagattgggaatgggagaatcctcctgtccccaccgcatttccccactgtgcttttagactggggcagagtgccacctggacgttttccaggggtaattctggagtccagggggacctctacaagccttgggccctgtagcagaccagcaccaaagccacagccccagtagaggccacagttgtggttcctgggagaagtaagattgctctacgccctcctaggaaataacattctggacacaggatttggcaaatattttatgacaaagatgccaaaagcaattgcaacggaaacaaaaattgagatatgggacataagtaaactgaaaagttctgcagggcaaaagaaactatcaacagtgtaaacagacaacctatagaaatggagaaaatatttgcaaactatgcctctgatagaggtctaatatccagaatctattaaaaaaaaaacaaacttaaatttacaagcaaaaaccaaacaacacaactccattaaaaagtggccaaaggacatggacagacacttttcaaaagatgacatatgcgtggccaacaagcctaggaaaacattgccaacatcactaatcattagagaaattcaaatcaaaaccatgatgagataccatctcacaccattcagaatggctgttattaaaatgtcaaaaaacagatgctggtgaagctgcacagaaaagagaacacttccatgcggctggtgggaatgtaaattagttcagccactgtggaaaggactttggtgatttctcaagaaaattaaaagagaattgccatttgacccagcaatcccattattgagtacatacctgaaggaatagaaatcattctaccataaagacacatatgttcattgcagcactattcacaatggcaaaaacatggaatcaacctaaatgcccatcaatagtagactggattaaaaaaatgtggtacatatacaccacgaaatacgatgcagccataaaacagaatgagatcatgtcctttgcagccacagagatggaactggaggctattaatcataagcaaactaatacgggagtaggaaaccaaataccacatgttctcacttataagttggaggtaaacatccagtacatatggtcacaaggaaaggaataacagatatgggggcttacttgagggagaagggtgtggggagggtgaggattgaacaactacctatcgggtactaggcttattacatggttgatgaaataatctgtatactaaacccctgaaacatgaaatttgcctatataacaaacttgcttaggtatccgtgaacctaaaataaagtttttaaaaaagaatctgagatggaatatttacaacatatgcgatagggaagggktaatacaaaacaagagaagcaammaaaaaaaaaataaaaacttttgattataaatgggattaaacacttttatgtgtattgagaatttctatctcttctgtgaattgcctatttacatatcctcttacacatttttctatggggttgtatgtctttttcttattgacttataagaattatttttgtagaggatatctctcttactgtgatatgtattttttcaaacttgctttcgactctaaattaattgtttgcaaacagattggtataaagtgaaggtggtaagacataaaagtgaaatatttataagatttgtatatgatattgtgattttacaacttcacttattttactagtcttagcactatttagtttattgccatctttttactagcttactagttttctatataaagacaaccaaaatgttaacaaccaaatatcaattcgtggtggatattttgaaagaaaagcattgatatttaaaatgttattttgatattggaatataaattaaaaagatgagaaatatttgtaaaccatttcagattaatttattatttattcttattttcaagaatcccataccaatagcaatatataattacatgttctttttgtttgatttgccacactttgtcaaatagtaacttaaaatagcagacagttatttaaaaacacgtttaacagatggaaagatcrcctaggcgtgcaagaagtcatcaatatgtgattcatcagtttgccttcagattattttcttacactgagagatttaaataatttccaaaccactgaaaaataggcagaggcagcaattttggaaaagcatgaattatgggaggattaagtgaaatagtgtacatcgatcagttaygtggtactgagaattcaaaaacgttacatgaaaaggtgatatttcatcaggacttcacagttatcttgtgaggtgtagctattactgcttccttgttctacaggagagaacatggaggcataaacagaggaagcaaatatttgaaggtcacacaactagtaagttgcagaacttgtgttcctaactacagtcacatttcctctccatgccatactgatacagaagtataaaattccaaagtaaaagcaaaattatggaaagggaaattaaatatttagytgtgagcagtttgagagaaagattgggaaacaattctataatgcatggttcataaattagttgtttcagctcatttaatttccaccaaatgttctgcttttatgtggcatagtgtaggtttctgttaagatcattataattctacagaatatattaactaaatatagtttgaacttttttggaaagttgatcatagtttgaaacacccataatgctatgcattatgtacatgagtataaggtttccatgaaattaattattcagttcctcagtccaactagctattaatatatttcaagtgctcaatagcctatgtggcaccgctctggacattgcagatttacaacattttcatcatcccagaaagttccgatggacactgctggtctaggattgtatatgtttcccatgtaatttatggaacaacagactcatatttatagtctgttgttctaaaatgtagaggcaaatatagcacttgctgtgttaatcctcactcaacaaatttaataatttacaggagtgacagcttctatagtcaccatttgtaaaaaagaaaaaaaaagaatttattttctaaagcaattttaggttcacagaaaaattgagcaaaaggtacatgcatagtccctcctgtgattaacatcccctagtacagtcatgggggacagctttcttgtttctaccttggccggttaggaataaagctgttatgaatatttgtgtgcaggttttatcagctcctttgggtaaatggtaagggtcatgattgctggatcatatttttagttttataaaaaacttccacactgtcttccaaagtgactatacaatattgtattcccaccagcaatgaatgagagttcctgttgctccacgttttcaccagcatttagtgttgtcagtgtgttttcactttcatttagttcaaactgtttttaatatcacttgagatttcttctgtgattcgtgtgttattgaatctccgagtacttttggaattttcagccatctttctcttattgatttctagtttaattcgttattgtctgagagcagacgttgcatgatttctattattttaaatatgctaagttgtgctttgtggcccagaatgtggtctcttttggtaaatgtttcatgtaagcttgagaagaatatagattctactcttgttggatgaagtagtcaatagatatcaattatatctagttacttgatgttgtttttgagttcaactatgttctttactaattttctgcttgctggatctgttcattcctgatagagggatattgaagtctccagttataatagtggattcatctatttctcctttcagttctattagttgttgccttatgtgtcttgatggtccactattaggtacttacctattaaggatttctatgtcttcttggagatttctcagtgttttaaattatctcattgatgggtgtactgccactctcatgaaggatccagcagttgatgaaaatcacttgatatgcagcccaccgcgttgcttagtttataagctaagattaggaatagctgaaaagaatttggactttaggttaattcctcatctttatttgcaaattatatatggtaaatcataaaaytattgattttctgatgtggcacaatgaagaagtaagccagtgatattagttgtttctgtagctgtgaaattatgtttttggtttttcctagggttttacagattcctgtggcaaattctaccaagcaacgataaaacagctagactttgtgaatgatacagagaagtccacaacacgtgtaaactcctgggttgctgataaaactaaaggtgaaaatatattgttattctatttcgataatattttaaacagttttatagtcagttctttacaaaactgtcaaatataaaaaggagtccttttttctctaaacaactatgcaaacattaaaacctttctttggaaatattgccaactcgtagaccttttctctagctttagcttttcccttatcaagtatctgtgatgtctctctagatgaaataatctcttccaggtttttttgcttgttaatattaggtagtttttcttttcacaaatagcgttaaaatttgaatttaaaaatttctagctgtctccctcactggtattgccatactgtatggtttacaggcttgaaatgcaactgctgtgatcagtgataagggaacacactgatgatttagattgaacagggagagttatattgttttctagggcacagctaaaaagacattccmtcaacccccttgcagccagaaagaccctgagccctcagaacttcactgacacaacccatattttctttccataactggccaacttttccctttgtaccaaagccagctacttagcttcagggagagaatgagactgaagattacaaggagacatccacattatatgtgggctgagagaggaaagagggagtatcagaggttgccgggtttgctactctcattcctcttcctcctctgcccaacacttggacttggaaagaagtctgaaaggtggggaataatcagcccatatgattcttccactgcagagagagcctctgagtgttacagccaggagcaacagggtggcaccctcttcttcagggaaacacacacctctttgcactgccttgtggatagtccagtcaagtggagtaagaggtgggagtggggagtgtaaatggagtaacctctaagtatccaagcaggagggtgttttttttttttctttcctggaatgaggataatcaaatcatttcaatatgaattatgaaaatgaatgataatggttttatctgttatagaaatataatataatcagactttagccatgtaaatcataaaacatagagataacaatatgcatattgttcctagagggtcttgtgaaattttgtttgtcatattctctttgaagagttatcattcactattttatttctgtcttgtaaagcctgaaagctcatgtgctgccttgacatctatgggcttctcagggcctcagaggcctggccatgaagtcccctgctcttgtcagatatgtgcaccctattcacccactgagcaggaaggctcttcccccttctaagttcccttaccaggcagtcagctgtaccctccctgggtctcaacgtggctcacttccctccagcctggaaaattattcaaacaagcctgtcacatctggaggagccaggaatcgcctcttcctcttgttactgcaaagcctgccttccacagcccctactggttcactctattcccaaatgcaactctcctgtgaccccgcatggcatgtggtgacctccctccctgtgagcagttgtgactaataaactgccgccaatttcatctgtccagtgtgtcatgccatgtgtctagttatctcctactatttaatgggggagatccctccttcaccaacaaggtgaatatgagacaatcaaaacagctacaattccgtgaaaggtccagcctcccaaataataattccatgtgttttgtgaaattgcactaagacatttcccttacactatgtagtgtttcttgtaagtatccacaaagtgagttccatttagaattgaattctaggaaaaaaagttgatctgacctcctcagatatgtttactgaataccttctttgcattggacattttgcatagattatttaatccttagtgataataaacccatgaggaatctgagactcagaagttaagtagcttgaacaagttcttgtagctagcaacgaggtagaatgtggatccaatgtctggtaatgccaaacactggaaaattactcaaacaagcctggtacatccagaaaagccatgagtaatctcttcctcttgttattgtgaaacttacctatatcagctcctaccagaagggcagctgtcagcacagtgcaggaagagtagggaccagaaacctgtctccctttaagatgaagtctgatttctttggctgtgttatcccatctgaaaagtggaactcagaaacttctggcaccaaaagcacatcatcctggatccagggatgagcatcctgggatatggagctaaggtcaggtgcatctgggcgctatgaactctgcaagcattgctaccccctccaggagtcctgaatggaggtcctgagagccttcactcctcctatgcttcaataagtgggaactctaaggctcttgcatccctcttctcaaagagggctgcagggccacagttgaaaaggagaggtccaaagcaagggatggtttggagactgagaagatggaggcagtaccttcatgaagtacccctccagaagctgatgygcttctgcatgtgaaaggtggcctttcctttcctgagctgaagcttctgtgttgaaggagatggagggggcagaggacttgagggaggtttccagtcctgagggcttgctgaacaagctgacgttgatctgatactcacagatcatagcatggaccatgcacacctgattggcgtatctagtggctgttggggaatgcagcataaaattcctctcccaccaatactagtgttgacttcagatgtagttttctttctttctttcttttctttctctttctttctttctttctttctttctttctttctttctttctttctttctttctttcttctctctctcttctttctttctctctctctcccttccttccttcattgcttccttccttgcttccttccttccttccttccttgcttccttccttccttccttgcttccttccttccttctttccttgcttccttccttccaagasagagtatcgctctgtcacccaggctggagtgcagtggtgcaatctcagctcattgcaacctccacctcctgggttcaagcatgtctcctgccccagcctcccgaccaatttttgtatttttagtagagacggggtttcaccatgttggccaggctggtcttgaactcctgtcctcgtgatccaccacctcggcctcccaaagtgctgagattacagacatgagccaccgcaccaggccggaagtagtttgctttctctagctgcttgtgaccaagcataaaatgttttaccagtgaattccttagatattgtccttgagatgaaggattctggagaggatcaggaaaagagacagattcagtagttatcatccagatttaatgacaggcttgcctgagaactccattcattgctgtgccagatatcaatttattgtctatcagctctaaatctacctttgtggactttgtgatagtaaacctggatcctgtaacaagaacttgactgactggcccagtgttcrgctttgccaatagagggagctggagagacactgtaagaagatagaagtagaaatgcactttctggattctgatcttcttaggattattcagtgtaggcacccagcagctcacttggtcatctgtagccacattctcagggaatgctttctccacacaatggccatttctgcatttggtcaagatgcaacctctggcaactatatccctaccaggcatttgcttctatggtccagccccagcctgcccacaccctccagcaaggacatatggcttctcgtaagccasctttggccatctgacaagtttcatagccactgcagactgcatgttcctgtggcagccacaccttcaaagagctctgaatatcagccttgggacattcagtcatgttagtttgctyaggtgggtataataaaataccataggctgggtgtggtggctcatgcctataatcccagcactttgggaagccaaggtgggcagatcaccggaggtcaggagttagagaccatcctggccaacatggtgaaaccccatctctactgaaaatacaaaactgaaaacaaaaacaaaaaaattaactgggcatggtggcacctgcctatagtcccagctactcaggaggctgagccaggagaatcgcttgaacccaggaggcagaggctgcagtgaaccaagatcatgccactgcacttcagcttgggcaacagagtgagacactgattcaaaaaataaaaataaaataccatagactgggcagtttaagcaactgacatttctcagagttttagaggctgggaagtccaagatcaggctgccaggagatttggtttctgaagagggctctattcctggtttgcagaaggccaccttttagctatgttcacatggcagggagagcaatttatctcttcttcttttaatgccactaatttcttcaagagggcccaaccctcctgactttattttaccccaatcaactcccaaaggccctatctccagaaactatcatcttaggggttagggcttttacataaaaattttgtgaggacataatacagtctatgacctatgtcttttcctaagtccttagttctttttttttccacttaccccaagacatgaagtgacaatttctcttttgtaccttstacatctgctgccattacagtatttttaaaaaatctattacttaataattctttgtattaattctcttctcttcaaatctctgatgtagtttgtttgcaaagtgaacactgcctgatgtaactgaataagcatctctcccactattatgaaagagtgtggcaggagactgaagtccacagtgtggatctagcaaacacattctggcttgagggtgtgcagctattagaaaaactactccattaaaaactgaaaattctgagattaatgctgaaccagacaggacactagaacaagtggcaggaactcacactgtttcaacaatcaatggtaactctattgataagctaaaatctgagaggctatcagggatctcctattcaactttcctatctgcaacacattcaatcaaagcacgaaaagatacgtttagaaaccaaagagatctttctaattccctccaaattctttgtcacttaatacttccccttaacccccttcaaattaatggagagactgacgattcactaatgagggactaatggcagtttccaggcaatgccatatcaggagcctttttttcttttataagttccttgaaatacaataccaggcatattaatgtaatgcttttcacattaaggtccactgggttctccatacccttgatcagcagaggctctacaacatgtatgtttcattgcttacatttgtcttggtaacaatctagacattttcatataagcattgtcttagtctgttttgtgttgctatayaggaatacctgaggctgggtagtttataaagaaagaaggcttatttggctcatattctgcagaatatacaagaggtatggcactggcatccccaggcttctggagagggcttttgtgctatgtcaaaagacattgaacctcaggaggcggaggttgcagtgaaccttcattgaacctgcaggttcaatgagggaaaggtcaaaggggatgcaggcacatgcgaagagggaccaaacayggggagaaaccttactttataacaacccactctyggaggaattaatccattccatgagagctaattgtacctcactgactaccaggagaacaggaccaaggctttcacaagggatccacccacatgacrcagacacctctccctaagtggaacactggcacagcagggactgaatcgcagtgtgkgttttsgtggagacaaaaatccacacccaaaccacagccattatgttttggatkgtccagacatccactttataactcagtaatcttttgaatttaggattgtgctgttagtaagcagtacaaatttgtctggggaatgttaatgaaaaatgacagaagcagatcctgtaaaattgattcattaactcaaaggactaaccaaataatattcaagaaggttttaattgtttgaataaagagaagtggtgggagaactgaaaagagaatgtacttgtgtaaatcgaatgtacctgataggataggtacaccggtctcaaaaaaattggcactaacgcagtcagaacacatttcaagttaaaamtaggaattaactacagcaaaacagcaccacagatcacatacacggacactccatttcatcatttagcccaacttctcctagagagtgaacactccattccttaagtgttatcacaatcgaattaatttttcctgacatttatttatttcaattaaactcttcttccatcactgaatatgtgaaacactgtccaattgtcttgtgacaatattattaccacagggtatggcagaaaaagcagttctctgggaatgtggccatactgactgtagtctcaattcttctgtgaattcttcatgggactctgggcaaatcacacaaactacctctatttcaccatcctctcctgcaaaatataaggaacagcgtcaacaatatggttctttcaaatgcttacattttatgatgctatgtttgtttctctagcattaattagctgaagcaagtgtgttttgtttttgctttttgtgtttttttacactttctcaaaaccagggaagattgctgggaatctcatgggagattgagagctgtggccgggcatatatgaagtaacttttgctagagtatatggtcagtcactgaaggatattttggaactccggtgagactctttgttttttgtttgtttgtttgagacagtctcgctctgttgcccaggctggagtgcagtggcacaatctcaactcactgcaacctcccgaggttcaagcagttctcctgcttcagtgccccctagtagctggggttacaggcacctgccaccacgcctggctcatttttgtatttttagcagagacggggtttcaccacgttggccaggctggtctggaactcctgacctcaggtgatccgcccgcctcggcctccaaaagtgctgggattacaggcatgagccactgtgccctgccccgtgagattctttaaggtggagtatttgtgcattttacagcaaggagtacagagacctcgaatcaccccaggaagctccaattatgcctggactctacttccttcttgacaagtggaagtctaatttggagacggtggtagctcaacctgagactagcctaggagtgtgcccttcctgaggtccacaaagtcaggagccgagggagtcagacaaaactaggtcaaggttgagtcgggagttgagaaccagcagatactccctagtactgactgaagagatgtgaagttaggtatgaggcaagaagacagaagatgaggctgaggacagtttctgaggcactgaattatatactctggaaccttatcagttacctgttgtgtccccagtgggccagggtggagtggggagcctgttcaggctcactctgaaattgggctttagttattctgagagatgggtttcccttcagggcccagcatttaaattgtccatactcagaaaataaatacaattaatcctcgtgaatatcgacttgcrgacaaattccttacctaggaaaacagaccagttctacttttcattgcattatttcaaaaattagatttgttcattcttggattcatctttgattcttcctgctccctsttcctctcatggtccaagaagtgatgccaaatttatgtcctggaaattcctcaaggccatgtcctcctctccwtttctcctgcctctgtttcatttcagctttcctcatctctcatccatgctgcgtccttaacgcctcactgcaggcaatggtaccctcctacaatatactccatgttgcagccagagggaccttcgtaaatacaaatatgattatgtttctccccarcttaaaatccttttgtgtttccccatagtccacaagggaaygaagaaacaccaccaacagcgtccacatggccttcacgacatggccctgtggacacatcagacgttgtcttgcagtgcctcatccacactatctgtaccactgcaggcctggatacgtcatggttttcatggtgctatcttgtgcctctttgcacctgcacgcactgtgtttcctacatgggatatctgtgtttacaaccaaactcccaggggccaaattatatcctttgtaaasgacttcaaaccaccaggcatttgctggaagtttcacggaggaaaacaagcatttttcatcttttaatctgttttgctggtcaaagaggaaaaggagtggatggacaaagtggggcccaaagtctggatctagttctgaccaacaaggagaaattgatgcacaatggggaagtgaccttggcattttcaactggcagagccggtaagtttgggcacagttcaaatgtgagtctgtagccactagagagaggggtttcaaagtcatggagaaaagatgggggtgaatcctgcaccaagacttattgaggagagttcttgggaacagttacttttaggattccacagggaaatcactgagcgagttttacaaaatactgctgctgggttccctcctccaagagatctttacttaattggtttggggtgcagagtgggaatgtgcatctttaaaagcagaattcccaaactggagagctctgtgagagcttcctgcaggagacattatttgaactgaattttgaaagacaagcttgcatgccaggaaccccatgtatatgaacagaggatatgaaggaatgtaaataatttgctatggctctaaagaaaagaagggagaaatcaagacgtgaagaggcttacactccttgctcaatagtttctaatttatctttttggataagaggatgttataaaggattttaaactgaggtataaaataattagaattggaatgtttacctgaacttcagagtaggcaataggttggcatggatcagaactgtaggtaggaaaattaattgtttaggagagacatgagacatgatagaggtgacagagtatggacaggaggaacacaaaagtgatagaagtaacaggactgttgatcatttagttaaaagaactgcggagggacacacccaggtttctgagagatgtccagtagtacacaggtaacatctacggctcgagacaggttagagattttgaagaaataagttaaaagttgaaacatgaacctatggatatagtggaggtcatacaagaagatcatatyataatgaaaagaagagggcttagaatggtaggaaaggaatcaggataccaagcaaaggagtcaggaaagaagggaagggtgctctggaaatcctgggaaggtcaaagaagaaagggctaaatgtcgccaacaaacaaaatgaaataagacctgggatgtattttttggccaaggcaattagaaaatgattagtatccttatcaggagcaatttcagagaatgtttgggtggacgtctaactacagtggagtcaaacgtgaatcaayggtgaaaaaaggacaatagccaatgtgtacactttttataaaaaccaccctccaaggaccaggcactggccctctctccggtgcccacagacatccacacaggcccaaagaatcagggattgcacaagccagagcaatcgaacggttctgagtcatctgccggaagccttgccctcaatcaaggcggacgtgaagcatctacaaaggaggaatagtcaaagcagcagcggcggcggcggcggcggcagcagcagcagcagcaggaggtgggggcctctgccaggtaccgggcggggcaggcacggaggtgcccaggttcccgcggaggccacctcttccctggagtgcgtgagagaggsgaagggaggaaggccagagcaggaatcagagcgaggcaaaggcgggcaggaactaggagaatgacggcgggaggcggccgggaaagagagtcgcggggctgtgggggtcgccctggcaccagccggggtcccaagccccaccgcgagacccggcgaaggccgagggccgggtcccgagaacaggtgcgcccagacccgccctgaataggaagctgcccctggagagggagcgtctgtttctaggcttgcgatttgctgcgctgtgatttgctgccggatgggagcggggggtgacgcgagcagtgagtttggaagcgccggaagcttgggcgggagccccgggagggcgagtgggaggagccgccgctgcggaggaggctccgggagtgcgggtggcggggcctggaatttccgtggcgcctggggcagatcggggaggcgccgagtccctgctcccctggcgcccaagcttgcccctgtgcttacagcctattggttgcaccttctccttcccttcctgtcccccccctccgttctttccacccctgccttcatctttctgtatctttcatattctcttcttcattgtctgcttcctctcaaatgggatggggttgggggtgcttcttcacctacgcccctctctgttgcagccaccggcgttactttaaccaattcctcactttccagacactctcagtcctctggctgctgcttcactcctgagacctctccattccaaagggcctcacccagggctgctctccgggcccctcccgcttccctgcctcgggctctgcgtagaccgcgccctcttccctgggtccactcgsaggggcagactcgtctccccagttctcccagcacaccctgatggctgggtctcagtctccgtttcgcgcgcgcgctctcccctcgccctcctctgtctcttccttttactacctccagatattggaaattccacagaaataggtggatttcttcccttgtgcctccactagatgttctgtgtagtttcatccattctcatggaacctctcggaatcgggatgctgatggctccaggtctctggctctagacagtctactcatccccgtccctaactgtttacaaacatccttggctgtctttgttacaggttcacctggtatggtgtgttccacgcatctcaaatggaacaagtcatattccccattccagcctgactcctcatttaaaattccagtggttcacgacccaccctgagtatgaatttataacagctaggcgcctcgggactgggccctcctgtgctctgtccctatgtgagcagtcactgcctggcaattccagcccccacttctctattgcagacaatccctctgctttcagcagtccctggcccatggtggtggcctacgcgccagctccccagcctcttttcataccaaataytgagccgggttatctttstaaagccccaatgcactcatatgagacgtttgtttaaaaaccatgcatggctttccagaccataatctcaagttcaaactcctaaatgtggcataagggtccgtcctatctcactaccacgtggctcacaggaaaccatagaaacccaccccaggggcaccacacaaaccatgccctttgtcttcctgccacattcttggcacctgctaattcctcagcctattatttgcatcccccatttcaccacctacggaatgcctgcccggcttttcttttttctttttttttttgatatgtggttttaataagtttcattacctattgaataaatacaaaagaacatttaaaatgtgtattgaattataaagaacagcagtacaacccatcacccagtttaataactggaakattgtcatcgctggaggccgtgtttccctactgatcacaccctcctccctcatcacatccgcttccctcycctctgtatcaccaccttcctgagtttcatgataataacgacatagttttactgtctacacatgcatccagaatgatttagtttagcctggttttgaactttacgtatatggaataatactgtattactctgtggcttaatcctttaatacattatttgtgggaattgtccatgtcaaaaactaaagaacttatagatatggttctttcagtttttattgttctgtattccattatactaatatactacaatccatttatccattctgtttttgatggacatttgggttgtttcttttttattattatactttaagytctagggtaaaagtgcacaatatgcaagtttgatacataggtatacatgagccatgttggtttgccgcacccatcaactagtcatttacattaggtatttctcctaatgctattcctctcacatcccccccgcccaccccacaggccccggtgtgtgattttccccaccctatgtccaagtgttttcattgttcagttcccacctatgagtgagaacatgtggtgtttgggtttctgtctttgtggtagtttgctgagaatgatggtttccagcttcatccatgtccctacaaaggacatgaactcatcgtttttttatggctgcatagtattccatggtgtatatatgccacattttcttaatccagtctatcattgatggacatttgggttggttccaagtctttgctattgtgaatagtgccgcaataaacatacatgtgcatgtgtctttgtagtagcatgatttataatcctttgggtgtatacccagtaatggggtggctgggtcaaatggtatttctagttctagatccttgaggaatcgccacactgtcttccataatggttgaactagtttacagtcctaccaagagtttaaaagtgttcctttttctccacatcctctccagcacctgttgtttcctgactttttaatgatcaccattctaactggtgtgagatggtatctcattgtggttttgatttgcatttctctgatgaccagtgatgatgaacgttttttcacgtgtctgttgcctgcataaatgtcttcctttgagaagtgtctgttcatatccattgcccactttttgatggggttgtttgtttttttcttgtaaatttgtttgagttctttgtagattctggatattagccctttgtcagatgggtagattgcaaaaattttctcccattctgtaggttgcctgtttactctgatggtagtttcttttgctgtgcagaagctctttagtttaattagatcccatttgtctactttggcttttgttgccattgcttttggtgttttagtcatgaagtccttgcccatggctatgtcctgaatggtattgcctaggttttcttctagggtttttatggttttaggtctaacatttaagtcttcaatccatcttgaattaatttttgtataaggtgtaaggaagggatccagtttcagctttctacatatgccagttttcccagcaccatttattaaatagggaatccgttctccatttcttgtttttgtccggtttgtcaaagatcagatggttgtagatgtgtggtattatttctgaggcctctgttctgctccattggtctatatctctgttttggtaccagtaccatgctgttttggttactgaagccttgtagtgtagtttgaagtcaggtaatgtgatgcctccagctttgttctttttgcttaggattgtcttggcaatgtgggctcttttttggttccatatgaactttaaagtagttttttccaattctgtgaagaaagtcattggtagcttgatggggatggcattgaatctataaattaccttggcctgcccagcttttaaagccagcttctctggaaagtctttccaggattctgtagaggttttcttmttattatttatttatttacttgtttttttctgargatttccatagcactttcaaaattatcctgttatagagcacctgactggcttgaaactacgcatttccatatgtgtgtcttctttagggtgtaagcttctgggcagtgattaacgcatttatttttcattttctcctcccaaaacaggtagtgaacattctacataaatgctctttgaataaactcacttttggatgttgtatggggatgggggagtggaggaggtagttcgtaggtatttggggctcccaggaggaggacratatcatatacttggaaacgtaaggcttgcttttgaggctgactctcactttttctgtgagtcctgtggacagtatttaattgcctctgtctttgtttgtttscctgaaaaggaaaaactagtttaatgccaatttatttggttggctggaaataaaaacttctgattcctgtgtttttataacacaatctaattgtggcattggcacctaaagtattattttgtattaaaattaattgctttttagaaatattgggtaaagtccattttgtttaaagttccaaccctttcaaaagctataaagtccaaatgagattggarcaccaggaagacagggggaagagtcattctgttacctggttttctcccctgcctgacttctgacctgagcagaggccaagggggtgcacttgtgtgtgagtgtgtgcacatgtattgtggctgcagggtagatattgatgggaaataccacatactgaccagcacctgagtgttgaaaaggaatggaagtggggacatgagatgaaggaagaggaaagatggaagaaatcagaagtagcagtttgcaactaagagcagttaaaatgtaaagatgagattgatgcaatagttcagttcattcagaactattgaaactattgattcaatagttcagacaggatgattaaacacacctacacacacacacacacacacacacacaccccaacctaagttcatgcttgcttcaccctgagtccaaagctcttatgctaaggttggatcaaatccaaatttatttgtgtctctgtcttacccagtttacccaattctctccatctttaagtttctttggtgccaccttctggttggcccagttctatgaagtytgaatattccttcctgcctcccagtctctgaaatgtcctcgagtgaaagatgaggttgtggaggaccccgggacttgcctgcacatactactctgccttccaacatctgcagaccctagtataagctctggagaggtcttatgatgtgaggatagtgagaaacaggaatattttgttccataataaacaacctcttaagtatagagtactgttgtgcaaattatgtcatgattgtgttttcttggttcacatttattttacttagttttctgaaccctaaccataaccctaaccctacttgtttttttctgaactgcactaacatttattttaaactttaaagaatttgcactgctttagactgttgttctatatttagagtgttgcctttacactttaaaaaaatatataagctcacttttttgtttaagtaagagacacccttctgttgaaaaatatcttaggaggaagcgaaatatcttaggaggaagcraaacatccaacagtgaagatactttggttaatacagttgttccccacttccttgtctcagccactcaattcccctttcctcctgtgctctaagagacccagaagacctgtccaagacccccactaagggcatacagtttcagagctgctgcaacaggcactttgtaggccgctgggaaactggatgaggctccatctgtttatagaaatgaacacatgcacgataatttatatctctagatagagtttccaggacttttcattttgctcatttgctaattttccaaactggagcatatttttcttgtttgactacatttttcagttaaaattatacatgtttatgaaaaaaaggataatataatagaaaaaatatctgtaggatcatgagattatagataatgatttgtccttttattttcccaaatgttctcaattgtaagaacaaaaaggctgagggaaattgagatgagttggtgaactgcaatattttatgaaatagcccacgtttttatagggtttaatagatataaacaacaatgtaggacttataataatgcactaaaattataataatagtaaactgtaatagctttttagcactttaagcaaggtgcccccctagattaggctcctaccttccacagaactggttgatagggatgctatctttcttgatgattacatttcaaaaggatggcttccaggtctttgagagactgtcctgggatgtaaaactagcaagaagcttttttaaaagatttacatctcaaaggggctgataaagaatttacaatgacaagttctctaaataaaatgctttaagaaaaaggaagaaagggcctagaggcaggaggaagcctgtttagtttgtttatttagtcaagtttaggttgtctaaagttaattcaagctgaggggaatgttaagaccctcttagccaggaggatccaaaaatcaatgcatctaattaaaagtgctccctcgatgacaagattagggcttcatattttatatccatgcctatggactttctttgcaactccgtaacccagtttcagcaactcttggggaaaatggggcatctttttggagtcactttaaaaagtaattttttttttttttgtstttccagtagcctcatatttcaggccagcctatctcaaacaaaccctccaaatttggtgaaatgtatctagctgttttcacaggaagtgatgacagaaatacagtttttattgataaagaattacatatataagttttagaacattctttatagattatattggagacattaaactgaaagataattagcagcaatagggggattttgtgtaatgattaagaattcaggctctggaatcaaactgtgggtgccaggcgtttatgactacctgagggttctggaatgagttactaaacctcactcagtcttctcatctctaaagtggggcaataactatactgacctcaatgtgttattgggtgataatggaaagtgctgaaaacagtgcctggcaccaagatctttttttttttttcctgagatggagtctcactctgttgcccaggctggagtgcagtggcgtgatctcggctctctgcagcctccacctcctggggctcaagtgattctcctgcctcagccttccaagtagctgggattacaggtgcccgccaccatgcctggataatttttgaattttcaatagagatggggtttcaccttgttggccaggctggtctcgaactgctgacctcaagtgatctgcctgccttggctttccaaagtgctgggattacaggtgtgaggcaccacacccgtccgcacaaagaccttttggctgctgctataccaagggaggaagtaagcaggtgttgcagggtgtctgtgcccctgttgctaagagggatacaagtcataggccctgagattggctattttatgaataaaccagtgtttttgtttcctattggtgtgataacactttaccacaaatttagtggctgaaaaatgacacacatttattatcttatggttctggaagtcctaagtccaaaatggtacagcatagcaatgttattttctggagtctctagaagaaaatctgttccttgccttttctggcytctcgaggaggttgcattccttcatcagtggcccctatccctctgacctctgcttccgtcctcatgtctctgtctctgactctgcccctcctgcctctctcttttaaggacgctcgtgattccattaagcccactgggataactcaggataatctcagatctcaaaatacttaactgaataccatttgcaaagtccttattgccagggcagatcatgtagtcacaggttttgggaattaggagtggaagtctttggagggtggttcttccacctaccacctcagcgtccactgactgggggatgaatgactgcgtggctaccggagtcattggcttatgtgcttttccctgctgtgcctttgatgcagaccttctctgatggatgacctctgtgaagcaaatggcacttttgccatcagcttatttaaaatattgggggaagaggacaactcaagaaaygtattcttctctcccatgagcatctcctctgccctggccatggtcttcatgggggcaaagggaagcactgcagcccagatgtcccaggtatgtgtgcttgtcacaaaggaaggagaacagtgtgtttcccttgtgcttccatacagctgtctttctgtacttttgctctagctgaggcctgtggagctggaggtagaaggaggagcagctcggcagtggagaagagcagaaaggggtagaaaggtgaaatgtgttggacagatcatctcctctgatgtttatgggagaagtcaagccatagagttattttctctagatcagatcatcaatacagtctggcaaattcacatctktgataagtaggataaagtataattctgtcccacaagaaagcaaaatattccaattttgttacattttaaacttttgctaacattatatttttaatagacatgtgggtgcgtagattaactttttgttaagtgggttattttagtgcatgattatgcatcctagaagaggaatgtaacacaagtgtggacttatatcttctggagtgatttgaggaatatataatctgtttgattcaaaatggtgatgtatgaccttatctacaaaygaggtgtgggataatgctttaggaacagttctctgactattggtgaagatgtcccagataattgccaaatggatatcattttgccaccaatatcaggagtgtatagacartctcctaaaatgcacccagggaccccagttgacatccttctgtggttgtttctttcaactgattggaggagtgaggctttggactgggggtgatcgagagatataggaataaccttaattctcactctgacttgacatttaatttataatatggtctggagaacttctgtaaaattgcagatgaaacatttttagttttattgctgcttttgtttgtattacccgagttgtaattcatcccagttacttacttttttctgttctgccttccccctgaattatcgcacactgccttgctggcatgaataaatttgctagactagtggttctcacctggtgggtgggaggtaggggtcggtgggtgaatttttccttcctggggacccttgcgaagacctggagttttagatcccataactgagaggtgctactgacatctagtggatggaagccagaagwgctgcaaaaatcctacaatgcttatatgagacaaggaagtgtcctggccccaaatgtcaatgctgcattgcccacgttgagaaaccctgtgctagacaattaggccaaacctttttaaagtaggatcctgtgtggtttttttagtacagaggtttgtttggagaaagctctttgggagagtataatggcagcgttaaaagtcagtgttggtttctgttcccaggcactttgtttatacaaagacggagatattcaccraggtttccagtcacttctcagtgaagttaacagaactggcactcagtacttgcttagaactgccaacagactctttggagaaaagacgtgtgatttccttccagtaagtagtattcacatattgatgacaaagaaattgaaagtaagttagactacagaagagcagataataaagtataactgtactgacttaaaaygtgcttggaattacacttctgaaattacaattttagattttatgatgacttctgaattacgtcctttgtaaattgttactgatacacccatccctgttatcaatcccaatatgtcaattctcctgcacgcagccctgcttctcccccttaattccctgtccctgagtgaccacatcattcaacacgctgtacagagctcctccccagtcccawgtgtggttattcggctgcctcctgctgaggtagcctctcaaattctcttaaatttgcccgccctcttctgaattgcacctacaactgacacaatcgtctttctaaaatgaaaatctgttcataaaattgaggttttaaatctaagcagtttctatttacttcagcatataattccaaggttccctagtccagcctggcataatgcaatcagtgaggttcaaaaatcatgccacctgatatgcagggtgatgttgtcttaaaattagtgaactgattgcagcaagcttggccatcctattggctggaggttctgagaggactcctctaaggctcaaatacatccctgtcctggtagctgctgggtgctgttcccggaatttgcctgctctgggtttatctacctcagaaggtgactytggatcccaggaatctcctgatgaatccatttcatttttgaacatcagcctgatctastactgttgtaatacttgggacacagggagccaacctctacttttcctggtggcttggctcctccttccctctatatcctctttctttggctgaaattaaaatatttgagaacagggaatggacagaggctgggagccagtttccaggcctattatatccaaagccaggtttttgtgaggtaagttatctgggttttaatgtgttgggtacaggacttttctgattggaccccaacttacatttcaaggctcttcccctgccactgtttcccttaatcccctccctgatacacacaaacacacatacacatgtacacacacacacaaacatgcatgcaatccacacacatgcaggtgcccaagcactcacatgtacacatgtgcactcatgcacacagatgttcacacgcatgcacacgtatgaacccagttgcacacacaccctatgatccaggcctatcacgctccattcccatggggccttccttgctctgtattcttccaaccaaccatatgacccagatctaaaatgctatttccttctttgcagttcaacacgatttcttaacaatctagttcccttataaagcctctcgtttaaccaaaaccacaatactgtagttggtgctggtgatgcaaaatgagtaaaagtgtgttagactgcctagtgagggaagcaatattaaagtcagtggagagcgtttgacaaggatgctcctgtgatgttttgtggatagtggcagctcatgatgtcctgtaagtgtctgggtgtctcagctscctcttctcaggctgtggacctcctcaagccaagcaccttgcccagtaccaggcaagaataggtggcccatacatttttgttaattgcacgcatgcaccttgaartggagtgtgacctgtccaagcacttattgtasaaatgcagtaagagaaaacaaaatgcttttgcatttgtgggaacctttmccaaatgagactaaactcagtgttttgtgtttgcaggactttaaagaatactgtcagaagttctatcaggcagagctggaggagttgtcctttgctgaagacactgaagagtgcaggaagcatataaatgactgggtggcagagaagactgaaggtgagacagtttcatttctgttgatttggaattactatacaacgaggcttagattgactgggatgggacttcccagggtgttgccactgtgacctgcrtaccacaggcctgtttgtatgtgtttgctgagtttacaggccagcaatgcaactctgtcatttcttatcagatcatgaagtactgatttctaaaactaatgttgaatctctgacctcctcccctgtggaccgtgctggaaaatccctggaaaatggctcctccttggaattctgttaatcttctatctgagaggcccttccatgctcggagacagaatggcattcaattaagttgcggcttagagagggcaacatttcatgctctcatgttatctcctccgcgtggtaatgggacagctcagtagtttgatctgcagccttctccttcctttttaacttggccatggctacatttgctctcagagtgtggccttttctgaatttgttccctattctggaggtgcagcgacatggagcctgcagtgttccctgcccagaccacattccatcccaccagaaatatttctgccagttctttacttcagtaggaaaaagggggagtcatactttaaagcatcctaaatacctaacaagtaatttcgatacttgtaaacggtggaggaattaagtcacttatttcaagggccaacctagcactcattattgcatccattccatcctatgtcgcaaccactgtgtgtccagcagaagtaatgcccctgattctactgaaagccaatacaataattaccatgggaagggaagagccttttgtgttttcatacatcatctgcctagtggtctttccagttgttcaacagtactgtcacctgaggaacctagaagtttctccacaccttccccccactgccctatacctgtcactgctcttccagggctgcttatgcccttccttcccttaggctgaccacccacatttcccccagaatattagagctgaaggggaccttggagatgaccttgttaccctctcattggacaactcaatttgggcccctctattctacccccctaattcctttgccccattcacccccttcagagaggctgccttctcccattgacagatctgtgttctctcatcctttggaaagctttccttgtctgatgaggtttgaatatatgcatagagcaatgatcctcaaccaggggtagctttgccctccaggtgccattggataatggctgaagacaatcttggttgtcaaaatgggaagaaatgctgctggctaaacatcctacaatgcacaagacagcccccataacaaagaattatctggcttaaaatgacaatagcggtgaggcttggatatgatagtgccaaggttgactgccccatagtcagaatcaagactctggggtgatgttctcaactcagccacttgtcacctgtgtgcactcagcaaaagtctggcaaatgctctggtcctgaatttctacatccataaattgagggcaaaatkatagttgcccttcctacttcaagatttttttcttaagcacaaatgttacactgtgtatgccacactgctaaacaccatcgcctaattcatcagggrcccagaaagacagaactccagcctgtctctcaaccaagcctctgccttatgtgtcaaagggatttttgtaaaagaatgcttatttccccacaaattgcaataaactctcatattctttataggtaagatttcagaggtactggatgctgggacagtcgatcccctgacaaasctrgtccttgtgaatgccatttatttcaagggaaagtggaatgagcaatttgacagaaagtacacaaggggaatgctctttaaaaccaacgaggtagggaaagatttttcagatatactgctactttcttaaagtaatattacaggaaatattctcttggaaaaatgaataatttatttgacatgatcttgattttaatctatttctgaattatattatattattttattttctttgagacagggtctctttttgtcacccaggctggagtgcagtggtgtaatctcagctcactgcagcctcgacctcccaggctcaaatgattccccaaccttagcttcccaagtagctgtgactacaggtgcacaccaccaggcctggctaatttttgtattttttgtagagataaggttttgtcatattgcccaggttggtctcaaactcctggcctcaagtgatacacctgccttatcctcccaaagttctggaattacaggcaggagccactgtgcctggcttcttttctgaatgaatttaatgcctcctgtgtatctttaatggcggaaggaagagagaaacaaaaataattttggtattgatagttttgtttttccatctttgatcaaatctaccttccatctctggtcatatgatttggattggaggagaatttcttctaagccttggaattatgtttgcatgatgctattactctctgtatttagttagatacctttttgcaatatcagtggcaactatgcctatttattgccttaaaagtcaaagttatacaatcctgagcacaagaaaaaaaagttagcagatgtaaagcctaactttacsttcccttttgaatattaaaatggctgrtatcaatagttgttagcttgggatttgacatccatcaaatatgatactctcatattgcacaaagatatgaaagttaaaaatatatttgatgcaggctttaaaaacagcagaccttacacatctcttcaaggtccccttcctaagaaagccaaggccataaaaccaattctacaacaaggcaactttccagagtttggaccgtacatcttttctaaccagatccttcagcccaagggcctgaatatttatcttaacttcgataaagaatttttagttggaagcttccatgagaaagcttctctrtgaatgttctcaaaaaagcaaacacagcttcttccaaggataatgtcaatttttgtgtccttctccatttaccaaactgttttttttttctcacctggtaatatttgatctgctggaacaatagcttgttctattcaatactaagatgtactaatgaagattttatatctatcagcataaatgtgcagaaacagtaattayacacacctagagtttctgtgagttagatatatcctatttttagtaaattatacccacttttcagtaatcgaactttaatttttccgttaggaaaaaaagacagtgcagatgatgtttaaggaagctaagtttaaaatggggtatgyggatgaggtacacacccaggtcctggagctgccctatgtggaagaggagctgagcatggtcattctgcttcccgatgacaacacggacctcgccgtggtaagctccaggcaatgagcctgagtatctgtggagtccagctgagctcatttctttatgttcatctaccaattggcatttgaggagtttccagytggggttattacagkcagtgctgggtgaacatcattgtgtgtcttttgatgaacatgttcatgcatttctgttgagtgtatacrtatatgagtggacaagttttgatgaagctaagaagagagagttctaaatatattattattkggaatattattctttattctgcatggaaggtctatttgaaagcccaatgattattgcacaaaagtcctggaagaagggtagggatcaatcttggcagtgattctcaaacactaatgcacatatatgattctagtgatcttgttaaagtgcagattttgattcaatggagtgtggcctgagatgttgcatttgtaacaagattccaagtgatacagatgcttggaaccacactatgaatagcaaaagtctaaagtacaggtgggaaatttaccttatacaagaggagagaaaagtcttactgtgacagaaaaggaacagagtccaggaagggaagtggtaaacttgcaaggtaggaggtgcaagactaatagtgcacttgtaaaccagctctgggaggtgggagaagccttcatttataaagtttgctgattctcatgacatggtaaatactcccaccatggccgactttagtctactgagggtttaacaattgataggggtcagctctggcacaccaatgcacaggatgttgagggtgggctgcttgattttcctggcttccctttggaatcagaaagctactgccctaagtcagggatgacatctgttgtggccacttatgagaaaattaggagagtctagaaatagagtcaaaatcaaaacaatgctcgttggagaggagtacccacctgggctccagttgttaaagggaaggggagatgctagtggaaggcctttctcccttttttctttctaccttattgataaatagaaagagtgatggatcttgaagaatttgaagctaactccaggacaggcagaggacaaacaaggatgctgatgaagtcttcttgcattccccatttctcgtctcatgctcccttctcatgcctcccttcatcttcagatgaaacacaattccctctcttttactctgagttgccctctgatttaaccctgaatagtcccctcattagactcagaagcagagttctgagccatgctctttgtcttttgtcaaacaatctctcccactcrcagtagtatgtattgcatgaagattaatgtaatgaattggttagaattttctaaactgttaaaaaatgtttttaacatttgaaaggagttaggtacaaattgtttttattaaaaatttctgcctgtctcaggtgtttactagctcttttacacttgtctccataaaactgtgaaaagatgaaaatttgggagaaaatcttggtgtgtttataaaagaaaatatctgtagattttcttggaccagaactcaccatctaattgcatgtcattgggggaggggtaataaatgggtgtgtgggtatcaggctattgtcatctaaattttaaggtttgagtctttcttatcctaggtggaaaaagcacttacatatgagaaattcaaagcctggacaaattcagaaaagttgacaaaaagtaaggttcaagttttccttcccagattaaagctggaggagagttatgacttggagcctttccttcgaagattaggaatgatcgatgcttttgacgaagccaaggcagacttttctggaatgtcarctgagaagaatgtgcctctgtccaaggttgcycacaagtgcttcgtggaggtcaatgaggaaggcacagaggctgccgcagccactgctgtggtcaggaattcccgrtgcagcagaatggagccaagattctgtgcagaccacccttttcttttcttcatcaggcrccacaaaaccaactgcatcttgttctgtggcaggttctcttctccgtaaagaggagcaattgctgtacataccctcctttccttctacctatcttgccttaattaacattccctgtgacctagttggtgcagtggcttgaatgccaaaataaagcgtgtgcactggatagtgtgtgaaagtctttgctgaaagttccagagccattgagaataactgaggccgcagatgcatgaaatttgggcctgggaaggctatgctggttttggagtgtttggggtgcctgccattgcctctgccttcacctaagtctgtgcccattgtttcaggggatcttatggagcatctcagggcttcaggagccagccctctatgtgctcttccatccgcccggctctgcccaccaccactgccaggctgaacaggggactagtgcccaggtgacactgcacacaaagccaagggcaaaccctatagagtaaagctgcagccaccctgtgtctcatgtgcagctgaaatagtgatctgcttctgtcactgtcacatagacagccctgcatgccccctgtctcacacagtttgtaatgaagacagctccttctcatctttccataagcctgagatacaagttcagggactcagcaatgcactttaggactgagctaggaggcaaatatctgaagcttgctatgctgttctttccattccttttccctctgaaacacacaaaataccaaaggaacttacrcaacacaccactgagtcctctaactaatcatatgtgctcagacacagctcaagcacaccccttagttaagaaagaacctccatatacattaatttttttctgcctaaaaataaaattgcgttgtggcagcaatttggaaactacagcaaagtctccaaaaaaattgaagtcacccacaattccaacacacagcaatcactgctgttaatagtgatatacatccttccctattatgtgtatgcaaatagaaatttataagcattttactacaagttaatcatatccttcagtagcttatttcttcccttatgaaaaacctcccttaagatctttccaggtcatcaatttgatgtgcatagtattccactgtgtggctggatttctataattgaatctaattttagacagtttgagtaattaaaattatttctattaacaaataatagattgctaataatatatattrtgctgttttggatatactaaatatttgctcacatccttaatatattttttaaaattcctaacaatagtactgttgagataaaagttgagcacattttgagacttcttccaaattggtccctagaaagttacactggtttgtactctcacttatgtcactgtttataccaccactgactgctgcctgctttattatttctttaatgagttggactgaacagtggttaatcctgactctgtttttgactgacagttaacagttacatgaaccattcatattacagctcttacttaaatttgaccaagccaggatatatctgttaggccacattcatttagggatcatgttttccaaagcaggtttgggcaaaattaatccacaggactgaaaggtatacatctgtgagttttgttctcacttccacctctaatttgaagaacactttaattgacacagaatacatttcacatatttaacctctacaataagttctgacacattttccatgaaacaaaccatcgctatattcaagataatgaacctatctatcatactcccaaattccttcttgcatctttgtaatttctcactcttccttctccctctccccgtcccatcccaaccactgatctgctcaggcaactaccaatcttctttctgtcactatagattaatttgcatttttaaagaaatttacatacatggaaccatacatcatctatgctttgtagtatgactcctgtcactcagtacaattattttgagattcatttatgttattgtatgtatcaatagttcatcccttttattggtaagtaacatttttttgtataggtataccatgatttgttgatgaacaaatttacctgttgatgaacatttacgttgttaccaagatttttgctattgaaaataaagtttttatgaatatttatatatatacatctttgtatggacatatgtcttcatttcttttgtatatagatacatagaagtagaatggctgggtcatatggaaggtgtaagtttaactttttaaggatctgccaaattgcctttgaaagtggttgtatcatttaacattcccagtaaagcctaggagagttctggtttttctcccttctcaccaatacttggtactaccagtgttgttactttcagcgtgtaccggcttttggttgcatttccctaatgcctaattatgttcagcatttaaaaaaatgtgcttaggccgggcgcggtggctcacgcctgtaatcccagcactttgggaggccgaggcgggcggatcacgaggtaaggagatcgagaccatcccggctaaaacggtgaaaccccgtctctactaaaaatacaaaaaattagccgggcgtagtggtgggcgcctgtagtcccagctactcgggaggctgaggcaggagaatggcgtgaacccgggaggcggagcttgcagtgagccgagatcccgccactgcactccagcctgggcgacagagcgagactctgtctcaaaaaaaaaaaaaaaaaaaaaaaaaaaccaaaatgtgcttatttgctatccatatatgttctttgatgaaatgtctttttaaatgtctcatcgatattttattgcttcttgctttattttgttttcgtgtttttttttttttttttctttttgagacagagtatttctctgttgccaggctgcagggcaggggcacgatctcggctcactgcaacctccgcctcctgggttcaagcaattctcgtgcctcagacccctgagtagctgggactacaggcgtgtgccaccacagccggctaatttttgtatttttagtagatacagggtttccccatgttggccaggctggttttgaactcctgacctcaggtcatctgccctccttggcctcccaaaattctgggattacaggtatgagccaccgcacctggccttttgttttcttattgtattttgagaaatctcgtgatatggctaccaaatcttttatcatatatgtgatctgaaaacatttttctcccagctcatggcttcaattttcatttcttttttttttcaatctttattttgcacactttatttttttactatactttaagttttagggtacatgtgcacaatgtgcaggtttgttacatatgtatacatgtgccatgttggtgtgctgcacccattaactcgtcatttaacattaggtgtatctcctaatgctatccctcayccctcccccccaccccacaacaggccccgggtgtgatgttccccttcctgtgtccatgtgttctcattgttcaattcccaccatttctataacagtgcctttaaaaagcagttcttaattttgatgaagtccattttatcattttgtttctttgtttatgcttaatgcttttgttgtcatattgaaggaatgctttgcctaatccaaagtcacaaggatctcctatgtttcttccagaagtgttaccggatttaattttcctttttggcctatgatcaattttgagttcatgttttgcatatgatgaaaatgctatccattttccactgaattgcctttgcatctttgtcaaaaatcagttgatcatggatatgtggttctatttctggattctattggattccattgatctgcttgtctatcttgatgtcaattccacattgtctgaattactgtagcttaataataagttttgaaaacacttaagtgacataagttttccaactttatttttcaaagttgttttatctgctttcagtcctctatctttccctgtgaattttataatttgcttgttgacttgtacaaagcctgctgcaattttgattaggactgtgtgaattctaaatatcaatttggagagaatagacatactagcaatattgagtcttccaacccgtgaacaaggcatgtttctcattcttttaggtttttattgattaatctcagcatagttttgtagttttcagtatacaagtctggcacaaattttgtcagatttatccttaagtatattctattttgtgctattataagtggtgttgctttttaatttcaatttctgattaattgttgctagtatatggaaatataatacaggtttttttttgtatctcagccttatatcttgcaaacttgctaaaatcacttagttctagtagctgtgtttctagttccatgtctgctaataaagacaaaatttcctctttctttcacatttagatagcttttttttttctttgccttattgcactgacttgattagaagtagtgaaaacagacatccttgtctggttcctgatcttaggggaaagcacgaaggctcccatcattaaacgtgatattagctgtaggcttttcataggtgccctttaacaggtgaagaaggtctcttttattcgtagtttgttgtgtttatatcaggaatagatgttggattctgtcaaatgcttttttgtttcttttagatgatcatatggttttgttaatattgggattaatttttgaatgttgaaacaatcttgcgttactgggagaaactccacttggtcatgatgtatttcctattttgtctagtattggatgcaatttgttaaaatatttttagaattgctcatctccattcatgagagacattagtctgtactattcctattttgtaatatctttgtctcactttggttttaggtaattctggtctcaaagaatgagttgagaaacatacctacctttgcaattttctggaacagatgttgtataattggtattatttcttcctttaatgtttggtgaaaccatccgagactggagtggctttatattgcaactctattttcattaatagatagtgaactattcaaattacatatttcttcttgagttagctttggtagcttgtgtctttcaaggaatttgttcattttctagtcatcaaatttactgttgtaaagttgtttataatagtctcttatttttcttttaatagctgtaaaatctgtagtaataccatcgctctcatttctgagattagtagcttgtgcctttttctcttttctgatcagtatgactaggtgttgataaattttattgctgtttctcagaaccagcttttggtttcattgattttcactattgtttttctgtccacaacattgatttctgctctgatctttattatttcctttttctgattacttcacatttaattttttcactttttgatgtaaccgaccacgatccctgatgcactgaacaaagtaggatgaacgcgggaataaaagacaaagacaaaagagtatatttggaagaaggggtcgggggcaccttgcctctagtaggcaagggccctaaactttttcagtcctccgtatttattaggtaaaagagatagcaaaaaaagtgggggtgattgtcgggtaattgtcagtcggccgtttggttcacagcaggcttgtgacactgcatcctttgaacaataggcgctagattttccagtagataacctcaaggagcctggtgccagggagtgatgaccctcagcaaacctcttggcggcaggtgcagtgtgagtttacccacatcctgcattcatgataaacagtttgctgtttgatcatatagcctccagtggaatgctgagttggtcatgatccctttgctggctctctacattttgggtatttttttagtttttttaaggtgaaacaggtaattgacttgaaacttttcttggtttttaatataggtgtttaccaccataaaaaatttccctaagtattgatttagtggcatcaataaattttgatatcctttgcatttttattcagttcaaaatacattctgattttccttttgatttcttttttgactcatgaattatttgaaagtgtaatttttagtttccagttttgatgatttccaaagattttatgttattgacttctaattgaatctcaccatagtcagataacatgtttttaatgacttgtattcttttaagatattgagatttattttatgcccctaaatatggtctatctcaggaaatgctccatgatcacttgaaaagaatgtatattctgctgttttggggtgtagtgctctgtaaatgtgaattccatgaagttggtgatagtgttgttcaggtcttctatataattaccaatgttgtgtctgcctgttctagcaattgttgagagatgagtgttgacatgtccaactataattgttgacaggtccagctctaggtcaaaatcccatatgtgatcccataggcctgaccataggcaactacaaggcaggctgcatgggggaggtggggggaagctgccctgctcacagatttggtgcacagccagggcattgaagtgtccagtgggagctgcagtcaaggactcaggcccttgagccaggccatgcctttatgcatctctacattccgagctcagacagcttcactcagagccctccttatgaggggagcagaggccttcgctgagacactgttcaggagcctctgaagagactttcttatcaggagccttgaagacactctcttgcactcaagctcagcactcagtacttttccacttctagtccatccttcccccatcccatccctcctgtccctccccttggctcctgggtccacaaaatggcaggaaccttgcgtttgggacttctaggcaatgagacaattctcccacctctgctgcttgtcatctgacccttcctggtgctgttccatggggaaaataatggcaccatgtcctgggtagcctcttcttatcacagtaagcaaataaaagcttgactgttactttcagtggggctagttgtcctaattcaacaccttaacacctgaaagtactcacatacatgccccctctctctttctctctctctctctctctcaatttgacaaaggagctgagtggtcaattaagcacaatgcctttttggaaaaacaaaaagcctaaaagtccttcagggcacagtagaggtgctggtggttcatctgcaagagtctgagggtaccgcagaacacttgccagccatgccacggggtgtctgggaggtgccagtggaccccgcagggcacccttagagtgtgctaatgtgttgtttacagaagcttttcggttccgagggggatcattggtcctcagctgggtactacttgggctccgacagatctggcaggtttggtacactgtaacaagacccatgccattgaaaaacacttctggatgcccttcgcagaggctatagtagccccgcaagtcaccctgggggtcctctgggtctacaatgaggggctgggggaagcagaggataagactgttcaccagactcagatttcaagaatttttatgccactactgctggttatcaagcccaggtaaacctcataaggccagctcagtccgtcccagacacaatccagctattttaacaaatgcctaaggcatggaaagagtggctgcttccaagaaaacagattgcagaagcagggaggcaaagatgactatcaggcgccctctactggacgatctaggcaatgacattcccaaattgctctctgagcctgatgattcaataaaggggctctcaaaggaggagactgaagagttcctcaccaaga

SEQ ID NO: 8727 - DNA, 412555 bp, Homo sapiens
  misc_feature (1)...(412555): n = A,T,C or G, or insertion/deletion polymorphism (see Tables 1-2)
gcctggccttgtagacttttgtgtctatgagttgtaaacttccaagttgttgtaaatattataatgaaggtatgcacaagataaattgcttattcctgcttggggaaatagagaaaggatttctagaaggcttgatgtttgaactgagtcttaaaatatagatttcacaaggtggatattatggggaaggcacgccaggcaatggaaacaatattaatgaagacttaaaattgctttaacatacagttgaagaaactaaaaggtatttaaacatggttgcagcaccaggttgttggggttattggtagagatgagaaaggaaaggcagccaggggccacataatgaaaggctgacagcatgatgccaaggaatttactcttcattctgtagatcactgtttcccacttctaggaaagagggtgatcctcaaaccacataggaaactatcaattattgtcacctaagaagctgtgaaaatgcaaaatttctagactccaatccagacttcataaatctatactttttattaattcctcctgtgattctgatggctatccaagtttagggatcctagatgtaggttttcaaggtctactgcatgatatgtaatatggtgggtgccttagcagagttgcctttaagaaagatcattctagatgcagtaaaatatcagccagaaattgagagaatcatagattgggaatttattcaggaaattattataattcagaagaaaacaggggaacttgataaagagatgaatgagttcaagactaatttcagaggtgaaattaataagatggtgaccaattaaatttggcaggtgagtgaaagggaagagttaatataaattttagatttatggaattatatatcagtgtatgttgtgagtctagaataccaaaacaagaatggattttgaaaaagatatttcatatccatggaatgtggggttcatgtgtggaatcaacctagaaacattatatatcatttttaaaatctgacattctctctttgaaggttctggttttgtaaagatttgttccacaaattattcctcttaaaagacctcttaacccagcatagctgctgcttttctccaaaatttctagaaccaggtaaaattttcaactttacctttattctcactttcatggaaacagtcgtttgtagttttcatcttgatagaagagattcatttctatgcctagaaaggtaaatattgttacatataataacaatgaacagcacaaaatgcctaactgcatattaatgaaaagtaaacttaagcagtccttactaatagtatataataaaaacataattcaaaatgccattaggctagcctgtcagcagtcaaaatgcacatatgatattgtagaatttagacataagaaaaactctttatgtacacacagccatttcttctcagtaacgaataaaaatgcaaggtaaacactaagtgaagcataaaacgtttggaattaatttgactttttttacccagcttttttaagaggttctcacaattctctgaagaaattctgatccatgaactatgtaaattgctcctttacatgacatttacagtagaaagatatactcaagagattgggttgtcataagggagagaaaccttaatccagaccatytattgtaaaagcgtatacaaattgtattaatatgtagatgttctctggaaaaaataaaatacttctctcattcatccttgctgattccctatagatgataaagagactgcctttatctacattttagaaagctgaatttaaaagagttgattcgacttctacattttttagtaatatcttctggcaaaaattttatttacatatatccaggaatatccttataaatatgtgaaattgtacatatgatgtaaattaaaatttcattgaagtctctctacataaaaatttattaagtttaatacctagaaaatatgttaaaattatgctgagtcagtgacattaaaaaagaaattgtgactatctttgttgattaaaaggaaggtactccaagaaaggtaacacattttaaattttgttatcatttacatttattcaaaaatatatcgtatcacctccctccttaacatcttgctgagatcagaccactaaggaaggaagtgtgagggaagatgaaagggtgataattttatataattttaagtttctagatagaagtgtttgaagatgtgcctctgagagcagcctaaactccctgacacccagagaagtttggggaaaataagtatgcaaagcaaataaaccatgcaaaataaataaactatgcatagtaagccaaagggaagtttcacaatcttgacaatgataatccctggatacagcatgtatcgttattatacctttgctttctctactctgcctgtaccactaccactatccgatggcttatggaatgctggacccaccatcatgaaataccacacagcataggatcagaccaggagagcatctgtccactgcacagtaagggaggtaccaaagtaagcccatgactatgggatcctctgggtgtgtcctttaagaaaggaaaagaatagtaaatctaattaaaattcttgaccaacaaagggtattaagaacagaatttagaatgcatcatcctatatatctaaggaccaagttgtacaaatatttgtatggtcatgtgatttcatttcctttggtgaaatacctaagaatggaattgctgagtcctttggtaagtgtttaactatataaaaactagattacaaaaactaccaaactgttttccaaaggtgttgcacagttttgcactcccactaaaaatatacgagttccaggcactccatgtactagcaaaatttttgtgttgtcagtttatataattttaaccattctagtggatgtatagtgtcatctcactaaggtttaaatatgcatttttctaatgaccaattaatgacattgggtatcttttcatatgcttattgggctttatatatcttcttttaaaaatacctatacaaatcttttgccaagatttaaatatggtatttgtcttcatattattgagagaggggaattcattacatgttctgcatactaatacttgagtcaaatatatgtatggtaaagtttgccttttcattctttatactgtctttagaatgacagaactattattaattgtgttgataactaatttaccaatatttttcttttgtggtttgtgcttttaatatcccttaaagaaatctttgtctaatcctatgtattgatcccctttcataatgctgtaaagaactgcccaagactgggtaatttataaaagaaagaggtttaattgactcacagttctgcatgtctgtggaagcctcaggaaatttacagtcatggcagaaggggaagcaaacaccttcttcacaaggtggcaggaaggagaagtactgagcaaaggtggaagagccccttataaaaccatcagatctcctgagaactcactcactatcatgataacagcatggggaaaccagccctattattcaattacctttatttggtgttccccttgacacatggggattatggagattatgggcattacaattcaagatgagatttgggtggggaaacaaaccctaaccatatcaccttcactatgattcacttaccttcacctcatctctcccttgacacatggggattatggggattataaggattacaattcaagatgtgattttgttggggacacagccaaaccatatcattctgttcttggtccctacaaaatctcatgttgctttcactcttcgaagcaagtcatgccttcccaatagtcccccaaagtcttaatttattccagctttaacccaaaagtccaagtccaaagtctaatctgagacaaggcaggtcccttctgcctgggagcctgtaaaatcaaaagcgagttaattactttctagatacaatgggcgtacaggtattgggcaaatacaccattccaaatgggataaattggccaaaatgaaggggctaaaggccccatgcaactctgaaatccagaggggcagtcaaatcttaaagctcggaaatgatctcctttaattctatgtctcacatccaggtcacactgattcaagagctgggttcccatggtcttgggcagctctgtcctgtggctttgcagggtatagcctccctcccggctgctttcgcatattggtgttgagtgtcggcagcttttccaggcacatggtgcaagctgttggtggatctacaattctggggtctggaggatggtatccctcttctcaaagctcctctaggcagtgccccagtggggactctgtgtgggggcttcgaccccacatttcacttccttactgccctagcagaggttctccatgaggacctyacccctgcagcaaactcctgcctggacatccaggcatttccatacatcctctgaaatctaggtagaggttcccaaacctcagttcttgacttctgtgcacccacaggcccaacaccacgtggaaaccaacaaggactagggctttcaccctttgaagcaatggcctgagctgtatgttggccccttttagccatggctgggatacagggcaccaagtcccaagattgcataaagcagcaaggccctgggcccagcccaggaaaccattttttcttcctagccctctgggcctatgatgggatgggctgccatgcagacctctgataggccctggagacatttttcctattgtcttggtgactaacatttggttcctttttactcatgcaaatttctgcagccagcttgggtttcttctcagaaaatgggtttttcttttctatcccatcatcaggctgcaaattttctgaacttctatgttctgcttccctactaaacataagttccaattccaaaccacctcttcgtgaatgcataaaactgaatgctttaaatagcacccaagtcacatcttgcatgctttggggcttagaaatttcttctgccagataccctaaattatctttctttagttcaaagttccacagatctctagggcaagggcaaaatgctgccagtctatttgctaaagtatagcaagagtcaactttattccagttcccaaaaagttcctcatctccatctgagaccacctcatcctggacttcattgtccgtttcactatcagcattttggtcaaagccagtcaacaagtctgtaggaagatccaaattttcccacatctttctatgttcttctgagccctggaaactattccaacctcttcctgttacccagttccaaagttgcttccacattttcaggtatctttatagcagcacccctctctctgaggtaccaatttactgtattagtccattttcatactgctataaagaactgcctgagactgggtaacttataaaagaaagaggtttaactgattcacagtttagcatggctggggaagactcaggaaatgtacagccatagtggaaggtgaacaggaagcaaggcaccttcttcgtaaggcagcaggaaggagaagtgctgaacaaaggaggaagagccccttataaaaccatcagatctcgtgagaactcactcattgtcatgataacagcataggggaaaccaaccctactattccaatacccccacttggtgttccccttgacatgtggggattatggagattatgggcattacaattcaggatgagatttgggtggggaaacacaccctaaccatatcatcttaactatgaattttttttatacttctcttaaaagtttggcagtttagcttttatattgctctaattatctattgctgcataacaaaatgtaccacaatttagaagcttaaaacaacaaccatgtttatttggctcataaatctgcatttaagctgagtttggtaagcactgcttgtctttgttctactcaatggcagttagggcacctggaatggcagttagggcaactggaaggctgggagctgaaatcacctgaagtctcattcactcacatgtctgatggttgatattgtctatcaggtgggatcatagctggtgttgtcaggcagaacacttacctgtggcctcaccatgtggcctggtcttttttataatacgataccatggctgagttcaaacttcttgagggaaagagccagaaacaaaatgtcatacatcatatgacctagcctcaaatgtcatggtatcacctatagtctcttggagtgagttgctaaggctggtcatattcaagactggcccatattcaaaaaggctctgcattttgaaatgtggttaaatctgagcagatgtgtttaaaaccactacatacttttaaatatatgatccattttgagtaattttttagtatggtgttaggtaagaattacaagtaattatttttccaaaaggaatattccatttcagcaccattagttgaaataaatactgttttcctctttgaattacattagaatcttgttctacaaaaattaaataaccacatatgggtgggtctctttttgacawtattctttcattctattgatttatatgactatcctaacaccaatactattttttttgataactacagttttataataagtcttgaaatcatgtagtgtaagtcctccaactctgtccttattttcaaaattgttttggctattccagttatgtttatatataaagtttagactcatattgtcaatttctattttttaattstattctagttatatttacatataaattttagaatcatattgtcaatttctattttttaaaaattctactgggattttgatcagatttggataaaatctattgatcaatttgaagataactgacattttaacaatattgagatttccaattcatgaacacagtgtgttgctacatatatttaagtatttccctagggatttttgcatatattttccaatgtacaggtcttacacatatgctgttatatttatccctaagtatgttgtattttcagacacttttaacatggtaattaagaaacttcatcttycagttgttcattgctgttatataaaaatataccattttgatttggaggattttgacctttcattctgcttaattcacttaataattttagtagctgttttgtagattcctttgggttagctatgtaatcatcctttctaacctgtatgtctttcacttctttggcctggtttatatcaggccatggtacattgtttaatagaggcttcatagcaaacctacttgctatttctgatctcaggggaaaatattcaaccttttactaataagtacgatgttagctttacatttttgatagacaccttttttcaggctgagaaatctcctttctattcatagtttgctgagaacttttaacacaaatgagagttgaaatctgtcaaatatgttttggagtagtatttactaatatgatgacatgagtttctccttaatgctcttaatgtagtgaattatatttgattgattttcaaaggcaaaacgatccttagattcttagaataaatgccacacaatcatgatgtattatcctccttttatgttactaggtacaatttgctttcattaataatatttacatctaagttcagaaggaatattgtccaaagttttctgttcttttagtgtttggttttggacacagagtaacgctgaactcataaaatgatctgggaggtattcctgacacatctatttcccaaaacagtgtatataggatcgatacaatgtcttcctaaatatataatagaattggatagcgaagccatctgcccttgagcttgtgtatgtgtgtgtgttgaaaacttttgaattatgaattcaattttagatagatacagatttataaatgtcaatgtcaaagtccagttggttgatgtcttctatatactaatattctgtcaataaatcactgagaaagaagtgttcaatcagcaactgaaattgtacatttgtctgtttcttcttgcagttctataaatgtttgtgttatgttttaaggtgcataaatatttaagattttttacattcgcttgatgaatttacctctttattattatgaaatgatcctctttataaaaaattttttgtgattaaggtggtagttgaaaccaaggtttagaatgatatgtgaggataggatagggggatatagaatgagaaaaagmcaaagattaaccacagaactctagggaacaccaatgtttaaggagcaggccaaagtataggagcccattccagaaattaagatggagccaaggacaaacttgaagaagtaccatggaagagtagtgctacagaaacaagtgaaaagggaatttaataagagcatggatattgtttggttttgtgtgcctgcccaaatctcatgttgaattgtaatccccaatgttggagaggggtctggtgggaggggattggattgtggaggtggatttcccccttgctgttcttctgatacagagttctcatgagatctggctatttaaaagtgtggagcacctccccccttgctcttcctcctgctccagccatgtaagatgtgactgctttcccttccaccatgattgaaagtttcctgaggcctccccagtcatgttttctctgtggcctgctgagcagtgagccaattcaacctcttttctttagaaattacccagtctcgattcctgggcaagatggccgaataggaacagctccagtctgcagctcctagcaagatcaatgcagaaggcaggtgatttctgcatttccaactgaggtaccctgctcatctcattgggactggttagacaatgggtgcagcccacagagggggagcagaagcaggatggggcgtcacctcatccaggaagtgcaaggggttggggaactccctcccctaaccaagagaagccatgaaggactgtgccttgaygaacagtgcattctggcccagatgctatgcttttcttacagtcttggcaacccacacaccaggaaattccttcgggtgagtacaccaccagagccctgggtttcagcacaaaactggatgaccatttgggcagacaccgagctagctgcaggagtttttttttcataccccagtggtgcccagaacaccagtgagacagaaccattcactcccctggaaagggggctgaagccagggaaccaagtggtctagctcagcagatcctacccccatggagcccttcaagctaagatcgactggcttgaaattttcactgccagcacagcagtccgatgttgacctgggaygctcaagcttggtagggggaggggtgtccactattactgaggcttgagtaggctgtttcccccttacagtgtaaacaaagccgctgggaagttctaactgggcagagcccactgcagcttggcaaagccgctctagccagactgcctctctagattcctcctctctgggcagggcatctctcaaagaaaggcagcagccccagccaaccgcttaccgataaaactcccgtctccctgggacagagcatataggggaaggggtggctgtgagcacagcttcagtagactgaaatgttcctgcctgctggctctaaagaaagcagtggatctcccagcacaatgctcaagctctgctaagggacagactgcctcctcaagtgggtccctgaccgctgtgcctcctgactgggagatacctcccagcaggggtcaacagacacctcatacaggagagctctggctggcaactggtgggtgcccctctgggacaaagcttccagagraaggaacaggcagcaatatttgctgttctgcagcctctgctggtgatatccaggcaaacaggacctggagtggacctccagcaaactccagcagacctgaagcagaggggcctgttagaaggaaaactaacaaacagaaaggaatcacatcaacatcagtaaaaaggacatccacacataaaccacatctgaaggtcaccaacatcaaagaccaaaggtagataaatccacaaagataaggaaaaaccaatgcaaaaagactgaaaatcccaaaaaccagaaaggttctgtgatcctccaaaggatcacagctcctccccagcaagggaacaaaactggatggagaatgagtttgatgaattgacagaagcaggcttcagaaggtgggtaataatgaacagctctcagctaaaggagcatgttctaaaacaatgcaaggaagctaagaaccttgaaaaaatattagaggaattkctaactagaatatccagtatggagaagaacataaatgccccaatggagctgaaaaacatagcatgagaacttcatgaagcacacgcaagtatcaatagctgaatcgatcaagcagaagaaaggatatcagaaattgaagatcaacttaatgaaataaaacatgaagacacgattagagaagaaagaatgaaaaggaatgaacaaagcctccaagaaatatggaactatgtgaaaagaccaaacctatttttgattggtgtacctgaaactgatggggagaatggaagcaagttggaaaacattcttcaggatattatccaggagaacttccccaacctagcaagacaagccaacattcaaattcaggaaatacagagaacaccacaaagatactgctcgagaagagcaatccaaagacacataatcatcagattcaccaaagttgaaataccagaaaaaaatgttaagggcagccagagataaaggtcattacccacaaagggaagcccatcagactaacagtggatctctctgcagaaaacctacaagctggaagagagtataggggtcaatattcaacattcttaaagaaaagaattttcaacccagaatttcatatccagccaaactaagcttcaaaagcaaaagagaaataagatccttcacagaaaaacaaaggctgattttgtcaccaccaggcctgccttacaagagctcctgaaggaagcagtaaatatggaaaggaaaaactagtaccagccactgcaaaaacataccaaattgtaaagaccatctacattatgaagaaactgcatcaactaacgggcaaaatatccagctagcatcataataacaggatcaaattcacacataacaatattaaccttaaatgtaaatgggctaaataccctaattaaaagacacagactggcaaattggataaagagtcaagacccatcattgtgctgtattcaggagacccatctcaggtgcaaagacacacataggctcaaaataaagggatggaggaatatttaccaagcaaatgtaaagaaaaaaaaaaaaacaacaggggttgcaatcctagtctctgataaactgactttaaacctacaaagataaaaaaaagacaaagaaggccattatataatgataaagggatcaatgcaacaagaagagctaactatcctaaatatatatgcacccaatacaggagtacccagattcataaaacaagttcttagagacctacaaagagacttagactcccacacaataatagtgggagactttaacaccccactgtccatattaggcagatcgacaagtcagaaaattagcaaggatattcaggacttgaactcagctctgraccaaacagacctaataaacatctacagaactcgccaccccaaatcaacagaatacaatctcctcagcaccacatcacatttattctaaaattgaccacataattggaagtaaaacactcctcaacaaagggaaaagaacagaaatcatgacaagcagtctctcagaccacagtacaatcaaattagaactcaggattaagaaactcacccaaaaccacacaactacatggaaactgaacaacctactcctgaatgattactgggtaaatgacgaaattaagggagaaataaataagttctatgaaaccaatgagaacaaagacacaatgtaccagaatctctgggacacatttaaggcaatatttatagggaaatttatagcacttaatgcccacaggagaaagcgaggaagatctaaaatcgacaccctaacatcacagttaaaggaactagagaagcaagagcaaacaaatccaaaagctagcagaagacaaaaaataacgaagatcagagcagaactgagggagatagaaaaacaaaaaacccctcccaaaaatcagtgaatccaggagctggttttttgaaaagattcacaaaatagatagaccactagccagactagtaaagaagaaaaaaagagatcaattagacacagcaaaaaatgataaagaggatatcaccactgatcacacagaaatgcaaactaccatcagagaatgctataaacacctctatgcaaataaactagaaaatctagaagaaatggataaattcctggacacatacatcctcccaagactaaaccaggaagaagtccaatccctgaatagaccaataacaagttctgaaattgcagaagtaattaatagcctacgaaccaaaaaaagcccaggaccagacagattcacagccatattctaccagaggtacaaagaggagctggtaccattccttctgaaactattccaaacaatagaaaaagagagagactcctccctaactcattttatgaggccagcatcatcctgatgccaaaacctggcagagacacaacaagaaaagaaaatatcaggccaatatccctgaggaacattgatgcgaaaatcctcagtaaaatacttgcaaaccgaatccagcagcacatcaaaaagcttatccaccatgatcaagttggattcatccctgggatgcaaggctgtttcaacatatgcaaatcaataaacatgatccatcacataaacagaaccaatgacaaaaacaacatgttaattgatgcagaaaagtccttcaataaaattaaaaaccccttcatgctaaaacctctcaatacactaggtattgatggaacatatatcaaaatgataagagctatttatgacaaacccacagccaatatcacactgaatgggcaaaagctggaagcattccctttgaaaaccagcacaagacaaggatgccctctttcacaactcctattcaacrtagtattggaagttctggccagagcaaacaggcaagagaaagaaataaaggtattcaaataggaagaggggaagtcaaattgtctctctttgcagatgacatgattatatatttagaaaaccccatcatctcagcccaaattctccttaagctgagaagcaacttcagcaaagtctcaggatacaaaatcaatgtgcaaaaatcacaagcactcctatacactaataacagagggtcaaatcatgagtgaactcccattcataattgctacaaagaaaatacaatacctaggaatrcaacttacaggggatgtgaaggacctcttcaaggagaactacaaaccactgctcaaggaaataagagaggacacaaacaaatggaaaaacattccatgctcgtggatagaatcaatattgtgaatatggccatacggaccaaagtaatttatagattcaatgctatccccatcaagctaccattgactttcttcatagtattagaaaaaactaccttaaatttcatatggagtcagaaaagagcccatatagccaagataatcctaagcaaaaagaacaaagctggaggcatcacacttcttaacttcaaactatactacaaggatacagtaaccaaaacagcatagtactggtaccaaaacagatatatagaccaatggtacagaacagaagcctcagaaataatgccacacatctacaaccatctgatcttggacaaacctgacaaaaacaagaaatggggaaaggattccctatttaataaatggtgctgggaaaactggctagccatatgcagaaaactgaaactggaacccttccttaaaccttacacaaaaattaactcaagatggattaaagacttaaatgtaatacctaaaccataaaaagccagaagaaaacctagagaataccattcaggacagaggcatgggcaaagacttcatgactaaaacaccaaaagcaatggcaacaaaagccaaaattgacaaatgggatctaatcaaactaaagagcttctgcacagcaaaagaaactatcatcagagtgaaaaggcaacctacagaatgggagaaaatgtttgcaatctatccatctgacaaagggctaatatccagaatctacaatgaagttaaacaaatttacaagaaaaaaacaaacaaccatcaaaaagtgggcaaaggatatgaacacacacttctcaaaagraaacatttatgctccaacaaacatatgaaaaaaagctcatcatcacyggtcatcagagaaatgcaaatcaaaaccacaatgagataccatctcacgccagttagaatggcaatcattaaaaagttaggaaacaacagatgctggwgaggatgtggagaaatakgaaygcttttacactgttgggagtgtaaattacttcaaccattgtggaagacagtgtggtgattcctcaagaatctagaaccagaaataccatttgacccagcaatcccattaccagggatatacctaaaggattataagtcattctactatgaagacacacgcacatgtatgtttatttcagcactattcacaatagcaaagacttggcaccaacccaaatggccatcaatgattgactggataaagaaaatgtggcacacatacaccatggaatactatgcagcaataaaaaaggatgagttcatgtcctttgcagagacatggatgaagctggaaaccatcattctcagcaaactaatacaggaacagaaaaccaaataccacatgttctcattcataagtagtagttgaactatgagaacacacggayacagggaagcgaayatcacacacccgggcttgtgggggctaggggaaggatagcattagaagaaatacctaatgtagatggtgggttgatgggtgcagcaaaccaccatgccacatttacacctatgtaacaaacctgcacgttctgcacatgtatcctagaacttatagtataataataataataaaagaaattaccctgtcttaggtatttctttatggcagcacaagaacggactaatataagcatgtttaaaagtgtcaaatgttgcagaktcacttttaagatgtctaaatattgataatagaaggtgattttgagaagtttatcaataaaccttagcaagagcattgcaataatgagttggacttagattggatatgaaaggaaggaaagagaggtcartakgttgaaaatatattgagagaagggctatgagatgggaaagatttgatcatgtttatgtactgacatgaaaggagaattttgaagatacagaagagaggggtgattatgatcttagtgagaaggaaataaatctcgtagttataagctgattggaacaagaaccatagtatactgccaattattaattgccataattcataaaaacaacattttattactctctataaacttcagctatgatcatttctacatattttagggcactatttaactttatttccctcctaattttctttgcaggagaaatactaactacttttgacacatctggcttatcacagaagaactcatgatttaccaattgttttcctttggtttcatcagtttcctctttgtgcagtgttatgcctcatcatacaagaatgtcatgtttccccattatgttagtgtatacaagatgaagaaaatatgttttccaagtaacattctgaacataaagtacatattttccatcacttctaatttagagcacaacagtttctttytggtttctaacaggacacaaactaaatataaaatttgaagaacaccataattgcaatgatatataaaatgctatttgtgtaaatactaataaccatacatttttcttattcacatgtcaatgtgtggttttcatatacgttacatatttttaaaaggtcttaatgatgtgatgtatctgattacttagagtggcagaggcactcttcactggttactaattactgctctatcagggtttctaatcatttttgaatcacagataagcttgagaacctgatgaaaatcatgccccatgtttctagaagaaatacataaacctggacgtatatgcacatataaatttgcatacctttttggagattaaaaagcctgatttaaaggaatataattttgggatattrgggttaatgtcaaaggaaaaataaagagcataacattgaaggcatagcaacakggtttgtttgtttgtttgtttgtttgtttagttagttagctaattattttgagacaaggtttcactctgtcacccaggctggagtgcagtggctcaatcatggctcactgcagcctcgacctcccaggttcaagtaatccttccacctcagcctcccaagtagctgggactataggcatatgccactaygcccagctaatttttttgtatttttttttttgtagagacagggtttcatcatgttgcccagaatggtcttggactcctgggcttatgcaattctctcgccttggcctcccaaagtgctgggattacaggcmtgagccaccaggcccagcagcaacatggtttaaaagcaagagttttggagtcagatttggattcaagtcttgacccagcacttagcagttgggtattctcagccatgttacttaacaactcttakcttaagtatatacctatgtaaagtgaggttggagaaaggattcaattagataaaaagcaaagtacgtgacaaatgcatataatatgcagatartcgatgtttgttttaaattccagggaaacagcttcaattgaatggttctcaaaggcatgggaatttttcatttagattttgttgtttatgtttaaatctatcagatttggattaagaatctcacagaaarttaatctcaaaatccagctttctgattgctgagtctgatagaagtattgctgtgctgtatacacaccgctcaggtagtgcrcatctttggttggggtgaccttctaggggtcattcggtcaccaagtgacaggatgccatggatcagtgggcacaactaattctctttagtatttgaaatatcccatagagtgacatgttttacaaggttgttctcaatattagtcagttaaataacagaatgaaaaggtgcttaactttggcagaaaagaaaatacacatattccacaaacaagaaagataattgtgataattttatcaaatgccctaagtcaccctcatatgtttcaattatcaaaagtaatattcttgttatataataatatataataaamttccagattttaaaatgtgttataagatttcaaggatcatactagttgtgatggcagttcatttggctaagattgacatttttggcttcttaaaacagtgctctcagtcctgtagcttcagacacagcttcactaacgagggtaggaccttaatttcaatttcctcatctgttctcttatttcagccaacgaacagtatcctaaggctgtgtgctgacctcggaacatgagtctagacagaacactagaaaatgcctttaaaaggtgccatgaacaatatccaaaatatcatctcttgattgggccggacaatttattgtgccaaaatccttctatgtgtggttgcacccaaagcaggtgcttctatggaaaatatatccaagacaatttctgtctcattttactttgagcaaagccaatttttaatttaaaaagtacatgcttagatgcctctgagatgttttcctgacatagtaatccaagtaacttctgactgagacgaagggaaggtatctctctctgaagagccttatcatagagtgagagttttaaagagttttgggaaagctctgcccttctgaaattgaattttgttcaggatattgagattttaagggcattttgcctccttgccaattttattataccattattttttatttaaattacagattcttttttgtctccttctctgcaagaggctggcaccagatcacctcctgagtagagcagacattccaaaggatgtcctgccaacaataatggaaagctggatacaactgaatatgtaaaatggtacctgagatgcttagaaaactgtaaagtttaatgctgcatatccagtgcaaatgtcaaacactacagctgctgcttctacatgctgcatgaaaagcgtgtttgtgtgtgtgtgtgtgtgtatgtgtgtgtttaaattcatggcttcttttttctttgcttatgaatctctgcacatctgtcttttaaaatgtcttatttatagggtcaacatttcttgtctaatgagatgggccaaaaagatctttaatcactcacatactcacaaggaaaatgacatgtcccaaataaaagattgagcaggatttatttctaaaatatcttaaatgttctccaataacacttgacaaatataattttcaatactgactgaacttttcttccccttaggagttctacactcatttaaaataaatagtatatcgttgatggtttttgaagtctcagaatgttaagctgccttttagaaattctgagttacatagaaaacattaagaatctatcttcttaatttaaacaaatggcatggtacattccccaaacactcaaccaccataaataacactgggaatactaagaatgcatgattcaggagatgcagaaaaattgtactttcccagaaaatctgcgttttataaagaaaggcacataacctttctggaagcctcaggtattgcaccttcaaagatgattcttttattcaaccttaacctaaatcacaggattatgacaaagcataagtttaaaaataaaaaattgcttaaaatattgaaaatgtaaattcctgaagatttgaagacacatgtaatttcataagaaggrgggcttcatatggatatacagtacaaaaaatgtcttcataaagaaacaatgacttgaattgatyctacactttagggaagctattctttttaaatgagactttgaattggggacaaagaccttgacactggagtacccactatagtgtagctgatttaaagcaccaggggtttaaatggtcacaatatattattttcggtaagtacacttctggaatgtttcagtttggattaagcatcctgaaacatggatttaattaaaggagcccttcagataattatgggactgattttcaaagscatgctagatgattcagattcctagcaacattctgagctgcatcatttaaagactggtctggaagggytatcctctgagaatttatcattttccaagaactgaagaaatttcctggctgaacatctagaagtcaaaaactgagacctggagcatctttatcttaaataactatcaactttgagtgacatttaggagcctcttagaaaggcctcaaaagagcaggctcagatttaccagaataagaaaacatattgtctaaaactgagctaggaactctgggatcatccccaaattctgaccagtgaagagactcctatgtgcactcaccacactaccacagctctgctgaaggatggataaaaacaatgatctccaaaatggaagtttaggaacccacaggaattggaaaaacaagccattttggtctggaaagacaatattataaattctatctatatccactttttaattatgtccttaaaaactttttatgtatacatttaaaatgtacctaataaatgtaatatgttatgtaatgtataaataggtatacttctgtgcagacatgtgatcagcagtagataccacaaattctaaaacagtttcactttctgggacttctcatccttctcagaatggggtgtagggtcaatgggtctgctgcctggcagtacctgatagcaagctgtggggatcagctgttccatattattcacgataaagctggtgtgctgtggattcatccactcattcaacaaatatttcccaagctatgaggatgaaacagtgaaccacggagacacagttagatctatgttcacggagcttacattctcacaggagaaaagataaacaagcaagaaaatgagtaaaatgtaaagctaggcaacatcacatatccctaacgtaagacattactcatgtgatattcctgccaaaaatgattaactgtaatctaatcatgagggattaactaaaacaatgaaatttaaaaagacattctccaaagttgttaataagatgaaagacaaaaaaaaaaaaaaagctgagaactattccagattaaaggtgactaaagatatataatacaatgcaatatgtgatctttgttagaatactgaattggaaaaaaacagctataaataacattattggaacaattaaataatttaaatattgactgaatattaaacagtataattgaatccatacaatttttcctgatgcgatcattgtattgtgattatttaaaagaatgaccttgttcttgggaaatactcatggaagtagataaatccaggtgaatggaataaggtgttcattaaatattcttgctgcttctctctaagcttgaacatgttgcaagtaaaaagttgtagaataataaacaaaagckgtgtgtgtgtgtgtgtgtgtgtgtgtgtgtgtagcaatataagagaaaaaaagcaatgagggtggagatggagataattattttatgttggtgatgagagagatcctttttaaaaatatatttgcatttgaacaaagatgtagttgcagaaagaagtgagggaacagactatgcagctatctgggagacaagactttcaagcagcatatctgccatatttgaagacagaaaagataccaatgagacaaaagcagagtgaacaagagggaagacagaaggagatgaggtcagataagtagctcagagtaaggtcattgttgaacctcataaggaatgatggcatcattggaattttmctctgagtaggagaaaaatcactggaggtttttgaaccaaaatatcatatgatctattttgatgctactataaatgggattattttcttaattttattttacacttgttcactgctagtacatagaaaaacaattgattttgtgtactgatgttgtatcctacaaacttattaagttttagcactgcaaaacatttcattgtatgaatgtatcacagtttgtgcattcacctactgaagggcatctcggttactttcaatttttggcaatcatgaataaaactgctataaacatccatgtgcaggtttttggtatggacatagttttcaacccatttgggtaaataccaaagagcatgatttcaggatcatatgttaagagtctatttaattttgtaagaaactgagcaagactgttttctaaagtggctgtaccattttgcatttcaccagcaatgaatgagagttcctgttgctccacactctcatcagcatttggtattgtcactgtttttaattttagccattgtaagagatatgtagtagaaattacttttttaccctctataacgaacccctcccccagccccacgcacacacacacgaatttaaagtcaaagctgaagtatcaaatcatcactttttggactgaacatgaaattttttcagtagacgaatttgtgctaagcttgaatcacaccacactacacaaggtgagagcattgtaagatgctctgttttcatgcctgcaagtgatagattatgccagagttgcaggtttgaccaacattcatatctgatatgagcaataagatgcaaatatacatggtctgaataaagtgccattgtgcacatattctttaaatagattccttctagtctaagggttctaacagaacatcttgtaaatgcgtggcatcttcaataaaaatcttataagcttttcttaaaagatttcaaaaagcatctttttcttgaattttaaatgcagaaagaccttaaagtttatttagaccaagtctgtctttttttaccagcggcagaggaggcccagaaaggtaaagtaatttacccagcttatgtgttggattatttgtggtagatcagtcacaggaactctactccacaccctttccattgtataatacaatggtgccccttgaaattggctgtgaattatgtctttccagctgcaaattctgctttcctgtctacctaagcaactacaactcacctatcgtcgcatcttctgcttcataaaagctctatctccttttgaaatgataaatcttccacttataacgttaaaattgatgacagtgataattccaaaattgactactcacaagtttaaattttccttaaataaatttcaaagccaataatctgtttatctgaattgtttaaaattttcccatccctctttttctgtcatcttcttctcttaaaaccctccccacatagagtgagccatgatttcctttctatgctttccctgcactttggcatctcttccttccctagtggaatctattttaggttcatgaaatctcctattttaatgatctcttgggcaactatcttttacgttctttttattttggggatttgtatacttcaccttctctgttcaaatcctatgattccaatctattaagagatatgatgtactgtagattagttccctagtaacagaaatgttcttccatgtcagttataaaataataggaaattatataagcaaaaacagcagcagtaatttgttccctgatttcataaattaagaaaaatatcatctgaacaaacatcaaaatcatgttatgattaaaaactctattaatcaaagatataattagtgtgctcaaatatgagattgctgaagtattgggacttatgactagaagaatatagagaagcttccatgaatattctctggaaaaattaaaaatgataaataaataagaagccaggaagtaactgtgagtgaggagatgcagatgtttcagagaaakaaaacatcgccttaatgttgctatggctgtatttaaatataataagtgtacacaatgacagattatcccaagacaagaggtaatcattatgagatacttataatagctgggttctacttcaatgtctaattgaaatatcagacatcacacatgttcagmagatataattacaccataatcatcctaaagatagaatgcaaacttaagtatgatgctaatggagatgaagaggatgggtttttgaagatatggaagaaagttggattagaaatagaaaataaaccagttctctcagacatcagtggttgatacatttcattcacattgytcttttattttattaatttattaatttagtctatttagactagtcacactattattattattattatttttgagacagagtctcactctgtcactcaggctggagtgcagtggtgctacctcagatctcggctcactgcaagctccgcctcccaggttcacaccattctcccagctgcagcctcccaagtagctgagactacaggtgcccaccaccacacccagctaatattttgtatttttagtagagacgggggtttcacygtgttacccaggatggtcttgatctcctgacctcgtgatctgcccgcctcagcctcccaaagtgctgggattacaggcatgttatttttttctataacatgtagtatgttcaatattcaaacttttgagaaagtaccatgacagttaaatattgaaactatagatactgtaagcctgttcctaggaaagacttcagaatatatatctctttkctaaacatttcagtgtatttgattattcaatactaccatttaatgttatagtgtacagaatagtactggacaaacacaactcattcttgggatgcaatcttaaaacaacattttttcccccactgcctgttaattttattaggagaggctagactttccttatccttggaaataacagtttcaatatggatagtaaaatgtctagaactatgtaatagttaaaactctgagtttatttaaaattagggtatctctcacagtatagagcatgtactccttcctcagctcatagaaacatgataatgccctcacttcccttggtcaaggtcccttcatccttcagtctaggctaccctcttagacaggaccttccccatgttaacgttcatctccagaacctaattcacaggttacttgtatacattccctaataccaataaaacctcaaagtgcaggacgcccagtgaggccactctcctcttgctaattgcaaacatgcagtttgctatttctcatcctagagatttcacacatgacagcaagatcccactcttggagtggtctcattaaagcctcctttctacatgtcagactaacaggtaatgcaaccttatccctttgaggggagacatggctatttacagcactcagtgctctctcttaagaaattttccttgcattgtctcattaaagacccttttcccaggaaaagggtctttaagcaaggagatttttgcatcagacctctaacaggtctttctaaagaaattgtccccagatcctctctgaacctgacacatactgatccttttattttgcagatgttaatgaagaattgaagagcactgtatctagttttctgctctcccctgtaagtattaacatttatactgccacttcactttggaatgtcatattaattgttctcagcacctcagtttaaactaccaactcttttttggtagtaccagctaccagtaattccacacaccaggattaaatggcaaaaacctaagtaatgatggtgaaaatacttcaagaaatgtatatagtttttaaaaatcgaattatctgtcacctgagtcatttaatgtttataaatagaaagccttgattttcatgtggctctggataattgcagagccattctggcgtcaaaactaggtccaacagaactttagggaaacatgccccagtgcttaataaatacttgcaagtakaagatgcaaaacggtccactgaacaatctccatctaggccctttgcatctggccaagatgaagtgagcgggggtgcctcagttttatatctaaatgcccagcawgttcaggtcatcagtctgtccatgacaatctgggattacggtacaaattagcaagaccagcaactcaaactaggtccattgttggtcaagccattatggcatctatgctggttcatgtgtctggcccaggcagcatgagtgtgatagacagtgtgcctaaactattaatagtaagtatatccagatcatcagtctcttcacaatgggcactgttgaagagttggtccagatgttggccatatgtttcatctttcatatatatccttaattatggtctatgctctagctgggaatgcctaaaggtggctgtggttgagtaggaggagtgggatggggttttcaccagcatttaccaagatttgggtcctttctgccttctggcctggccactaggcctcttagatgagttaactccaaccccactggatggagactctgtcacctaccatcctccacttctacctcattggttctaccactgtctcctcccaagccccctaagaaaaatacttcagcaatagtgcacaggactagccataggagatacttggtctcctcgacactgtctatgtggccttagaaaggtcactttagttctctgggcttcactttcctcctctttaaaattagaacaataataatatttgccttgtagggctctygtgaggatttaacgagctcattcatgcagcaactctaagtcactaatcaatacatttggtggatactagagattttactgattagagagatcacatgaaaacttcttgcaaccaaacacagcacacctaagatataccatatatgcacataatgtggtatatacatatagatataagttctacacactgacaggtatttgatttccttcactacatgctttgaaatgttttgctacaattatagaattaagtttcaaaaatacatgtaatggtgaaaatattttaytcataattctaaggtaattayccctgaaatatttatttttatatattaaaatttgatatcaagtattcacttctattaagaaacagagatggataagtttaagtgtcagacccaggagcaaatctttgccaagacctgttaagtaagtctccaactcacaaaaatgcctattccacatttatcagatgaaggcaagtggagaagaagggatttctttatatcttttgtaggcctccaaggattaggtcagtgaaatgaggtcctagtcctaatctgacactggctctgtccagcaattgaaagatttactatttgtggacctcgattttcacatgtgtcagtgaagaggttagtgcttgattgctttgtgctgcaatgagcagaaagcccygtctcaactattttaaacaatcatgasacatcatatctcaagagtaagacttccataagttgaacgggctccatgcacagtagttcaggatcactgcactgctcctctgtgatgctcttggccccatgcttgtccatgtkcaggcttcagaccagckggcttcactcatgatcacaagataggggttactgagccacatatcacttacrccatgataagatataattgaagaaggggtgatttctatgaacaagaaaacctttccctggttcactccagcagtctttcttcaggactcattggctaggatgaaatcacatgtccctttccaaaagcagtcataaagtttccacaactgggtaaaataagatttactggagtcatgttgggaagtttgttaaytgctttaagaactaggcttttattgaaaaggctttggagcaggcaacgaatggtgcttgctatcctcacttaggtatcttttagttgtaaaagaatgagtctgaggtatttctgtcattgcctgattaataatgccatgctaagtcatcatttaatgcaacattgaaatagctggcttcaagaagacaaataaagattgtatataagtcatgggggaagcaaacaagatttatgttcaaaagaggttcaaatattctgaaaattacatacgtagttttggaatggcccaatgatagggcaaaaggggtggtgatcaattatacttyctttatttacatttccatgaaataataaaatatgccaggctttcctaagataccaaaggaargctgggaaaagcaaattgcatcctggctaccaagtcagaagtcagcctaaaccaagaagtagatcagcgatgcttaaataatcagaaatgcaactgwaatcagaaaaacaatcttgtgaaagctcagttcttaaaataaattcccattgtttccatctacagttattctctatcttttggatagtagagcatagtcaggatttccattagaaaaaaattttttttgttgttcatgtgctttccttcttccttgggcttttttacctatctttctttctttctttttcttcctttctttcttccccactaatattcccctccctctttctctttctgtcttattctcttaagaccagtaacattgtttctccatttgggagaaaatactcagtggcgttctgaagatggctcatactggctcactacagctaactgtgcacatccttccgaactctgaggtcagtaaaagtttttaatagcttgaaattgtccacaatgggataatttacacaacagaatttggcaagcactacaaatcacagcttactctttttggtttcttgttgtttttccagaaagctagatcaccagcataccactagagacagcatatcagaatgactaacagcaaggattctggtctgatactattttagttcgagcacagtcatcctttggtatccttggggaattggttccagaacccccctggataccaaaatccatggatgctcaagccgcctatataaaatttatataacctatgcaattcccccacatactttaaatcatctctagatwacttataatacctactagattataaatgctatgtaaatagtcattaaactgtattgtttaaggaataatgacaagaaaaaaagtctatacatgttcagtacagatataaccattcattttcaatyggtgattggttaaaatcacggatgcaaactccatggacacaagggccagctgtactgtctttcccatttaatttttctgaccatcagtaaaatagtaataataatacatatcccataggctaagaatagaatgggacaatgctttttacaagtgttattatttgtggtaaagatcatcacaaattctttgtttaaaaggcacaatttgtatccccttccctagaatgagtgtggctttgtgactgcttgtacaatacactctgatgtcaggaatgatgttccagtttccaggcccaggcctccaagaaactggcagctttcacttcctgtctcctgaaatgttctttctggtgtatattagggatcttcagggaagtataacccataggatagataggtgtatatataaggcttttttttttttttttaaagtaattggctcacacgcttgtggggactggcaagtgtaaaatcttcagagcaggctggtaggttggagacccagagaagggctgatgctgcggtttcaagtcaaaggcaacttggaggcagaattccttcttccctgggcctcagacttttcctcttcaggcattcaacttattggatgaagcccactcacattatggaggatactctgttttacccaaagtctactgatttaaatattaatcacatctaaaacacaccttctcagcaacatctagacagtcatttgaccaaacatctgggcactgtagccaagatgacacatataattaatcatcacatagggtagccaactccaggtaggaagtccaattatatggtgcagagatcaaatacagaggccccgagactatgtggagatggacaggggacaggctgagaccagccttccaaatttccctatcaaagcacaaaacatgtgagtgaagccatactggggtcctccagttcatcccagttgtaatggttaatgttaggtgtcaactcgattrgatcgaaagatacstaaatggctggtaaagtattgtttctgggtgtgtctatgggggtgtggccagaggagattgacatttgagttgttagactgggagaggaagatccaccctcagtatgggtgggtaccattcaatcagctgccagtgcggctagaagaaagcaggcggaagatggtgggataaccttgcttccttggtcttctggctttcttctttctcctgtgctggatgcttcctctcgctcctcctgcccttgggcatcagactccaggttctttggcctttggactcttggacttgtaccagcggtttactgggagctctcagaccttcggccacagactgaaggctgcactgtcagcttccctggttttgaggctttcagactcagactgagccactactggcttttctcttacctagcttgcagatggcttattgtgggacttcaacttgtgatcgtgtaagccagttctccctaataaactttctttcatatatacatatatcctattagtcctgtccctctggagagttctgattaatacagattttggtactggggtggttctagaggaatgaattttaaggatggatttctctagtcggttttggggttcctggctctttaatctggttagacctaaccagattaactacttaacgactctatttctaatagtgtggagagcactgatagtccttggcgtgaattgtttagagagttgtgcaaaataaacgcatttgatattcctgattcaccactcttgaaaggcaaggagtttagtgactctatacatgatacctttgaacatttgtagagaaccaaggaatataatgaagttgtttggttgctcctaagtttgctggagaaagtgatgaaagaaaagaatgagctcagggattccatctcccatctcctggctccagaagcacatacttagcctcaaatcttctaagattgccctgggtgagagtcttatgtcttgtagacaaagggctgaaattgctaaaaatcagacacgagttcttcatgtgaatagctgacctgcaacaaaagatacaggctcagtctcaccagatgtcgactgttaaaatgagggcattcattgggaaagaatgggaccctgtaacttgggatggggatgtgttggaggaccttgatgaagctggagacactgagctcctaaattctgatgagccttttgtgtcagaggaaatggcctccccacccctagtggtggtaacatcccctccccacccaggctgccatcagcctttccacctttgtctgagattgcactgcctgaggcaacagtgatggtctcccctgatgcagttgccaggcaaggaaatgctgattctcctcaggaccaacccccaccacccctctttgcttctaccctgtaactagactcaagtcccagtaggcccctaaaggtgaggttcagagtgtgacccataaggaggtgcgccatactccaagagaactacttgagctttctaaattatataagtggagatccagagaacaggtatgggaatggatattaagggtgtgggataacggtagaaggaacataaagttgtatcaggcagaatttattcatatgggcccactaagcagagattttgcatttaaggttgcagcagggggaatttaaaaaggttctaatagtttatttccttggttagctgaatcatggatcaaaagatggtccactatgagcgagctggaaatgcctgatctcccttggtttaatgtaggggaagggattcaaaggcttagggagattggaatgctagagtggattagtcattttagactttctcatcccaactgagaaggtccagargacacatccttcaccaataccttgtaaaatagatttgtgaggggagcacctgcgtccttgaagagctctgtgattgctcttctcggtatgccagatcttacaatggaaattaattttccctcaatgggaaaacttaaatgcaataggaataattggatcccaaggtggcatgggacaagtggcagcactcaaccatcaaaggcaagttgggcatagttactgtaatggacaacagaggcaaagcagcaagcagaatagtctgacacgtgtagagctctggcattggctaattaatcacagtgttcctggaagtaaaattgacaggaaacttactgcattcttacttaatttgtataagcagaaaacttccaggtcaagtaracaaaagactaatttgaattatgaaaacagagcatgatggcttttcaatcaattttcagatttgagccagtttacagacctagaaccccttaaatggaggggaggcctsttcccttaaggaaggaccccccactacactaccaacaatttttactgttaatctttctcccatccttccccaaggagacttctggccttttaccaaggtaacwgtgcattagggaaagggaaatgatgagatcttctggggactactggacactggctctgagctgacattgattccaaaaatgtcaaaacatcgtgatcctccagttagtgtagggacttatggaggtcaggtaattaatagggtgttagtttggtccaacttacagtgagtccagtgggtccccggactcatcctgtagtcacttcccaatgtcagaatgcataattagcatagacatatgcagcagctggcagaatccccacattggttctctgacctgtggggtgagggctattatggtggaaaaggccaaatggaggcgattagagctgcctctacctagaaaaaacaatattgcatccctggaaggatttcagagattactgccaccatcaagaacttgaaagacgcaggggtggtgattcccaccacatctctgttgaactctcctatttgttctgtgcaraagacagatggattttggaaaatgacagtggattagcacaaacttaaccaagtggtgactccaactgcagctgctgtaccagatgtggtctcattgcttgagcaaattaagaaacctcctggtacctggtatgcagctattaatttgacaaatgcctttttctccattyccgtccataatgtcctaccttatgggtatatcaactctcccgctctgtgtcataatcttgttcacagagatcttgattacttttccctttcacaagatatcacactggaccattacattgatgaaattacactgactggacccagtgagtgagaagtagcaaccacaytgagaatttgcatgccagggtatgggcaataaatccgactaaaattcagcaactgtctacctcagtgaaatttctaggagtccgggctgcggggcctgtcaatcaaaaggtggaagtggaagtggtatcactcaccatcacccctagtgactcaccaacaaaacgtttgcttcctgttcccatggcattacgttctgctggcctaagaggtcttagttcctgagggaggaaagctgctaccaggacacacaacgattccattaaactggaatttaagattgccacttggccactttgggctcctccttcctctaagtcaagaggctaagaagggagttacagtgttggtggaggtgattgaccagacaatcargatgaaatcagactactctacaatggaagtaaggaagagtatgtcaggaatacaggagatcccttagggtgtctctcattattacaatgcccatgattaaggtcaatgggaaactagttacccaatccagacaggaygaaaaatggcccagacccttcaggaatgaaggtttgggttccttcaccaggcgaaaaccaacaacaggccagggtacttgcttaaggcaaaaagaatacagaaggggtagaagaagctagtcatcaataccagctatgaccatgtgaccagttgcagaaacaaggactgtaattatcatgagtatttcctccttactttgttaagaacatgtttgtgcatgtataacctgtactaggaaagtatcttcattttatttcctttttcctttatcatgtaacataagttttattgatttcctatcagcatttaagtgttgttaggttaaggattagtgcacttccagtygtatgaagcatagttgtattaygttaggtccaattatgaccttattattgtctttatttagggattaagtatgatttcaggtgacgtatatgggtgccaagttgacaaggggtggacttgtgatagttaaggttaggtgtcaacttgattgattggattaaaatatacctaggctgggcgaggtggctcacacctgtaatcccagcagtttgggaggccgaggcagatggatcacgaggtcaggagttcaacaccagcctggccaagatggtgaacccccatctgtactaaaactacaaaaattagctgggtgtggtggcaggtgcttgtaatcccagctacttgggaggctgaggcaggagaaccatttgaacccaggtggcagaggttgcagtgagttgagatcacgccactgcactttagccaaggcaacagagtgagactccgtctcaaaaaaaaaaaaaaaagatacctagatggctggttaagtatttgtctgtgagggtgttgccagaggagatttacattttaagttgctggactgggagaggaagacccamcctcaatgtgtgtggacaccatccaatcagctgccagtccagctagaacaaaagcaggtggaagaaggtaagataacttttcttgttgattcttctggcttcctgctttttcctgggctggatgcttcctcctgctcctcctgcccttggacatcagacttcaggttcttcagcttttggactcttggacttgcactagtggtttgccaggagttcttgggccttcaaccatagactgaaggctacactgttggattctctggttttgaggctttcagacccagattgagccactaccagcttctctcttccccagcctgcctatcgtaggacttcgctttgtgatcaaggagtcaattctccctaataaactycccttcgtatatacatatatcctatcagttctgtccctctagagaaccctgagtaatatacaccagtcatcagctgaataccaccaacttctacccagtcaataactatgtggagcaaaaggatcacccagctgagtcctgcttgtatttctgacatacaaaatcataatatatttaaaatatttatgcagtaagtcactaagttttggggtagttctttacacaagaagagataactgaacactatctatctttatttaaaccaggctttgtttaggatatagttatgctataattaaacttatttttaggttattttaggtttccaagcctcatgatgagattaaggtgtgttccttgtgtgttcctttctgacagcagacaggtctgaatttgtccaagtgcatttgcatgaaaaactgaggcgattcctggaaagtgaaagattctgaagaaaaactagttttgcagataatcctgacccactttactcatgaggatgcataggcttttgtaaaastgcttgctctctgcctttctactcagcctcacatgaattagtgccttatgtagaaatgagatcaccatgtgctgggagtgagctgtggggaggaagaacactataattaaagcctgaaggagttatctcagtcaaattttcataagctatcaatcacaagcatcttgtaagtacccctttttgacaaaacatagctttggttcccccaaacctcagcacattagaggaatagtgcccaacaggtcatggcaatytttaaagagcgagtatgacatggtttggctctgtgtccccaccyaaatctcatctcgaactgtaatccccacttatcaagggagggacctggtggaagttgattggatcatggggacagtttccaccgtgctgttcttgtgatagtcagtgagttctcacaagatctaatggttttaaaagtgtttggtagttccctccttgtgctctgtttctcaccttttgccatgtaagacttgccttgcttccccttccccttctgccatgattgtaagttttctacatgtaagccatgtgaaactgtgactcaattaaatctctttcatttataaattacccagtcttaggtagtatcattatagcagtgtgagaatgaactaatacagaggggttataccagtcaggagtggcagaacttaacagaagccatgtcaatgcccattgactccactgtgcctggcttgctagaatcagggagaaagggtcaggaaaagagaaatcaaacaggagatccatgtgttcatcacaggagagcatgagtaacaatctcccaggcacacttgactattagaaaagtttcaggaagctgagattctgcaggtggagtgagaaccgtcaaaatgtgcgtctgcactctcttaacccagcaccgtttatccagctctctagattcactaacttccaactttccccctgtaaaacaattagaataatgcctgtggcatgacaaacatgcatcagtaggaagccaatctctgccatggccacacaatttggctgtgaccacatgagtgattatcaagaatcagtcattctcctacaaaatatatcatatctattactgcaaaaacaaayttgtgttaaatatgtaaaccaataaaaatgtatgtgaaaattgtttctctgaaaaatacctcagtaagctttcaataaagactttaaagtcactataaaagatactgtcaatttgggcaaatgtgataaaattgtcaaagattaaaacaaaaatgtagaaaaattctgcattcagattccttcacaactctaagttcttgtcacttcttaaagaaatcaaatctggaacttatattctaaggsgaaaaagtcttgatatctttaggggatactaaagataacctttgtctttcttgctttgctctgatagcctttgagaatcaaatggcattctataaagtgctgttccatctccttctataaacctcatgtagagggtagatttaggctaatattcatttgcacacaccctcctataaaataggatwactttttttttgactgctgttgatttaacttatttttctgagtttctccttttcttgaataattcttgatatttagatttagtatatgctttctatatttttaaattttcattgactattaacaaataatttttgtgcttgtctaagtttgtcagcttacacaatctcatttggaaagtgaaagaccgaattgtccatccttgtataaaaacctggtttcttatgtttgatgtgaatttactaaaaaaaaaaactccagatatgaaaagtgtgcatcgattctaaccctttgttctcagttagtgtaagtaaactagcttccatacaaataagcccttaagtctcggtgatgtacacaatatgagtccatctctcataccaagtttggttctgagtttctggttagcatcattttggaaccataacttttcccatcatgtggttccagtattccttaaagcctgggaatcctctcctggattctctacataagcccagcaaactaatgtagagaataagaattggaaatggtgcaaacattttcagtggaccaggcctgaaagagaaacacatcaattttgtgcatattgcattagatagtattcagttactcggcaacatcaaactgcaaagaaactgctgagtcaaataaatgcagtcaaataaatgcagtcaaataaatgggatatgtagtctaactgtgttttctggaggaagtttgaatgagcacatagcagcctctttctcataagtcctccactacatataatatttccaatacataatgataaacttattctgtgtcttaaaatgatatttagaagtaaacatgaggaatgcagaggaaaactttcttcttttcaaattgtattgccctccctaacataaagaatcaagaattaagctaaacctctcctgtaatgagctataatgtattatgaattactgctaccagtgaacaagctgcttcatcattataatgtgcattgtaaattgccttccatagtgttacacaggtagttttgtaatgtaggtattacttctataaaaataaaaggaaacactcagaaaatatgaactattagggaaataagccctgagtagagatgatttttaaagcaaatttgattgttattgcctattttcaattgaaacaatgtagttgcttgattgacttgagttttttaaactaatgttaaaaatgttttaattgcacaaagataattacaggttacagaaacttgatttgtgttcactttagactctagaagtctgtataaaaaccaaatgtgatatgagaataatagaataataatttaatatgtggagaatatatttcatgaaagcttactccaaagaaaaccaagctagaattacataaattagagctctaaaaacattcttgttaatttataatttggaaatgaaataaccatatttaacttagaagaaatattcaaaatgattaatttaacatgtttcacccaaaaattctttagatgttgcatagcattcttaaactataatccagataaactttaaactatgacagaaaatatctcagttgtgtatacctaatgttttaaattaatatccagaataaatacattgtatattatatagcattaayggactctcttcttataaaacgccacttctgcagtccctttaggagaaagataatctgcttgtctttctgtcttctttgaatgacctcctgaaaaaaaagaaaatgatgcctccttggccacatttaaaaaatcattttctagtcagcagtgcttaattctccccatccatttattcatccaagcacaggccaagaatattctggcatatttcagagctagaggattgaatgggtggtgtctgatagtttgctttttggaacagttatcattactggtggaataatgatttatttgaccagagtgtctgaggaacaaattggagaagcctgggaagcygaactgagtgcaaataaaacagtgtagtagatgagatttatgttcagcattcttgatcacttcattttcaytaattctccctccttaagttcctcactgtggagcycagctggtatgtaacttcaggcagtgcactgcaatctgaacctttatttctcttctttctttcctcttggattccatttcctctagccctcctcattaacctggatgacatgcattgaataatcaattaatctttagtaatatgtgagaacacatcagtgccttgatatattactcctacatatcattagtattttcacacagaactatgggacatgaaaagctttaatttctctcttggcaactgataaagaattcaggcaggccactccctggctttcaaatctgaaccatatctgtaatatatatgtagccttctccttcaatagtgagccattagttttatttcctccttaatatgttatgagataatgggtttatatgaagagaataatctattagagatttgtgtaactcmcattataagaagactctgattgttgtgttattttagactacattaactctataagatgttggtcttaatctcaaatgcctacaggaattaggtaaaataatggtgtgaatctggcagtacatacacccacctaaagaattgaaattcaactgtcttaaactttatgygggctacattaaatgtgtttgcatcctctgctttaaagcctgtgataacaagacaatacctctgtggtaaaagacaggaggcttcacaggacaaagtgatgtcttgggctcttcactttgggatacaagaattgagatctcaagaaaggtcgaggttactttgtctttctcggtcttgttgatggaggaaaagtcaagctatctaattggcaatttagggagtagacctgatcaccaaacagtaatattcaatgtttctaaaaacatgttcatgtgtaaagtaaacgaatggtgagattatgggaatttaacttttttcctcataatttaatctttctttctttctttctttctttkttttgacatrgtctcattctgttgccaggttgaagttcaatgttgcaatcacagctcactacagcctcaacctccacagctcaagccatcctcccactccagcctcttgagtagctgggagtacaggtgcgagccaccacgcccagctaatttttgatgttttgtagagatggggttttgccatgttgcccaggttgatctcaaactcctgagctcaagtaaaccacccacctcaacctccccaaatgctgagattataggcatgagtcaccgtgcctggcccaatctattttaagtgtaacacaataagcaaatrctgcttttataataagataacaatgaagtttcttttcattaagatcaatatgcttacaaggcaatgtttacaccaatatgtttataagactatgtccaagaggcaggcattaggatagyggcaaccacagggagccaggccaggatgtgaggaggtctcctaagaactgtgggtgcttgcatctccagaaaggatgcaaagcasagccctctgtactagtagactcagaatcatgtactatgcatgtcaaactgtctatattgcttacacattctgcatatttgtcatttcttcactggttgttttgaagctccagcctgcctaagctgggttaatggaaataagagaaaaagcttctgtccatatttgagcagaagggtagagaggaacaaactcctggaaatccactgggcgggtagagtgtacatctgaaagtcagctgagcctgtttatccttccaaagtcatgctgggaattcaggatttacacctgggacgggaggacagtccccataataggtacagaataagtcagctcataagtacagaaattgagggtgaagtttagaaaacttttatgatgatttgacattaatatgacataaaagcacataatttttttcctaaaaatttatttccattataaggtattattctgtaatagattagagatttttttaaaagactggtcttttaccctacataatttaaaacacaccattatagaaggctttgaaaatgtataatgggtacaattttatttttccacatattaggtcagattcactcactcaaacaaggtcctcctttaaaaagtgcagcatttattctaaattcgggaataattttttatattttcagagttaatgctgattgaaaccataaagcacacaggtaaattctatactcatctcacaaaccataccaagaatagctattatcaacaaattatgacaccttttgcactttcagcaattcccctaatgaaacatattatctttactatggtagttcttttaagaattcyggtaactacttagaaatgttaacaagatgattcacaagcaaagggtagtacaaattctcctatgcctaaacaaggatatatttctgagtgtctaagatttcccctgacaaaatacattaaataaagaaaatctttgctattgtctttccatttcaaccacaaattgggatgacccaggagcttgggcaaggttgcatgctcagaattttcgttcattttaaccaaaatgaacattattattcatttgttcaacaaatatttattgagggcctatcatgtgccaagcattcttcttacatggaaaaagaggagtaaaccaaacacacacaaatcactatcctcctggaaatgacaccctagcacggagttttcattctaagggagctgttctggggagtgcacatctctgctgcctgtgcccctccttgtccaactctttcataaaccctctttggtgctcagcccatttcttgcaaagcataataacattgaaccattattttttatatacaaattatgagacgtactgggatctagttctgggattctctgtaagaattcattctaasgtgacaaatcaataagatcatgagaaggctgtttatgtctgcatgtgaggatgtgggagactcttaaaatacctagagagatatgattttggacagaagagaactgaggttctgtgtcgtaaaaastggtagcttcaagttaacaaatttgagaactgacatttttctaatatatttgtcccaaggctatgtgaaaccttggttatacacttaatggcccaacaccccaatcaacttttctatcatcaattcctcayctttaatgattaataattttggtaactaatagaatgactattaatgattaaatcacccaaaccttataacacaaattttaacccttctattccagagaagacttggcctaggtgaaagcttagctctgtaggtaagcaattaagaaggcacggtgttaaaaaggtattgatgaaggtgtctgcagatagaagggacaacacacatttgtttattcatgagtaaggaattgcccagatatatcctcattttagtctgcatcaaatcaagtttccagggagtcgcaggagaagttctctattttagtttttaacrtggctacaattatgaggacattaaatgtctcattatcttcaaggtaatattaatagcttaattttctgttcagtgtgagtccacgaatgtacatccatggcctgcacttaatatgtagttttcattattggagacttaactatggaaatgcttccctggattgaaatgtatgcatagaatgtagacacatcaattcatttatttactaaaattgcacagactatttataaatgtgtttttcaaaatgttctgttttgtgtaagcattcacttagcagatttattccatctgggcttatgcatgacaaagattctttacaagtttacagaatgatggactgagctatagcttccagaaaatattttttagttaacaagtgcaggaaatctttaggtccccattgaacagaagataatgtggatagttcaaccatatataagaccttctccctcccacccaccccaacagatacacacacacacacacacacacacagactatatttatatagacagagacagagacagagagacagacagagagaacatgaactccaaagtaaggtagaaagaaatttcacgagcttaaaaggtcccctttctttcattaacatgcccttccatcttcatatactgccctctaattgtcttataagtgtaatactggaaggacataatctgtgcctgcagagtgcaatggacttgtataaagtgatatggctagtcacttagcagaacacaggcttctagcaagaattccagagcctcccattaaaccacagagcaagttatttaataattgcaagacttattctctaacatttagtcccttgttactagttgaattattatgttctcaatgataagaaagatttaattcttttcttcaagggaccaatggcttgaacctgcctgtagggttctcccaatttgcactgtgtgcttctgtctattccactcttccaatacttaccacagttcagtgatcttatctctgtccattgtcatctctgacactaaactcctggaggacaggaactgtgttactgtcattcattcatttatttggcacatgttattgaagcatccttgtcttagtctgttcaggctaacaaaataacatacactgggtagcttataaataatagaaattgatttctcccagttctggagtctggaagtctaagaccaagacactagaagattccgtgactggggaggcctgttttacaattcactgatggtgcttttgctgtgtcctgatgtggcggaagttgggagggcagatctctggttcctcttttctaagggtactaacctcattcatgagaggactgccctcataaactaatcagctcccaaatgtcccacctccaaataccttcacattgggtattaggtttcaacatatgaatttgagtagggggacataaacattcagaacacagcactcctagtacttggccttgtgccacgaagttagaaacgaccacactgaacaaaatagacctcatggaacatgcagtctgacaaaaaagacagacatcagaaaaacaatcacagaaacaaatctataattacaaagcactataaggaatctgaaggaaacatgaagggtgtaattagagagaataccaggggatcttattcaggtagaaggataaatgatggcttcgttaaagacatgacatttaatgtgaaacctgaaagaaggagaggagcttttcaggaatagacataaacaagagtgatccaggcagtgggagcataagtaggggagatgatgtgaactgaggccagagaggtagcaaagaccttgtacgggcrtgtcaaacatgctggattttagctaagtgccattacaagtattggcagttttaagtaaagaaacrgtggggatagaatgaatttttagaaagaacacctggttggtagtgtggagatggactrgaaggatcatcgagaaaccagggagagcaactaggcagcactacagtcccccgaagggctcataaacttcgagcttgccatgacatatagacctttctatcaaatattaactggactttttggcttcyattgggtggagagactcctacctcaaatatttactttactttactttggttagaaagaccttaaaaatgctatcccatcatattcttctgggagcttaaaatatgtttctttcactagagattatctaacttgtaatgttaatgtaactcgattaaattccatgcacaaaatayctatcacatcaactggcctattataaatgatcaaaaaaatcaactcccagctgggcgcggtggctcacgcctgtaatcccagcactttggggggccaaggcgggcagatcacgaggtcaagaggtagaaaccatcttggccaacayggtgaaaccccatctctattaaaaatacaaaaattagctgggcatggtggtgtgcacctgtcctagctactcaggagactgaggcaggagaattgcttgaacctgggaggcagaggttgcagtgagccgagattgtggcactgcactccagcctagcgacagagcaagactctgtctcaaaataaataaataaataaataatagctcccttgtgttgctctttttgtgawcttctacacaacacagcatcacattggtgacactgactttacmacttccttgtaagaaacccaacatagtctattctaagttttgagaatttcactaccgaatgaacgttccaaaggacatcaaagttatacatcattcatctatacaaccaagtgtactacagacatcaataaaaatcattagacaatcattatccatgtgatttttgaaaaggacaaaaccctagcgaacatttttctgaattggcagatactccactgcacagagctcagaatcagtaagacagaagtgatagatgagttaacaggacccaatatcaataaatactctacccacatggattttatccaaggcagttcaaaaattttgaagagaaaaaatagaccaatggcagagatcctggaaaactaaaatattttggaaaagttttggaagacctataatcagaataacttccaaagagaataaagtaggtgaaattagggagactgacctaaaattgtgaagaaaagcagtatggttgacatactgaataaattcttgttaaaataagagggtagaaattttatagatgattacacatgtgaagtattagagatttcagttgacttacaaattgatgcacttattgacttatcttggattatatgtcagttcttctgatatgccagaaatccctcacttaatccctccaaatccactctccactctccacccttccatcttgttcactaactaggaaagctgacttgcctgggttacatcaatagaattgcatggcctcttgcttccagttggtttgaccagcagaaagctgaggggaaggaaattgagcacatttgggcagcctgtgttccttgacagaaggttattttttcactctagatggctgctgtataagacattctctccttctggggtctggtaatgtcttcttcccactgtccactcagttctaaggttggtacaagcttgtttctgctagcttcaggtttctccactatcccttgtgtttcaccaccaccaaaccccacacctctttgtaattagtcccttgtataaataaactctccttagttattctgagtgtgatatctgttccctttaaagccctccctgatctgtaattcctgatggactgtatttctaatagacctgtttttactagaccaaaacttcacttatttacatatgaaccctgtagccagagaagtctgagcaattgmtcttggttttcatcccacagcactgagttcagaaatggccttgaaccagatctggccagactgggatgggaaaaggtaataaattagggctgtgttcctggcctgtgttctgtaccaaaatgggctctgtgtattttgtattttgtataatacagagacgaatgaagtgcaccaggccaggatgaggggtctccagcatgcagccaaactagcctacctacaaatggctcgagacttatgtattgaaattgaaactggagggaatagctgagcttctagaagctctaatgtgaacttcagtgactcatgttattacctgaaattgcatgaccccagtgaagattttgagatctagaagcgtgtatatctgcccgtcctaaaaaatgttgctgatcttgctattgtggatcgtagctgctctagtttcattctccagcctttkattgtgtaaactatgtctaatatgcccctgagtttctgagtctgctctcaccatcaagccaaacctactcttgatatttgtcaatacagcagtcatgcagcttactatcttcatgatttatgctttatctgcatatcatttttaaaatcaactttaggccaggcacagtggctcaaacatataatcatagcactttgggaggctgaggagggtggatcatctgagctcaggagttcgagaccagcctagccaatatggtgaaaccccatctctactaaaaatacaaaacgtagttgggcatgatggtgtgtgcccataatcccagctactcgggaggctgaggcagaagaatgcttgaacccgggaggcagaggttgcagtaagccgggawtgtgccactgcactccagcctgggcaacagagcaagactctgtctcaaaaaaaaacaaaaataatccattttaaatccacttctaattttaatattacactatgtaaaatatcagtaaattacagacacaagcctcaaagtccattcaaaagagggaaatctaagaggagtggggctmctccgcttatgaaacttggactgtcaggtcatgagctctttcaggggaagcagaaacattcttccctcaaacatcaactcttcaccacttagacactgagaaaaggagaaaaaaagtcattgttgaaagttagaaactagcctacttcatcctgaacctataccacctaggcagaccaaaataacccaatttgtaaatgtaattcagagtgattatgagagtataatcctcccacatacttagctgaagcaaacacaatccagtctagtgattcctactggaatcattttaggcctcagagaatttctagaaataaactgacaagaaaaataagcatatcacaggtgaaaataattacacatacaaagaaataaagccccctgaggaagaataagcaaaaacaacaaacagaagagaaagaaacacaggaatttcagacactaaaaatattaggacactgattatgacaacgttatactcactgtgtttaaagaaataaaaaacataagtgaaaatatacgcagatagcaagaaactatgggaaatggccaagcagattttaagaataaaataaacttctagaaataaaaattgtaatgattgaaattataaatgtgtggatttaatagcagtttagacattttatgaaaagataatatgttacttggaagacagatctgagttctccagaatgcatcacaaagaggcaaagagaaactatgaaagaaaataagagacattcggaagtgagtgagaagtctagcatatcgagatatagttccacgtggaaaagagagaacaagtcagagataattatttaatgataataatatatgagattattccagaactgataaaagacataaaccttctgacaaaatacctaacaaatgtcaagaaacttatacatagactttatcataatgaaacttcaaacaccaaagaaaaactcttaagaacagccagagttaaaaagaataaaaaacaaaaaccatattatatccaggtgaacaatttatgttattattaatatagttattaatataatgttaataatgtcaatctggaatcataaaactaaatayctttttaaaatgaaagtgtactaaagatactttcagacaaatcaacactgtgagagtttgtcacctaaagactcctagtacaagaaagttctgaagtatgtttagtagagagaaaaaattaataaaataaaataagcaatagagaacaatcaatctaaaagcagtccttaataataacttataaagtaagtaaacctctgacaagagggatccgtgaaatagagagaaagcaaaacaatacatagggaagtaacaatgcacagaaaagagacattagcaaataaacaagaggagaccatgaatcattgaagcaaaaattttaaaacttgaatgaaatgatctattttcctccaaaattataacataagaaaattgaaacaactatttgagaaaacctgaaaagagatggaactgggggtttaaaatctttcaaacataaatgaaggaatccctaccaggccaggtagacaggcacattcaagcttatattcaagaaaaatgtaatccttccacacttacagcttcagagaattaaaacacaggaggcccggctcatgcctgtgatcctagcactttgggaggccaaggagtttgagaccagcctgggcaacatagcaaaaccccatctctactaaaaatacaaaaaaattagccaggcatggtggtgcatgcctgtagtcccagctacttggggggctgaggtgagaggatcacttgagcccagtaagtcaaggctgcagtgagccaagatggcaccactgcactccagcctgagcgaccaagtgagaccctgtctcaaaaaacaaacaagaaaaacaggaaaactccccaaatctttttatgagatgaagataacatctcatatcaaaccagacaaggacagtacaagaactgaaaagtacagaccaatcttaattaggaataagacataaaaagccctaataaaaattagcaaatcgattcagagtacaccatgcaatataccctgactaaataacatccatttctgttatgcaagcctgatttaatatcataaaagctataagtataattcactaatataataaaggagaaaaattatatgatcatctcagtaaatatagaaatagcatttgataaaatacagcacctattcaaaaataaaacctttgacctacttaaaataagagaggaattccttaacctgaattaaggactatatatcaaaaattatataccaaaactttaaagtgccagatattgttctaattgttctgattagtttattccttataacaaccctgtaacatgagcactgttactgatcttgtcttataaataatgcagtaacagaaaaactcagtcccttgtccaaggtcacaatagattgtaattggaggagatgtgattgaacctgtgcaataatttagagttttctctctgaactactatgctaagttttaaaaataccacactttctttactttctttaaataaatttaaattgctctctgagtcttcagatggaaggaaattccatttcagtcattattgaggcaccaaatcaaatatttgcagttaaacaggttgtgaaccaacttggctgcactcctgggtgggtgcttatgtgcagtggctctgaattttactccaaaatatcacattagtatgaacctctgaaaaatagtatctcccccaagggcctcctactaacaggttggaaaattgtattttgatcatgtctgtagggtcatcttctccaggcttatgcaagtatctcagaggaactatgtagaccaggacatttgggaaaagcccccttgttctctaattccccttggtctctagtccaaaagggtcactggggatatgttcattattaatcttgcctggaccctgaaggttagaggctctggagtttcaatgtcaagcgtgagcccaggggttcatgtcaggatggtgattggcactcagcctcagagggccataactcatccagtctcccagaggtcctgacagtccctggggtcctgggagacagcaaggtgcagaaactctcatatctgccctatccccgtatctggccctgggaaaagctctcaaaaccttcctcctccccagtttcacaagttccaggatgtccttctctgcttagacaatctgattctattgctgcatgattctacctttaacaaaaactctccatgggtatggttctttctttgtctggcaacttttactcctggccctgccacagaaaagtcgttattaatttccttcagtaaggaaaaaagacttggccactagtcttggaatgtagaagggaaaattacctacagcaagagaacaaaaaacaatatttcaataaattatcctagcatatatatatatatatatatatatatatacacttaaaaatagtcctgatagtatatcccaaaatgttaatcatgtgtatcaaggatgagatttttaaattacttttttcttgcttttatctacatttttcaagttttttacaatgaatatagatttgcgaatttttttaagttgatctttcatttaaaagggttcatttggtgtgttttataaactactcccaaggttaattttttctctcctttaagaattctataaacacttcacagtttcaagtcagtatacatccctatggtgtgtataagacgtgatttcaatgaatggtgattgcagacactaggatctattttaacttaaataaaatctttaagaaaaaaatctaaaaatactgttcagttcctggaaaaaaagaggaggaaatgaccacccactcactgagaactgggagaatgaaagtcacatccgtcaggtccccattcaaatggactcaaaaccacttcagtgtgtcctgtctcacctcaatcactgttttagagaaaaacattttttttcaccatacaaaaaattagtggaattcagaaacaatgaacatttgtattgtggacatagtacactttatatcacttccagtgacatcaatgataagccacaatttgactagtgagattaaaatttatttcacagctattcaactccagcacattttgggttttataaccagttttccaaagttgattatcccttctgacaccraaagttagacagtttgagtgtgtgtgtatgtgtgtgtactttgcagaaaagaaaaatagaccaccccagaagttaggatattcctaatacattttggggacacaaatagtttttccagaagtcacacagtaaaaatcataagagtaagtgctggaattttccatattctaatttttttttctagaagaatagaaaagcaaggctcttttatgttacattcctaagaaaaatgttgaatcagctgacttctgtacatagcttagcagtgaggcactaattagaactctcatacatttttaagaaggatgacttattagcagtgcatccttgatattgacttgagttggtcagagtaaccaattgcttctaaccttggtttttaattgtaatttactgttaatttaacttcaatactatctatttagtttaagtactgtaatgatccatgtttgaatcaatggtgttttttggcgggagtaaggtgttaggactatcgaataagttgtattttaaaaatatgtgtattgcgcatttcaactattaatcattcacattctattgttaaagtagatgtattactattcactatcttcattaccgcagaatatattgtgtttaaataatgacactcactattattaaagtccttcccaactgtatagcatgaatgagtggctttttattagtgtaaaaagctttcagggaaagtttgattcctactaccgtcgtaatggactgaatatttgcttctcccaaagtttgtatgttaaaattctaatttccattatgatagtattaggtggtggggcctttgggaggtaactgggtcatgagggtggagccctcatgaatgggatcagagggttctctagctttgyttcccttaagtgaggacacagtgagaagtgagtcacctgcagcctggagaaatgccctcaccagaacccgaccatgctggcatccttatctcagttctcacacctccaggactgtgagaaatacatttttggttttcataagccactcaatatatggtactttgttacagtggccaaaactgactaaggcgaccctataattttaaatttaggagaaattaatttaaataaagagaaggagaaatcaactaccaccctcaaataaatgataccttccaagcatcttggttgtttcgaaagtgtaaaaattaaagcattttttaaaaaccaacatgctgtgttttctcaaaaatatatttaacttttaaacttgataatcagtaaaatgggagaaaaaaataagaccttttccttctctcttatgttcacatcatttccatgcttttaaatttatatttgcttaaaaatattgaattttgtcacccttttgtaatctttcttcaaaacattagattagaaccaaaaaataagaaaggaaacttttagaagactgtgaaattagcattgtagaaggaatcacagttatcgagaaagaaagaaagaaacagctacttcaggagcaaatgagagcagggaatatttaaggcaaattgtgatagacttctatggycctcaataaaacacaccttcaagtattcattgcactgtatgatactggggctgaccatgtgactagctttggccaatggtacacagcacccataaagtaagctgctgcatgagaagtgcttgcacattgcaacttgcctttttgaaatgttccctcttggaacccaattctagggatgcccaagaagccacacagtgaggctcgggtagagagaccactggccaacaaccctagctaaggtcccagctgggagccagggccagaagcaattgccagtcatgtgaacgagactattttggaccttctaattttccccatgctccagctgatcctatgaaaagaagaagaacctcccagtcataccacagaaatatgagaagaaatacattgttattgtgttaagccactaacttttaggatggtttgtttcacagcaatagatacctttaacaaaataaatgaggctcagagaatttatgtaatttccccagagtcacaaagtaggtaaattatatgtaaatcaggatttgaaacaagacctctgtaacttgaaattcatggtcttgcctcaagttgccactgttcatatttaaataaagaaaaatgaagagtcacatatttttctcaataggaaagaccatatagctccattttataggaagcaggaggatatacaaatgtctttatcttatccctggggtcagagacccctcctggatcccatctcagagctctgtagaaaaatcactccagataggctctgacatgccctctaaataagcagtatgctctgggtggcaacacttaattcatacctgctatattaaacagatgggaaccgagacccaaacaggtgtttgacacatttcgcaactacaaaaaaaaaaaagtcagctatttttgagaaattaaagattaaaattacattgtcttttacagaaagatttagtgctcacatcattaaaaatttgagtttaatagacccaaacttctttattcacacttaactttgaaggagaattaggggaatgcatgttcagactgtatggcccatgggcaaatcttattcagtgcaatataaattgaatggtcttccacagaaaagaaagtgcatttgtgaccaaaaaaatgttcattaagtatatgcgagacgcaaattaaaatgacaatgagctacaacaagacgtccaccgaaacaggtaaagttaaaaacactaaatgttgatcaatatattatgcaactggaattcacacattatttgtgggagtgaaaaatcatayaaccacttygggaaaagatttggaaatttcttatagaaacacacctaaacctatgatccaacaattccacgcttgggtatttacagtagagtaataaaaatgtatgtttacaaaagaaattgtacaagaatagtgatagaaactttatccaaaaaaatttgattttttcacccttttaaaaacattattcaaaacattagatcaagaccaaaaaaataagaaagaaaacttttagaagaccatataaaattcataatagscagaaactggaaacagcctaagtttctgtcactaggagaataagcacagggtgtaatattcataaggtggaacagtgctgtggaggtcatgaataggctccattcagacttcctgctgaggggagcaaagcccaccagagccccaactattgccctttagctccacccttacaaatattatggctcctccttatggatgactaagctggcaacgtaataatgaagactttgggactcctttaacaggcaactctgggtggagaactctgcattggcctgcctaggactttctctgagctgctctggagtccgtggctcttcctacacagtcctccgctgtccccttctctttcacaggtgtcagaccaacacagcagtctgaaggctctccctacctactccaactcccttccctttatccttcatgggcatttccctcaacaatttcttacacatctaatcctgtccttttatcttcttctcaagttacccaggctaasaaaattattcagtgataaaaaagaaatgaggaacacgatgaatgaataaaaaaatcattatgcagattgaaaaaatagagactcaaagaaataaatgtgatattgttacagtaggtagttaggcagacatgagcagggcaggagagggccccccaaccccaccaaaccaggaatgtcaggcaaccatcaggtgatggtcaggaggttgttaaactgtcgctctaaaatagtaattggttgcagctggtgccagggaaaggctgtctccaacagacagaaaacagctgaaactggtgatcagcagtttcctaaaaagatctcaggagttgggcgagtgggctcaagcatgagcattaagaggcaaaatggtggagtttaactggcctatgaccttcctccaaaacactcgactggtaagggaagaacacctcaagtgaccatgtgtacaacttcagtaaacacactgtgcatgcatcccctcccaagtgttagtgggcccctgtgcatgtggacagcccaccccaagggaagaatcagaggagaagggatacaacaccccgaaaccatgctaacatataaaatcccagtcaaagttcaaaccacacacttgaatctctcaagtcgctcacttggtcttcttccaagtttactttacttcctttcattcctgctctaaaacattttaataaactttctctcctgctctaaaacttgcctcagtctctcactctgccatatgccccctcagtcaaattctttcttctgaggcagcaagaattaaggttgctgcagacccaggcagatttgctacagctaacaatatgattccatatatgtgaatttctagcaggtcaaactaatctatgttgakaaaaaatctgaagaatggttgtctcaagaggttaggaataagcattgactgggaagaaacatgatagaacattctatggttatgataatattctatatcttgatagaggtttggattgcacaaaactcatctaatgttaggcttaaaatttgcatattttgkcacgtgaaaactttgccctaaaacaagaactgtaaattaatactgaactctagttatatacatgctgaaatgtctggagaaaagtatactgatttctgaaacttacttttagattcatcaaaaatgcaaggatgactagatggacagatctgtcatagtaaaagtatagtaaaatgttcagatagactctaagggagaatacatgggtgtttactgtaacattatttgaaattttctgtatggctaaaaagtttcttaacaaatcccagaacactgcagataagaaaatcaaatgcatctcaagmagtcagatgcaaaaaaagacaaagaaatttaatggtgaagaggtagagcaggataactgaatagaaccctccagctattgtcacctctgcaggaaaaccaaattgaacaactatcccccaaagaaaggactttcatatgaaccaaataccagatgagcaaccgcaatacctgattttaacatcatagcaaggaaagaggcactgaagaggttaggaaagacagtcttaaaaggccaacaccatgctacccctgtcccccgcagcagctgcatggcagagagagagaatctgtgtgcttggrgkgaagaacagcacagtgactgtgggacactgtattggaactcagtgccacctgtctcagtggaaagcaacacaaggtggaatctggctggcacccacagaggacgcactaagaccagccctagccagatgggaatcatccatcctagaagtcagaaactgagttctggttagccccactaaaggctaaagtactctagggtcctaaataaacttgaaaggtggtctaggccacaagcattgcaattcctgggcaagtcctgatgctgtgatgagcttggaaccagtggacttgagctgcatgcaacctagtgatataccagctgggagagcgaagaaagtacttgtgtcacccttcccccaaccccaggcagcacagcttacagctctgggagagattccttccctctgcctgagaaaatgagagggaagagtaaagagggctttactcttatagacatacctctataagtctgcagtagtcatagcattactgggcctgaggtgatccttaatgcagatacagctacactgaccaaaactgagatcacaacactcaataccctttgaatagttggaaagcctttccaagaaggatggatacaaacaagcccagactgcaaagactgcaacaaatacttaacttttcaatgcccagacattgacaaacatccrtaagcatcaagaacatccaggaaaacatgacttcacaaacaaactaaataaggcaccagaaaccaatcccagagtgacagagatatgtgacctttcagacagagaattcaaaatagctgatttgaggaagctcagtgaaatccaagataacacagagaggaattcagaatcttatcagataaatttaacaaagagattgaaataattaaaaagaattaagcagaaattctggagatgaaaaatacaatggacatactgaagaatgcattagagtctctaaccagcagaatttatcaggtgaaagaaagaagcagtaatcttaagacaggctatttgaaaatataccgtcataggagagaaaataataataatttaaaaagtatacctacaggatctagaaaatagcctcaaaagcggaaatctaggaattattggccttaaggaggaggtagagagagagatgggggtagaaagtttattcaaagggataataacagagaactccctgtacctaaagaaatatatcaatatttaagtacaagaaagttataaaacaccaagcatatttaactcgaatagrggactacttcaagacacttaataatcaggctcccaaaggtcaaggataaagaaaggatcctgraagtatcaagagtaaagaaataaataacatacaatggagatccaatacatctggcagcagacgtttcaggggaaacctatgtgccaggagagagtggacatgacatatttaaagtgttgaagtgcatacactctcccaagactaaaccaggaagaagttgaatctctgaatagaccaataacaggagctgaaattgtggcaataatcaatagcttaccaaccaaaaagagtccaggactagatggattcacagccgaattctaccagaggtacaaggaggaactggtaccattccttctgaaactattccaatcaatagaaaaagagggaatcctccctaactcattttatgaggccagcatcattctgataccaaagccaggcagagacacaaccaaaaaagagaattttagaccaatatccttgatgaacattgaygcaaaaatcctcaataaaatactggcaaaccgaatccagcagcacatcaaaaagcttatccaccatgatcaagtaggcttcatccctgggatgcaaggctggttcaatatacgcaaatcaataaatgtaatccagcatataaacagagccaaagacaaaaaccacatgattatctcaatagatgcagaaaaagcctttgacaaaattcaacaacccttcatgctaaaaactctcaataaattaggtattgatgggacttatctcaaaataataagagctatctatgacaaacccacagccaatatcatactgaatgggcaaaaactggaagcattccctttgaaaactggcacaagacagggatgccctctctcaccactcctattcaacatagtgttggaagttctggccagggcaatcaggcaggagaaggaaataaagggcattcaattaggaaaagaggaagtcaaattgtccctgtttgcagacgacatgattgtatatctagaaaaccccattgtctcagcccaaaatgtacttaagctgataagcaacttcagcaaagtctcaggatacaaaatcaatgtacaaaaatcacaagcattcttatacaccaataacagacaaacagagagccaaatcatgagtaaactcccattcacaattgcttcaaagagaataaaatacctaggaatccaacctacaagggatgtgaatgacctcttcaagggagaactacaaaccactgttcaatgaaataaaagaggatacaaacaaatggaaaaacattccatgctcatgagtaggaagaatcaatattgtgaaaatggccatactgcccaaggtaatttacagattcaatgccatccccatgaagctaccaatgcctttcttcacagaattggaaaaaactactttaaagttcatatggaaccaaaaaagagcccgcatcaccaaggcaatcctgagccaaaagaacaaagctggaggcatcacactacctgacttcaaactatactacaaggctacagtaaccaaaacagcatggtactggtaccaaaacagagatatagatcaatggaacagaacagagccctcagaaataacgccgcatatctacaactatctgatctttgacaaacctgagaaaaacaagcaatggggaaaggattcccnnnnnnnnnnnnnnnnnnnnnnnnnnnnnnnnnnnnnnnnnnnnnnnnnnnnnnnnnnnnnnnnnnnnnnnnnnnnnnnnnnnnnnnnnnnnnnnnnnnnnnnnnnnnnnnnnnnnnnnnnnnnnnnnnnnnnnnnnnnnnnnnnnnnnnnnnnnnnnnnnnnnnnnnnnnnnnnnnnnnnnnnnnnnnnnnnnnnnnnnnnnnnnnnnnnnnnnnnnnnnnnnnnnnnnnnnnnnnnnnnnnnnnnnnnnnnnnnnnnnnnnnnnnnnnnnnnnnnnnnnnnnnnnnnnnnnnnnnnnnnnnnnnnnnnnnnnnnnnnnnnnnnnnnnnnnnnnnnnnnnnnnnnnnnnnnnnnnnnnnnnnnnnnnnnnnnnnnnnnnnnnnnnnnnnnnnnnnnnnnnnnnnnnnnnnnnnnnnnnnnnnnnnnnnnnnnnnnnnnnnnnnnnnnnnnnnnnnnnnnnnnnnnnnnnnnnnnnnnnnnnnnnnnnnnnnnnnnnnnnnnnnnnnnnnnnnnnnnnnnnnnnaattttgaaaataaggacagagttggaggacttactgtacatgatttcaagacttattataagggggagggggggagggatagcattgggagatatacctaatgctagatgacgagttagtgggtgcagcgcaccagcatggcacatgtatacatatgtaactaacctgcacaatgtgcacatgtaccctaaaacttaaagtataataaaaaaaaataaagtgttgaagtggacatgacatatttaaagtgctgaatatgacatgacatattctatattacctagaatagtatatctgacaaaaatattcttcatacaggaagaagaaataaagacggtcccagacaaacaaatgctgagggatttcataaacaccagaactgccctatagcaaatgctaaatagactgcttcaatctgaaagaaaaggatattaatgagcaacaagaaatcatctgaaggtacaaaactcactgataaagtaaatacacagaaaaacacaatattataacactgtaattgtggtgtctaaactactcatatgttcagtagaaaaactaaaagatgaactgatcaaaaatagtaactacaataactttttgtagacatagcacaataagacagaaatagaaacaaaattggaaggaaaaaagtactttttattagttttgwctttgcttattasttagctagtttgtttatgaaataagtgttaagttctcatcagcttaaaataatggcttataaggtattatttgcaagctttatggtaatctcaaatttaaaaaacatacaatgaactcacaaaaagtaaaaaattaaaacataccacctgggaaaaatcaccctcctaaaagaaagacatggaggaaggaaagaagtatgagcagactacaaaacatctagaaaacaaatgacaaaatgacagcaataagcccttacttatcaatamtaacattgaatgtaaatagactaaactctccaatcaaaagacatagaatggctgaatggattaaaacaaaagagtaaatgattcgtggcctacaaaaaacacacttcacctttaaagacacatatagattgaaaataaagggatggaaaaagatattcatgccaacagaaaccaaaaaagaaaaggagtagctatacttgtatcagacaaaatagatttcaagacaaaaactataagaagagacagagaaggtcactatataattacaaaggggtcaattcggcaagaggataacaatatatatattgtaaatatatatgcacccaaaaccggagcacccagatacataaaacwaatattattggagctaaagagagggataagccccaacgtgatagctacagacttcaacaccccgctttcagcattggacagatcttccagacagaaarttaaaaaagaaayggaggacttaacctgcactatagaccaaatggaactaatacatacttacacaacatttcatataccttctcctcactacatggattactctcaaggataaaccatatactaggccacaaataactsttaaaaattcaaaaaagtgaaattatgtcaagtatcttctctgactacaatggaataaacctagaaatcaatgaggaattttagaaactatacaaacacatggaaattaaacagtatgctcctgaatggccagtgggtcaataaagagatttagaaggaaattttaaaattccttgaaacaaatgaaaatggaaatacagcataccaaaacctgtgggatacaaggaaagcagtaccaagaggaaagtttatagcaataagtgccatcatcaaaaaagtagaaaaactttaaatagacaatctaatgatacattttaaagaactagaaaagcaggagtaaaccaaaccttaacttagaagacaataatagtaaagaccaggcagacgtaaataaaactgaaatgaaaaaaaaatacaaagataaatgaaacaaacagtttgttttttgaaagacaaacaaaattgacaaacaagaaaaagaagacccaaataaatgaaatcagagatgaaaaatgagtcattacagctgataccacagaaattcaaaagctcattagagactactgtgagcaactatataccaataagttgaaaaatctagaagaaactaacaaattcctagatacatacaacctaccaagattgaaccagcaagaaatccaaagcctgaacaggctaataacaagtaacaagattgaagccataataaaaagtcttccagtaaagaaaatgccaggacctgatggtttcactgctgaattttaccaaacatttaaagaagacttaataccaattatactcaaactagcctaaaaagtagaggaggtaatacttccgggctcattctacaaggctagtattaccctgatacaaaaaccagacaaagacacatcaaaaaaggaaaactacaggccaatatcactgattaaaactggtgcaaaaatcctcaacaaaatactagcaaactgaatttaacaatacattataaaggtcatacaacatgaccaattgagatttatcccagggatgcaagaaggattcaacatatgcaaattagccagtgtgatacatcatatcaatggactctagtacaaaaaccatgtgatcatttcttgagtaataccataaaagcacaagcaaccaaagcaaaaatggacaaataggatcacatcaagttaaaaagctcccacacaccaaagaaaacaatcaacaaagtgaagacacaacccacagaacgggagaaaatacttgcaaagtatccatccgacaagggattaataaccagaatatataaggagctcaaacaatgctacagaaaaaaaatctaataattcgatttaaaaatggscaaaagatctgaatagacattccacaaaagaagacacacaaatggcaaagaattatatgaaaagatgctcaacatcactgatattagagaaatataaawcaaaactaaaatgagatatcattttaccccagttaaaatggcttgtatccaaaagatgggcaataacaaatgctggagaggatgtagagaaaagggaaccctcttacgttgttggtgggaatgtcaattagtacarccactatggagaacagtatggttcctcaaaaaactaaaaatagaactaccatatgatccagcaatcccactgctaggtatatacctaaaagaaagaaaatcagtatattgaagagatatctgcactcctatgtttattgcagcgctattcacaatagccaagatttggaagcaacctaagtgtcatcaacagacaaatgaataaagaaaacgtggtacatatacaaaatggagtactattcagccataaaaagaatgaggtcctgtcatctgcaccaacatggatagaactggaacacattttcttaagtgaaatatccaggcacagaaagaaaaattttgtatgttctcactcatttgtgggtgaagaaaattaaaacaattgaacttatggagttagagagtagaatcgtggttaccwgtggctggaaatcatagtgagtggggctggggggaagtggggtggttgagtggggctggggggaagtggggtggttaacgggtacaaaaaataaggcctactatttggtagcacaacagggggattacagtcaacaaaaatttattgtatatttttaaataactaaaagaatataactggaatattcataacacaaaaaattaaaatatttgtgttgatggatacactatttaccctgaattgattatgacacattgtatgcctttatcaaaatatctcatgcaccccataaatatgtacacctactctacacccataaaaaacaaattttttttttcaaaaaagttaatggcatcagactagaagctaaagcatgatgtaaaaataaagtaaaggcattttcagacattaagggtcttgcctattataggtaatcttttctcagtaggatgtgctccacaaaaacaaaaaatctaaactaagaaatagaaggatatggcatccaggaaaaagagattcaatatagcagcaaggcaaggaaaattcccagtttcaatgtgaccagaaaccttaggatgatagttatgtagtaggttgagataataaatattgcaggaggacttggagcttaaaaaaagatgacgaaaaaaaaagagactgatagattattatctgctgtgcttgatttatgactttattttaaagagtttcatagatcagtagaagaatttggtgattgttagcaataagtacctgtatttataagataagcaaacatgtaaaaagaattcattataaactccaaaaaaaacaaaaagcttcataagatgtagaaggtcactatattacaaactctgctgttgacaatattaacatactcaaaagaatgtggacactcaatattaatttaaccaaaaattacatgataactatactgaaagtgatgagagatggaaattgtaggcactggtggcgattgctgttaaaaaaaaaaaaaaactaamtacttatcttcagtaactggaaatcaatggataatgtctaaaatttaaaaaccaagaaagcagaaaaagcaagttttcagaaatacagcataagaaagagttaagaattgaaagtcatcatctctgagagcaaaaattaagggtagatatgtatgaagggggctgcagtttgttgtcatatgccttgttgtcttactttgcttctaaaagtgtatacatgcattcactctgattaaaattataatttaatttaattttttctatctggtgcaactataggtatactcaggatttatttctccataccgcattcattgaaatgtcagacattccttggtgtgtcaaaaaggaaggaatgcggagactagaaaatggaagaccacaatggatttaccatatgcaaactgtctaacccactctctacattccctagggggagtccagaattcacttccttcactgaagtttgtgatacacattagtgagaataacaccagcaacttagaaaggtatcttagcattaggaatgctaatgataggaactccccaatgggtcatggggatgattcaatcagatgtccatcatatggcatttaatcaacagagggagaggaggcatagttatcatagtgatcagaatgttctaacctagatatttttgacaatgtttaatcaaccatgcagtctaagatgttgaaataaaatcttgtatatttgaaaaaactttggatctggtaaataccaccaaaatasatataaaattcttgacctcttacccaastcctagaacaaagtcattttaaaaagttttactgatatgtaataattgtctgtatgtatggggtacatgtgatattttgatatatgcatataatgtataatgatcaaatcagggwatctagaatatcaatcacctcaaacatttactttttctttgtattgataacacttgaaatcttctcttctagctattatgaaatattccacamgttatagttaactattgtcaccctactgttctatcaaacaatagtacttagcccttctgtgtttgtactcattaaccagcctcttttcattctcttccactcctgacctttcctagcttctagtaattatcattctagtctctatctcaaaagaggacacacaaatggtttacgggtatatttcaaaaggctcaacataaccaatcagggaaatgtaaatcaaaaactacaatgagattgtttcaccccagttaaatggctatttacaaaagacaaaaaaaaaaacaaaaaaaaaaacaaaaaaaaacaaatgctagctatgatacagagaaaagggaactcatacactgttggtggaaatgtaaattaatatagccattatagagaacagtgtggaggtttctcaaaaaattaaaaatagaattaccatatgatccagcaatcccactgctaagtagatacccaaaagaaaggaaatcagcatatcaaagatatatctgcactcccatgtttattgcagcactattcacaatagccaaggtataaaatcaatstaagtgttcatcagtggacaaatagatgaagaaaaggtggtatatatacacagtgaaatagtattcagccataaaaagaaagagatcctgtcatctgcagcaatgtggatagaactggaggtcattatgttaagtgaaataagccaggcacagaaaaacaaatattgcatgtctcactcgtatgtagcagmtaaacatgttgcacaaagtcattttaaagatccaagaggctccttcaatgaagaaaagcctaatgaccacaaaggacaataaaatcactggtgtagagaagagatgcattgcatagagacaagagcttttattttgcagtcagaatactggattcaaaatctggctgtaacatttactagctgtgtgacttttggcatttactaagttaattgtgttataaagaaagaaaaatatcaaacatttagagaaaagataagacacaatctgtgaggcaacactaattcctaagaacgcaggattcgagtgctctccagcattatccccagaatgaactctagtgggcattttgtccacttcaagggaaaccaagtattggcacactacacaacatttctsccagccaaagaattcactttactttagaaatagccagtcttatcataggaccctcatctagagtcaatcatcttataaaagcgtaaaatgtgctgggcgcggcggctcatgcctgtaatcccagcactttgggaggccgaggctggcagatcacgaggtcaggagatcgagaccatcctggctaacacggtgaaaccccatctctactaaaaatacaaaaaattagctgggcatggtggcacacaccagtagtcccagctattcggaaggctgagacaggagaatcacttgaacccaggaggcggaggttgcagtgagctgagatcatgccactgcactccagcctaggcgacagagtgagacacggtctcaaaaaaaaaaaaaaaaaaagaaagaaagaaagaaaaaagggtaaaatgcactactgaagatggatttaagtcmtaatgtacaatagatactttgaaaattcagggcctggttctgtagatgtagtaattgttctttaaccagcaaacagtaaacaattctgtttttcccaaaaccaaattatattagttgaggaacaaaggactagaaatatggtgctattcacttaattatctatggtgctatattaaacatggtgctattacctaattgctaattacatcttgcaaaattttgcattccatcccatcagctccaggctctgctggcatggggatcatagaaaagaggaatgttttcagcatttgatggagcttagacttctattggactattttacactcttcatgttgaagacagggggaaaatggtgttttagcgtagtttgattgattctaattctcaaggaaaaactggattgctgttatacaatgggggcagggaggagaataaacagaacaccttctcatattaccatgcccagtgttaaaagttaatcaaagactctggcaatctattcaggcagaaccaccaaaagcttagatccctccggaagaaggtttgagtgatcccactgggtaaagaatcccagccagctgaggtgctagcagagggcaaagcaaacagaaatgcttggtggaggaakaaagtcataaataccagtgacagtctcatggtcacttgcagaaacaaagactaaagcctctacccaatttttctttcttgttgaatcatggttatatttgcgcattttaattaaattcccttttcttgaggaggtaggtggtagtaatcaaccatataatgcgtgctttcagtagccaaattctgaagtgggattatgcggaaccaaagaagtggacatcccccagagattctggatttggagtctggctcacttcagattttcttacttgggggagggaaagagtgtattgtaagttrtacgaaggatcattatattatgttagataaggacttttttaatgtaaatatgtgtagaaggacaaatatagtcagccaaaagggtaaactgtagtgaatattccttatttgttggctgcacaaacctcttccttttggggagaaatctcccactgtgtgagccctggagagagrcacagcccacctttgcacacaaaggccaaaggaagacaagtgtgtcctctccatatcccatgaacaggtgcctcgccccmgccatctggttctttttctcagcttttgtaccttcatcaagtgatgcaaggataaagggacagtttatgctactgtgctcagcatcaggggtgggtagagatagtgggcggttgtggctttaccatcctggcactgtcacctgaggaggtagggccagcagcagtgtctgaaccagagcatttgaggcaagattttgcctgtgttcccacttcctgacttcctcttgtttcttacttatatccttctctttaaattaagcaaaattgttttcccttgctaattaggcaaaattgttttcctttgcttacagcaaagagccaagtgagacaaatctattttcactactttagaagaaagtcaaccactttggtggggctagcccatctgaaagtaggaaaagaatacgtggctttgttaaaaagcctgttttggcctgcagccaggaatgaaatatgtcagactctgcccaagctaccataagtgaactaaagggaggggaaaaaaacattgcaggatttacaactgagacccggaaaagcctgaccccaagcctgccaagcaccatctctagcgcacactctgtttgataatagcgtcaactacctaagcacaagctttgtaaacaaaataggttcatggatcccaaataatcttttctgccatcgatgtcctaaaacaaatagattcattcagtagatggtgcagggaggtggccaccaatggaatccccaaattaagcatgactgattaaactgttgattaatttttgaaaatagcacagaaatgagcattacatttagcaagacaatggagaaaaaaaatcatcagtgtacactgttgtgagtcaagactcaaactcaaaactttacaaacttacacataaatatctttyctttagaactcactaactatccataaaagtgggttttgatacagggtgtactaactcctctttatttagtcacttaaaaaatattccctttccttttacaatacccatatgaagttttgtcttttcctcttccaactttccatgttccaaatggactagtgccaagcatgaaaggagaatttctcctatggagtcaaaggcttctatagaggttgataattcaagtttcctgttaatctaaacccagcaccagaaataagctttgctcatggccagctatcccctctgagccaggttcaactgaattcctttgaaggtgcagtgcttaaagcacagcagcgtgcacccaaatgtaatctctgtctcagaggttcctcctgagccctgccttctcctatatgttctctctcagtaagaggaagtacgatcagccaatttctccaagccagatatacagaattgacctggattcctaccttcctgctccttgccaatcctctcaaaagttgtgcattactctccattcccttgggcaaatcgccatcrgaaggattggagcagtagcctctcaaaccctcttgaagcttgagcccctctcccctcttagacctgacagattctgcactgtatacyaaaaygactttttaaaaacaaatcatycttctgcttaaaattattcagttgctacccgctgccttaggaagaagtccatataccttaacacacctgcaacgccatgcagaattccatcctgtcctgctaatacaatctaatttttggcgattcttgcctggaggttccacttgtatttccccaaaatgttcacattttcttgtgcctgaggctttgtcatagggagaggagagactttgttyaaaggtctttctctccatctgcttattatccagattaaatctgcacctccttccaacattatctcaratgttgcctccaccagaacctttctgactgcccaacattagcactgtgtatgcagctccataaaagctctatgttgtattttcttttttgtaggtgtcctcaatgcagttgactgtgtgctcttcagtgtcaggttagttwgtgctcagtaagcaataaatagctgctgaatgaatgaatgatttataaacttggatgcttttttattatgatttttccctctcagtaagtagacatactctgtaggyaataagaacttycttggtttgttttttaatragtctcattcctggtctcttggctytcaagtttcatgtatgtactaaagcaatgtcttaaatttgcttttatataggccagaattagccaagcaaagtgaaaaggaaaaattattgttgaatatagaaaataggactattacattttgaaattgcactttatcatctgatactagagaaacaataatctggccgggcgcagtggctcatacctataatcctagcactttgggaggctgagrcaggtggatctcctaaggtcaggagttcgagaccagcctggtcaacatggtgaaaccccatctctaccaaaaaattaggccgggcacggtggctcacgcctgtaatcccagcactttgggaggccaaggcagggggatctcctaaggtcaggagtttgggacgagcctgaccaatagagaaactccatctctactaaaaatacaaaattagctgggcatggtggtgcctgcctgtaatcctagctactcagggggctgaggcaggagaattgctcgaacctgggaagcggtggttgcggtgagctcagatcgcaccactgcactccagcctgggcaacaagagtgaaactctgtctcaaaaaaaaaaaaaaaaaaaaaaaaaattagctgggcttgtcccagctactcaggaggctgaggcagaagaatcgcttgaatccgggaggcggaggttacagtgagccaagatggtactgttgcacttccagcctgggcaacaagagcaaaactctgtctcaaaaaaagaaaaaagaaaaaaaaaagaagaaacaataatcaaccacttttgaaaagannnnnnnnnnnnnnnnnnnnnnnnnnnnnnnnnnnnnnnnnnnnnnnnnnnnnnnnnnnnnnnnnnnnnnnnnnnnnnnnnnnnnnnnnnnnnnnnnnnnnnnnnnnnnnnnnnnnnnnnnnnnnnnnnnnnnnnnnnnnnnnnnnnnnnnnnnnnnnnnnnnnnnnnnnnnnnnnnnnnnnnnnnnnnnnnnnnnnnnnnnnnnnnnnnnnnnnnnnnnnnnnnnnnnnnnnnnnnnnnnnnnnnnnnnnnnnnnnnnnnnnnnnnnnnnnnnnnnnnnnnnnnnnnnnnnnnnnnnnnnnnnnnnnnnnnnnnnnnnnnnnnnnnnnnnnnnnnnnnnnnnnnnnnnnnnnnnnnnnnnnnnnnnnnnnnnnnnnnnnnnnnnnnnnnnnnnnnnnnnnnnnnnnnnnnnnnnnnnnnnnnnnnnnnnnnnnnnnnnnnnnnnnnnnnnnnnnnnnnnnnnnnnnnnnnnnnnnnnnnnnnnnnnnnnnnnnnnnnnnnnnnnnnnnnnnnnnnnnnnnnnnnnnnnnnnnnnnnnnnnnnnnnnnnnnnnnnnnnnnnnnnnnnnnnnnnnnnnnnnnnnnnnnnnnnnnnnnnnnnnnnnnnnnnnnnnnnnnnnnnnnnnnnnnnnnnnnnnnnnnnnnnnnnnnnnnnnnnnnnnnnnnnnnnnnnnnnnnnnnnnnnnnnnnnnnnnnnnnnnnnnnnnnnnnnnnnnnnnnnnnnnnnnnnnnnnnnnnnnnnnnnnnnnnnnnnnnnnnnnnnnnnnnnnnnnnnnnnnnnnnnnnnnnnnnnnnnnnnnnnnnnnnnnnnnnnnnnnnnnnnnnnnnnnnnnnnnnnnnnnnnnnnnnnnnnnnnnnnnnnnnnnnnnnnnnnnnnnnnnnnnnnnnnnnnnnnnnnnnnnnnnnnnnnnnnnnnnnnnnnnnnnnnnnnnnnnnnnnnnnnnnnnnnnnnnnnnnnnnnnnnnnnnnnnnnnnnnnnnnnnnnnnnnnnnnnnnnnnnnnnnnnnnnnnnnnnnnnnnnnnnnnnnnnnnnnnnnnnnnnnnnnnnnnnnnnnnnnnnnnnnnnnnnnnnnnnnnnnnnnnnnnnnnnnnnnnnnnnnnnnnnnnnnnnnnnnnnnnnnnnnnnnnnnnnnnnnnnnnnnnnnnnnnnnnnnnnnnnnnnnnnnnnnnnnnnnnnnnnnnnnnnnnnnnnnnnnnnnnnnnnnnnnnnnnnnnnnnnnnnnnnnnnnnnnnnnnnnnnnnnnnnnnnnnnnnnnnnnnnnnnnnnnnnnnnnnnnnnnnnnnnnnnnnnnnnnnnnnnnnnnnnnnnnnnnnnnnnnnnnnnnnnnnnnnnnnnnnnnnnnnnnnnnnnnnnnnnnnnnnnnnnnnnnnnnnnnnnnnnnnnnnnnnnnnnnnnnnnnnnnnnnnnnnnnnnnnnnnnnnnnnnnnnnnnnnnnnnnnnnnnnnnnnnnnnnnnnnnnnnnnnnnnnnnnnnnnnnnnnnnnnnnnnnnnnnnnnnnnnnnnnnnnnnnnnnnnnnnnnnnnnnnnnnnnnnnnnnnnnnnnnnnnnnnnnnnnnnnnnnnnnnnnnnnnnnnnnnnnnnnnnnnnnnnnnnnnnnnnnnnnnnnnnnnnnnnnnnnnnnnnnnnnnnnnnnnnnnnnnnnnnnnnnnnnnnnnnnnnnnnnnnnnnnnnnnnnnnnnnnnnnnnnnnnnnnnnnnnnnnnnnnnnnnnnnnnnnnnnnnnnnnnnnnnnnnnnnaaccgcaattatttttgcaccaaccttaaatccatgtagtagaatattttcactgtcaggaaaatgaatcctttaaccttgtctttgaatatctgatacattgatggcatttctcccactcttatgtagcattagagaaaaacatacagaaactatgattttgcatgctgcattggtaaatgctatttactctaagatctatgtaaggcgtttacattttactttcagtactgcaactacttcctccctccacctcactattttctctgattactccagraaaaacagtgtttattcaaattccatcattacagatccatcttaacacctagagcaaacatcattttayctactaaatagctctggagagatgtaaagatatgcaaaatgtacttatggcaggcagtgtggtacagcagacagagcacagatagaccttatgagatttgacttcaattctagtcaagttcataatttcttatttgtgtgggaaagaagrgttatttgcagtcatttaacccatctaatctatttccaatacctagagcaactgtttcaatcatttaycactgttttcaaattcaacattcttcctcaaccctttgactctcgacatacgacaatgtccttacttaacttacaaaaatagaagcactaggaatgacctcaaaccctttttatccaacctccaagtgggtctataactttcctccatgcattccataatagagtatacatgtacatggaggtaagtggcagtgttgggttcacagcatcttggaatattcatttttactcaaatatttagagaagataagacttaaattggtgaccttttaagagtcacaaacctatgcaagtaatatcagcaaagtgaggcttttccatggcagccaaccttatatttctttctggaagcctggagcatacaaagttttattaatagtatttaactgartaatctgatttaaaatacataataaattttgttattatagtagatatcaatttctcagaattcaaagccatgttagtaaaaaatctaactttatttttccataataaatatctgctgcaataaacatataatcacatcacatccacagtcataattgggtttctaatatgagtacacatggtaggaactctgggatggccaagtccagatggtggcaaaagtacaatatatatcattttcatgaagggataaattcaaaataataaatgatcagtaaggcacaggcaccagcaaatgaaaatggataatggccactacaaaktaccaatgtctactggcagaatatcatccatggttttcatatcaaatggaggagtcagcatagacacctaaattgagtcatctgtaacacagtcatggcatctgagccagttctctatacttaggggccttggatgaaaacaaaatcacacatcttgatgacaaatcgactgtaattctacacacatgttctctggtctttcttctcaacctttcccccaaaggagcactaggtastttacattgtgaaaaataagaaaaataattaccaaaacgttttaggttgtatttgacactgagccctagctaaccttaattccagcaacccataaaatgaytatgatctgacagtcagtgtgaggcttatgggatcatgtgggaaaatagagaacttgcccaaggccaatgggacaacaaacccatccaattgttattttcacagcttattggtatattcttggatggatatctttggccactggtagaatctttccactggctcactgatccatgatgtcaaagccaccatagtagaaagggccacgtgcaagacattagtgttcctcaatccaaggcctaatatcaactgcacaatacacacatcccaaggtctcaggcatttaacccaatagaagtgaatttttatgtatggagtccaataggagtgtttctgcataatggcattcatccacaccattggttagagatacaggatctttccctcttgaatctctgccattccttagggcattagaattctctacattcacatggtggtatgtggggaaaagagactccaaaagaagcagaaatgcttctgaaatgtcctggccttaaaatggcaaccatcatttttatttccattccatttgccagaacatagtcatatgatcacatctaactacaaaagaagctgatagtatggcctagagataatttcagaaagaacaaaagaataatgattttggctaatagctgacagcctgacacatgggagaacttgagagatttatgttatgttgaacactttaaaaatgcacttctttttaatcccatattaatagataattgaggatgaaaaactggttgggttttcggatggtttttcagatagtatacactgctattgaattacagtcctactcagttatggccctggaagatagtagaaaaagataatacttccaatgggcagatatttgagttacctgctatcttatyaaagcaaaataacctgagaagagtttctaaactgatgcttatgcactagctaatggtttgttcaaatgggactctcagaatagataaaggctagtaatatttatgttccatgtgaatgtttaccagaagactagcactgcttaagaggtgtttagaaaaacaatgacatgaacaacatcatatataaagagttgtgaagggaaggcataaatarctggtaaggttttatgaccagctgcagaaacaaggaaaatatatcatctagagattccagacttgaaactgaatgcattaaattagcatcaagttaatctactttatggtgctgagatmatttttctgtttgtgatagatgtgttatgacaactgagggtagttttaaagttttatatatggaggaaaatgaaaaatgcatgtgcgggtgtgtgcgcatgtgtttgtcctggtaagccattgatagaatctggtgggcatgtgttgtttttcctatatggaacatcttccttatttttacagttaataaaaatcctacttttcctttgaaaactgtctcccattcaaagtcatcactgaagyataggaagaatccagtatatgcctatgtgatatttcttcttggaatttgaatctgatgcagggggagaaaagagtgaggcaaacaagaatgtcagtacagataacaagatggtcttgggtctctggctgctgagattcccagtggccctcattcttatccttgcagactgattgcttggcacttcctttgataaaatacccaatactgtattttcttccactaaaatataggattttgcttaatcagtcagaactgaattattttcttggactcagagaacrataagcataatgatgtcaatctatagaacagacagcaattttttttattagtggtgctcttacaaatgaggttttatatgggatccaaatgcatctattccttctgtaatgaccttaacttatccctgaaaacaatgtcactaagtgaaaagttattaaataaaacatatagaatgtgttgttataaaataaaaaatatggaatgtgtcatgctaatctaagatatgcaacagttttctatacatatatcaactgaataacaaaaaccttcttataaaaattaatcaatgtacagatttgtayatataaagcaatgtaatgaaattttattatatttccaaagaaagargagaaagcttgataacagacagtggctggaggaggagggttgtgagatcattctttggaaggtggtggaaagtcaggtgttttaatattggacaggtatttagtatcagaatcatatgagctttacaattctctttcccttgagactttagctctaaaacaactacctgatatggaaggctttgacataaagataaaagattagtagattctttgggtagaaaaatatgtgcttcaaaacatgaagaaatagtacacatgtacaagaatgaaaaataaaagaggatatttctttatctctcttggttggcattcataggcaaagcaaaacattcgcgtccatacaaatacagcatgcactttaaatttgttccacataataatattctttgactagaaactattgcatgtaaatttgtgagtgcgccttttcttgaaacagtaatgttgaaatataactttggatagtatgcttatttagtagatgtgaagacaaaaaatgtcattctactggaaaaaataatcattgccttataagtgatgtaagtttgccaggactattgtggtaaaaagtcattaagagaaaaagtgatatgtaaggtgagactacacacaaaaccaataaaaaccactggggaggtggtagtgagctatgcctcctttgtgttccctccacccagtcgccacttcaaagttttggccaactcatcttctgagctttacatcctctttcttccttctaatttctgttatccactgtaccacatctaaactgtcctacttgctaattcttgaatatgctgtgaactttcaggctttcaggcaattatttatgtttctccctttcaccaaatatgttcacattctcctccaagtttaagaaaattgtactcatttttcaattcctagcatatatgtcaccattcctaagctccacctaaaataaaaataaataagttgtcatgtatattcttgtagcatatgattatacttctatgtcagtacttatcacatttcattccagttagctgtttatgtggccaatttcnnnnnnnnnnnnnnnnnnnnatgagaaagacatgttgaattctgggtaaacagaacaagagaaaagagttttaagaaatatttggtggtcaatagtggaaagatgaataaaattgaaggtataggtggtgttaaaattcatgttttgagaatgttctctactcaaatatgtaatgtttaagattataaaagaaaaaaatttaaaaaatagtcatgttcaaaaaagataatagagcaaaaataaagcaaaacctgatgtggtaagtagactgaaggcacaggactcctgggcttcaggctattggcaaacatagataaccagtttatatcatgcatgatattagtgatcataagcagcaagaaaatcttgcacgtatgcacagagattttcctaaggcaattaatttcatgtactctagatcaagacttctaggctcaagttttggctctgctacttttagttatatgaatttagacaattgcttaacctgtccatgcctctgtttccttatgtcaaaaatggaaataacaatatccacctcttaggagttgttatgaggataaaatgtgttgagcacttgtataattcagactaacggctggcaaataattaggactcaaatttgagccataataattattgcagtagcaatggttctaataaggaaaagagtccagccaatgaaacattccaccaccaagagaattggtaaagaatcatataatggaattcaccaccaattaaagtgtacttgctacatttgcttgtatccatatggacaagtcttagaaaaataatgtttaaaaataaagcaaatacttgaataatatttacagcatattatttatgtgaagttcaaaaacaaaatagttgtatcatacatatgcattcatatatgcatatgtggtaaaagtttaaaaatcaaatggaaagaccacagactaacttataataaaaaagttacctatgaaggaacaagcaagataataagattatgatgtaggacawaggagtttcagtgtttcagtatttttttatgttttttagaatatttggctgggtgcagtggcttacacctgtaatcccagcactttgggaggccaaaggggggcagatcacctgaggtcaggagttcgagaccagcctggccaacatggcgaaacccatctctacaaaaatacaaaaattagccaggcatggtggctcacatctgtaatcccagctactcgggaggctgaggcaggaaatcgcctgaacccgggaggcagaggttgcagtgagctgagactgtgctactgcactccagcctrggcaacagagagagactctgtctcaaaaaaaaaaagaagactattcaaaaaaataaaaacacaaagaaaggaaggaattacatayagggacaatcattatttcattctgcttcccttgtatctgtagaaagtgtatcttcatatagtgacattctctaagaatatggcttctattatttatattctaataaayaaaacattttaactgaagttacatattaacttctaacaatttctaaattttaaatttacttttaataacttagaagtgtaatattccttcaaaaggcaaaaataacaaaagtgaagaaaattaaaaatggcctaaaatgatgtaacactagaatttattgacatggatatttcaaaggtgaactacattgatgaagagcctccaaagcctatattgcaatgggagaaagaaaacttcccaaaaagattatcaggctgttgctgtgactagaacttgcagtgattactgaagtattctgatttctcaagaaaagccagctttgcagatttctatgtaaaatatcctagtttttaaataytggtgtatcagaggtcagaagaccatcctcaaactcgatgattcttagataggatcacaggactgaaaaaaaaagctgttatattcatggctataatttgttacagcgaaatgatcagactaaaatcagtgaagggaaaaggcacacagggcagagtccaggagaaaccaaggggaaaaaaacttccagttttcttctttctgtagaatcacatggagatgacataattctcccagcaataatgtgtggcaacacatgcaaagtgytgtcaaccagagagtcactcttgaaccctartgtcagggttttaatttaaggatccatcatgcaagcatacaacatttgcatgactgacttttgctactcagtytccagmcctccaaaggccaaatttatacaacttggtcccaaacctcaagtrcacacaaaaaagcacttaccataaatcacattgcatccttttttccttcttgtattaataggatcctcttttgccctttggaaaatttcccttgtctgtctcagtctagtggttcaagtggacctatctagaggtgggacacatcatctgtgcttggttaagggaacactggatcaaattcagcaactggcatatagatgaacaagtgatccaaactgaacaaataaaagctcytcttgggaactattaggaaagaagtgccctttcattmcagcttgacagtctagatacrgtgtcaactttggcctggcttgaccattttagccattacatggtgataccctgcctgggaattaaaccaggacagaagataacagagatgagagatagagtctaataatttctgataataatggtgaaaattcctaggttcaggcaaggctgaagccaccagccttcaaaatcccagaaaagttagctagttttgccatagctagattaagtgcatttctgtaacttgcaaccaagggagtcctcacaaatgcaaggctctagccagctggaagatgtaataaggagggagggaatgttgtgacctaaaagcattatcaatgagcactgaaacttacacttaagcttaacatgtgcttaatatacattagtcgatttttgatgatattgtgaaatgtttgtttatgacagataaaaatgcagaattygaagctacattgtatacaatggggattctgtatactcattttcttaatagactttattttaaagaaaattttcagctgggctcagtggctcacgcctgtaatcccaacactttgggcagctgaggtgggyggatcatgaggtcaagagatcgacaccatcctggccaacatgatgaaaccccatctctactaaaaatacaaaacttagctgggtgtggtggcatgtgcctgtagtcccagctactcaggaggctgaggcaggagaattgcttgaacccaggagacagaggtttcagtgacccaagatcgtgccactgcactccagcctggctacagartgagactccatctcaaaaacaaaacaaaataaaacaaaaaaacaaaagaaaattttcagatttaagaaaaatcaaccagatagtaaagagagttttcatatgtcccccmaccckcacccagttcctccaattgttaacatcttacattagtttgggactattgttccaacagattaatcaatattgatgcattattttaactaaattccacrgtttattaagattgttcttaatttttacttaatgtcttctttcggttccaagatcccatccagcgtaccaaattacatctagttgtcattgtctccttaggcacctcctggctgtgacaatttctctgactttcctcatttttgatgatcttgacagttttgaggaacattggtcaggcatgttgtaggaatcccctctactggatttgatgtttttctcattaagctggggytggttatgggtttggggaagcaggaaggcaaacgtaaagtaatttttttgtcacgtcatatcaagattgcatagtagcaacatgatttatgatttatgaatactgactttgatcatatggcygaaatagtgtctttcaggtttctccactgtaaagttatgatttttctcccactttttrttctgcaatctttggagtgaagttactatgtgtagcctacacttaaagagtaggaagttattctcttccktctttaggttggagtaactacataatttttggaatttttctgcatgaaataattgtgtcttctccccaatatattaacttagtcaatgtattaatccattctcactccgtgataaagaactgcctgaggatgggtaatttataaaggaaagagatttaattgactcacagttcttcagggctgaggaggcctcaggaaacttacaatcatggtggaaagggaagcaaacatgtccttcttcacatggtggcaggagagagaaatgagtgcctagtgaatggggaagccccttataaagccatcagatctcgtgacaactaactcactatcacaagaactggatggggaaaactgtccccaagattcagttatctccacctggtccttcccattgacatgtggggattaagggaactgcaattcaagatgagatttgggtggggacacagccaaacygtatcagtcaataatttatttatattagtatgaattctatggatggttgctttatattttgggttacaattcaacaccatttatttattttgttactcaaattttcctgcttcgaccattggaagctctttcagttggtacctatgcttttcattatattccacaatgtgtgtgtgtgtgtgtgtgtgtgtgtgtgtgtgtgtgtgtctaggttaaaaaaaaagcttgttaatttgtttatcttgagcactttattactttttggcattacaagatgtttcagtctcatcttgtatatttcctgccccagtactagaaacagccacttctctaaagagtactggttcctttttaatggataaagacactagaaaacaagatctgggcactaggaactaggtgtgattgttgttactayggtatygtttcttttaggaccttccaggtaacagagcagagaaatatatgtatgtatctaattcatgtatatatacacatcwatcaatgtttctgtatatarccatctttatcattttaaacatgaattattactgatgtctccatcgctgaatttttaccatgggaagtgttctggcttcctccccttgcttatctaaattcccactccaacagtgagaaaactagctgccaccatctgccatccatctattattctagaaaacaygaacagaagtatcataatttctaacttatatctctgataaagttctatctcygtattttatcaactagagtacagtccttttgagyagttctctctgtctttagtctaacagactctatttatgtccataggtacttaggtcagcaacttttaccttaccaacttcaatgagattgttttagatatttgttatacagtgtaattatcttatcattatctgtattcattcctgggatccctgaattcctaaactattttaaaaattcacacatattaaggttcactctgggttgtaaatttctaagggmtttggcaaatgattaatgtcatatatccaccattgcagtattatacagaatagcttcaacatcctaagaatcccgtgtgctacatctattcatctccactcatcacagtcttaccctgaattctggccatcactgatatttctactgcctttacagttttgcctttttcaaactgttacaaaattggaattatacagtatgcagccttttcaaactgctttttttttcaatatgcatttaagttccttccatactttttgtggcctaaaagcccttttttaaaaaaatccctgagtaatattcctttgcatggatataccaccatttgtttattcttttaactactgaaaaacatcttggtggcttcagttttgcgtgattattagcaaagtttccaaaaatattcatgcgcaggttttttgcatagatataagtcttcaaccaattgggtaagtaggtaggagcatgattgctgaaccttatggtaagattgtgtttagctttgtaagaaacagccaaactgtctttaaaaatgctgtaccatgcattcccaccaacaattaatgagaatttctgctgcttaacatcttcaccaacatttggtattgtcagtatttttttttaattgcaggcatctaagaggtgtgcagttgtattttgttgttttaacttgtgattctttaatgacaaatcatgctgaacatttttatatccttatttgccaactttatatcttctttggtggggtatctatttagatcttttcccttttttcattgaattgttttattattgagtttaagaattctttgtatattttggatacaagttgttcatcaaatatgtcttttgcatatatgttttcccaggctgtagtttttcttttcattctgttaatggtgattcttttagtctttcccaaagtamatttttttccttttaattaagttcaatatatccatttttccttccctggattgtgtttttcgtgatgtttctaaaaactagttaccaaacacaaggtcacctagattttctcccatgttatcttccagttttgcagtttacatttaaatatatgatccactctgagtttgtgtttgtgacatgtgtaaagtatgattacttctttgcatatagatgtccaagtattccagcaccacttgttaaaagaccatctttctccattgaatcatctttgctctgatcatctttgctttgatccattgaatatgtttgcatgggtctatctctgggctctctatcctattccattgatatatgtatcaattgtttttccaataatacactcccttgattactgtggttttatagcaagttttaaagttggattttgtgtsccctccaactgtatagactatagattatcagtgttcctatcagtttatggctccagcagcttttactccagataagctgatcttgactgcaattttctgtattcacttgtctctctagatttcacagcgacaatttgccctgtgaccccaattctctgatgagtctaaggaaaatcattggttttcaggttgttcagcactattcttctgcggatgggagtgacagcttccaagctttttatatgtcccagctgcaatgccaatgctgtgactckgtgtgctttttaaagtcaagtcaactacttaaaggctaactcacttgtgattccatcagatcaggaggattattttactttttctggggatacagtgacrgtatacaaatgttggaggaaacttgaggctctgaatccctcagtcagggggcactggtggagttgttgctttttaggctgtgtggctaggaaaaatttgtaaagatgaaaatacaggttaatgttttggagatgagagccccattggtagatctaagcatgtatgtcacagagggagacacaagtgaaatagcataataaagttgaaaagtatttacacacataaaattttgacttatcagttgctctaacattaataatccttttaaaagatctctgaaactaagttacaacactgcacatgaaagaccacagcatgattctagagataagctcattgaacaccaacagttaataaggcagtaactataaagaatgagtaggctcacaaaaaatgcaattactagcatcatctagtaagtcaataccaggaacaatgtcctctgaacatacttgaaaaattagtcattaggcagagatatatgaaatttttatggttcgtggaaaaatgagtaaagatgtttgcagattattacataatctatttcccggggttgatttattgcttaataaagtwtttgacgtgaaaactaaaagagaatagattcataattgtttagaacagttgttaacacaccatcaaataaattggcaaaaatatagagacatctgtatcgatgatgagaaagcaatggcrgaagaaatacaggaatagtggaaaagctgttgccaaagtacattgaaagactcactgtgtttcacagaccagcactggcagttaagaaaacgtaacattagacatagttctaaacaaggaaaactgtcactttattcagatacagcctttatgctgcagaattatcagagtgaagtataatgacataggcaagaaaatcggaccccacaacgaagtcttcatgaagcctcgtcctttgccatccactcctgtgtacaaggaaaggcctctctcttgtaaacacagacagtgagcttgcaggggtgctattcttctacaggggaatggatggtagctggtgggttatttgtgtgtctgggaaagggaagccaggtagctttcctcgtagagagaaatgtttcctcagacttctacaggtctgcaagtctggaagggggaaactctcctgtctgcttctggctggagtcaaaatggctaggctcyattggccaccakgcttgttcaactcccctrtctccaggaggtggaacaggaaacacaaggaggggaaacaaaagaaagaaggcattctgcccctgaagaggggcatgttactcccctgccttatcttgtcagaagcaagcaccagcttggatcaagaacatttcaatccatttattcattcacacatttgtttatttcagcccaacaaaatgagtacctattctgtgaaatgcaccatcttaggtscagggcccaactgtgaaagtactccagtcatgaatccaagaatacctgcakcccataagccacagagtaatgctttgtcttaattttaccaatgacaggaagagagttataggatttttaattaatatgagtttctttaagaataagtcaaaagtaactcaatagtgatagccatggtgtgtgcacctatcatcccagctactcaggaggctgagacaggaggatcacttgatgccaggagtttgaggttgcagtgtgccatgattacacctgtgaatggcctatgaactccagcctgggtaacatagaaagaccttgtgtatgaaagaataataataatcttattttattttattttgtttttttttgaaacagagtcttgctctgttgyccaggctggagtgcagtggcaccatcttggctcactccaacctccgcctcccaggttgaagcaattctcatgcctcagccttctgagtagctgagattataggtgtgtgccaccacactgcctaatttttgtagttttgtagagatgggtttttgccatgttggccaagctggtcttgaactcctggcctcaactgatctgcccacctcagcctctcgaggtgctgggattacaggcattggccactgcacccagtcaacaatctgatattttaaatgggcaaaagatctaaacaaatatttcttaaaagaagacatacatatggccaacaggtatgtgaaaaaatgytcaacatcactaacctttggagaaatgcaaatcaaaactacaattatttatcacctcaacccagtgaaaatggcttttatcaaaaaggcaataatagatgatggcaaagatgtggagaaagggaaacgcttctacactgttggtgggaatgtaatttagtacagccactatggagaacagtatggagtttcctcaaaaaactaaaattagaactaacatataattcagcaatcccacyactgggtatatatcaaaaaaaaaaaaggaaattagtatattgaggaggtatctacactcccatgtttatagtagcactattcatgacagccaaaatataaagtcaacctaagtgtccatcaatagatgaatgaataaagaaaatgtgatccatatacacaatggaatattatacacccattaaaaagaatgaaatcctgtcatttgcaacaacatgaatggaactaaaggacatgatgttaaatggaattaggcaggcatagaaagacaaatatcgcatgttcacactcatatgtggaagctaaaaaaattgaacccatggagatacagagtagaatgatggttaccaaaggcaaggatgtgtatgggggaggtggggtaagaggaaatggttaatgggcacaaatatacagttacatagaaggaataagatttagtgtttcgtagcacaataaggtgactatagttaacaataatttattcacatttcaaaaaacctaaaatagtaaaattggaatattcctaacacaaagaaatgataaatgcttgagttgatagatatcccattaccctgacttgatcattacatattgtatacttgtatcaaaatatcacacgtggcttggcatggtggctcatgcctataatcccagcactttgggaggctgaggcgggaggatcacctgaagtcaggagttcgagaccagcctggccaacatgacgaaaccccatctctactaaaactacaaaaattagcctggcgtggtggcaggtgcctgtaatcccaggtactcaggaggctgaggcaggagaatcacttgaacccaggaggcrgaggttgtagtgagccaagattgtgtcatttcactccagcctgggtgacagagagtctgtctcaaaaaaacaaacaaacaaaaaaaacacatgtaccccataaatatatacaactattatgtaatccaaaaaaactaaaaattaaaaaagagtaagttaaaagggaaaataattccctcttatttcttaaaaaggaacactattaactaaatatctctcaaatataggtaacccaattcaaccgagatttgttggctaaacctcacgtggaacctgccttaaagttaacctcataaagcccttcatcaagcatccatacatacactcacacacatttacttccaagaggcacttgatgaataaggctgatttttactgacattttcatggagtgatggaataatactggtttacatcccacrtgatatagcaaaatcttctaaacatcctcttcaaaaattggtgctgaatatcttccatttccccttcagatcctatctctctctacccttctccaccctgtctgtgccttaggaggttgacctgcattgaccacatcattgggcttcctgtctgtggtcaatggcaaattgtagcaggagcaagagcagggttgagatcccctggtctatatcctgcagggttgtcctaggtcgtcttcattccaccacagaggtttcatcccttgtaggcagccttctcatcacaggccctgctgactctagcttttgaacaagtcctgctcttcagatctaggaatgacaatgatgtctttttcttattagtgcagggattctacagtatctcttatagttttcctacatgctrccttcacagtccttttattatattctcttcaaattaccctaatttggatatgccatctgttctttgccagaaagtattgactgatacaatatcactatttcccctaaagcttgactgtctaaaggatttgtcacatttctatgtatctctcagcccctctcaatccatccccatagagcttttctcagagcgtgctccatacactgaccttaatctgcaaaaccaaaagtccatccagaaggttcaacaaaataaaatctgaytattagcttaaggtacaaccatagcctcttcctccaatcttgttctgggaagactyaatgtatttgactgtagtttcttctggttaaggagactgtaatattttcttgtggcacctagggtctcccctactcatagtctgctcaccctccaaatctcccactctcttacagggtggagtgtgtgactatttctgaatgtctgtttattctactgtctagccttgcctgattaggttcagcaaaaccttcagaagtgtaaactggggaaggtatacctgccatgcaggtagggtgggcagcacctggattcaagagggaggaggggatcaggatttggagccaggctccttgtcatgctttttttcatctgacactttagtgyctccccagtgttcccagctaacacctgtgtgcagcattgaagggaatacctttcctccagatttctaactcctgtaaatgtagaaagatggtaatgtaaagagaccagtgcacattgtcataaaatgcattgcatcctcaccctaacttcttgtgataaccaagamaaatgataggatatttcaaactcccraagtccaaagcaggcttaatatgattgtgaagttgttctatctatactggctcttctagatgtatgtttttgatgatcgccaagggctcaataacttcaggtcagggatatgatctctggcaaaggccttggactggcrgtgaagagcaagccaattccaagtctcctccagcatcctactccacaagaggttcagatgcaagacacgctgagccatatatccagggcctttcctgagtcagccaggtggctactgataackgagaattctgttggccggtgacatctgctaaggtttggaaggattgtttagccacacatcayccctatactaacctgctttagcttatttcaatttttgaaactgtgctgcccagcaccttcttgcaagtcttactgctaatgtttctccaatctaaacatatgtgcagagcaaatcactgtttcctgttgacaagcttctcaaacaaactggataactggaacaagcatctctttcagctcctgctgcattatctctaaacattgtgctataaacacagtcccttttgcaagtccttaaaacagaacctgtaaactccccttcrtttctctgcttccaagacttaccatctacatgtctctgaatgttttaaccatgactcagagccatctgccctgcctaccactacacctcttgaaaaccataggagtttagtttctgataccaggttccagattcatggttctattcatgggtccaaagctaccttgatggtttacccaaagctgagcattttagcagaggattccgggtctcagttgcctttgaatattagttgactcattaatgattattagggaaatcccatgtcttacccacaggagcactgttaatgtgtaagtcttcaggactaaattcagagactcagattccattcatgccacttaatagccaagtggtcggtctctttccgaccaatctcttagcttatctgagcctcagtttactcatccaaaaatgaaagagcagccaggcgcagtgatggctcaggactgtaatcccagcactttggaaggccgaggcaggcagatagcttgagctcagtaatttgaggcagcctgggccatggcgaaaccttgtctctaccaaaaatacaatacaaagtaatcaggcatggtggcctgcctgtaatcgcagctactcaggaggctgaggtgagaggaacgcttgagcccgggaagcggaggttgcagtgagctgtgatctcaccactgcactgcactccagcctggttgacagagtgagaccctgtctcaaaaaaaaaaaaaaaaaattagagagctgaactaaatcagggaagataaacaatcttcatgacatgtggcatttctatttgagtagtaatggttagccataataatatattgagaaagatttgagagtcaagttcaggcttggtggagaagactattggaggggaagggtcaacagccatactatgtatttgcctcccctggactagatgatttctaaatcccccatcaaagcaaaaatatgagggtaccaaatatttcttcaacacctgacccagagccacgagcccactggtccatctgcagatgggcctattagctaataagccattttgcatttattggtctggagaatacagaaataccagccaagagatcaggcagcactatcctagtcactgcgtaattccttccacagatgtttttacccttgtcagtatctatgaagagcaatcatatctatcttcttgtggttacagtaaacataaccacacgacaactatattatttggcatgttagaaatggatacaaactatacttttatacttgaaatatagggattgatgtctgcaaagagattgtgtgctttcatttaaaatcatgattttaaatacacttgttttttaatattaatggtaaaatactaagcccaaaataactacttcttaatttttgtaattttttttctgctagcaaaacatatgtacaatatgtgaaatattttaccctgggctgtaaaagggaagggtgtaactaacatttccttttcagtctgaaaatttacaggaatgcactaggacatctgtatggaattagcagagctgattctatagattcatgtgactcaccagttctagtttctgtgcttctgagacmagctttttttcttctttctttaataaaaataagacttgtctacattatgggtaacataattaaaccaggataacacaaatttgtttaaatataaactccaaaccatcaagttgcttcatatgtttgcattcacttataaaatacgatctcctgagatatctttcattgggctaaacaccaaaacaagcaaacagattctgaaaaataaaaagacagcattctgggatttcaaagttgacaaattaagcgttcctatgtaataaaatgatttcatcttggaattatcttttgctatttagtttatgaactctacgttatccaagcttacatttcataaaagtgtaaatatgtttaacatagatcacttttgcttcattactcatgctattagattttaaaccttgaaccataagtccttgtgtgactccactgggaaatccctcatrgtgttaacatttttttacactcaagcgcttgtttactccattttctcactttttaacaaattaaagttccaatgtattacagcagttttacatttgtctagataagccacagaaaagactaacataatttaggaaagaggcacagaagatagtgcatggtatcagaattcatgagaaagggagtactggattgttttttaattttcatccaaagtaacagatgatctcgcttccatcattaaaaaacacgattatataaatacacatataagaagtaatctataagcaagtgcaaactaattacggtcttaggaaagggatttttgtttttttacccttcctccaagtcttttatttattttttgagcttttwaaaaaaaaaacaacaaaaaacacaaccaaaagaactgacgagaggaagacaaagccccaggatcagccagagaccaagcagcatgggatgaggcccaggttgggcctagcaggatctgtggagcaaggtggtggaaagtcctgaggcttatggtcatgtggggtctgcagaaggagaggaggtcacttaaaaagaaatacatatacattacacatctatacaaagtgtcccatgttgagggagtgaggcgaggtcatgggagctggcccactttctcctcggaccagcctcccaacaggctcactagcttggccagcacagggacccctgtagctagckgtcttcttctgtggagtgaggggaacataacaatttagttccagttccaacccatggtgggcagaggttggtggaaagggttttgtttttgtttttggttttggttttttgtctaagtgtttatgctagtgagaaaatagtaaagaaattagccgacatagataatatagagtatatatatttttagatgcatttttctagagaaagaagaaaagttatactctaggtaatgcaacacatacagaagtttggagatgggacagtaatagcgtgactgcagagattcacgttagtgattaatgatgatgataatggctataattgaacagtaatattcaggactacagaaaaatctgattygtttgacagagcagaatatctaagacaaaggaattcccaaatatgacgtatggtagtcttttaatgcaatccaaaaaagttagggttttattttagaagctataaagctcatctctgagctgagagtgaggaatataacttctttaatctggttctctataaaaatgtatctatataaacatgggacttactatgaaatgagggttgctgaggaggctaggtagagtatccagtttggagaaaagtgaatttgaaataaggctaaaaaratggagagttaagatactgaaaattctgyaaagcaatgtttaggcargagagagaaaaagtagagaagcactatggttatcactctagggaaatcaatggtkatctgtttttgtatcagttctaatgtcatcataaaaaatcattgcatgaaagaaggtcgcaatgtttcaagatcattttttcagtgaaaaaataaacaaatctggygaacactaaaggttgcagccacctctatgttgttcttttgaaacactaaaagaattaaatttttaaaattattcaataaaacttaaaagatatcaacttaaccataaaaaaatcactaaaaaggtataggygcaagtataacaaaaatttacagaaaagaattttacctgctttatatattcgggaaggacagacattcaagaaacaagttcctttataatgaacgtcctttaaaagaattgcttacatttctcttcatagtgaaaaaggagccattctacatttgaaagggaaaatcttcttatttataaaaggcgtcttcatccaagaawcttaaatgtactatggcaattggcttcaaaatatctaccccataaattgcttaatatagtttaaagatgggaaatttgaaaccatatgactttactttcctgagattttcactatttcagagggatgaaggaaagggagacagaaataaaaagaaaaggagagctgtgaaaaagaaattcaaacaaatccataataaaaaaatttgaggaaaaattaaagatataagtctctttaccactcacatgtattttagtttttcctaaggaaatacaatttattgaatcaactgagaaattcctttggtagatggggaaaaaaagcaaaagttgcttattatttatttgtttttttcaatatataatgagggttttattatatttacatggttcagaaaaaattaaattgatttcctgcatattgtsctagtttaataaccaaaaactggtttggaaaaggcatgcaaagataaaagaatatagaagtgtagtattttaaagttttttcatatgacaaaaggtttggcttctttaagtaaattagatgacttagaaagtggaaaatatgcattttcttgatgaatgttttagtaataccacagttaaagttatagtacatgccaatgttgaagaagactaatatatccttaaaaatcttacccttgcttctaacagttatagaaagaggctaaaatagaaatttcatgcgtttcctttaaaagtaaaattcagcagttcaatatttagagagtgataacaatgactatattcatatttaatgtaattatttaaattctggatggaaggatttttccacattaggaagtcttttcagacagtacttatcaaatatacaaaatttaaaatattatgttttttcattcartgatcactgtttatttttaaagtactcattttaaaaagtggaaatgcatccttaactatagttacaaaatcagtcaatttacattttttatttggtactgaaataacataagtaaacttattaaatttttaattttccattggyataataaaataaatagcaaaactatcatacctgctatatattgctctagtatttagtggcattttaataacatatgaatgaaaacttaaaaattatcttttagaaataaaacacaaggacgggcacagtggctcatgtctgtaatcccagcactttgggaggccaaggtgggcggatcacctgaggtcaagagttcaagaccagcctggccaacatgatgaaatcctgtctctactaaaaatacaaaaaattagccgggcatgatggcaggcacctgtaatctcagctacttgggaggctgagatagaagaatcgtttgaacctgggaggcagaggttgcagtgagaccacgagctgagaccatgccattgcactccagcctgggcaacaagagagaaaatttgtctcaaaaaaaaaaaaaaaaaaaaagaaccgaaaaacaatgaattattggcaatatctaaaaattaaatgtaaaatgtatttttcaatggcaagwtctttgataaataaacaagatttatgaaattatttataattaaataagaatttttttatttaaaaaacgtagattgaaaatattcagacatatcacaaaggaaatattcttagaaaattgttttcaccataacaatactaaaactatttgatgaaaactcttgctcaaaaacatatttgaaagataccataaaactttcatgaacaataacataataacttcagtgaagacatacttgtcattctggaatgagaagaataaattttataaagacgagaattcatccaagattatttgctggaaaaatgcaatttctatagaagtcaatgcaattctcaagttcatccagaatgataaaaagaattagtgcagtggacatttactctttgggttcacccagcattcacttcttccctgttgttttactgttttgctccttccacaaataacttatgtactccaagggaagctcacttcacccaggccagcagtagtccacaactggcttaaaccaatcagctacctccacttgctttccagagtgactgtttcaggaaaagttctgtgatttagttcagaagaatgcacattttgctaggtgcttcagaggaaagaaaaaaaagaaaaagcccttactcttctttagatgttagctgggacattctctcttgactctctgttcagcagagctcatctgctagaacagtgcctgacaccaagtagactttcacaaaggtgttgtctcaactgattagaacactgttgctcttccagtgaagccatccaaaaggaaatatggcacacatcaagagaaatcatagagaaatgaaaagcctgtgcaaacaatgccttccaacccctctatagtggacgtttgtcrtttctgcctgcccagcatattttgaactccttctttagattttaatagtcccctatgttacgaatcttgccttgccaatatagaaacaaaactacctttcctacgtttctttgccccaagcataaagaaacatgayttcatttctgcaacatacacagccataagatgactgagttggaatagaactacataaggaaacaggaaagggtggggtatctcttcagagggtagcaatagagttaagtagagtagttaaacggaggtagcctgatctgaaggtggcagtggtaaagaaaatcagtagctttagagaatgactccaggagatttttcctgagcctcagcctttgttcccccagtccttccagtgattttgtatgctttctcctatccttccataaacatcttattgaggaaacaagcacagtgaattctgttgcctactgcttagaaccattaccaatacacagccctacttctgtgttctcgtattttttaacccactattggctgcaagttctrttacttacagtctaattgattccaaggtagcaaagacaacttggaaaaaaaagattaagaaaaactagaactcgtgccagcaggtattaaacatattataactatctgaaatatcacctagagagggaatatcagcagaggaaatcagttgccaggtccattcaagagcaagcaagagaccgaaactggtaaacaaggaggtgggaagaaagtaagaatggagtgtaataagagcacagtcagaagcattttacaaggagggagtaattaattatttcaaaggttgggattgagttgaatgaaatgattaaatggctatgagtaaaatgaatgccaaatcacatccactggatttggcaacttagcattcattttttgacccagaaagtgagtactttttgcctactggtcaggagaaactttagttggcataggcttaagaagaaataggtggactttgacttggttgcagcttcagcagagctatggacccacaggttcctgtgggttcaccgccagtatttctccytgaggaacaagtcagtcaggaagtgacactgtagccatggcttttgaagacagaagagacacttgtggaactaagggtggcaactcaccaaactagaatyatctaaccagtggcaaggtaaaatccctggagatggtttgtgttgacttgattagaggtacataggaaaaacttaaagtgaagrgacagatcaaagaatcaaagaatcactacaagaaaaatttcttacggcgaatgytctaaccattggaatggtttccagatgagaatccccaagcactcattaactttaacagttccctggaaactaagcagattacttcatcagtattgagccaggagtagaggttgaggtcgtcattgcaggtacttaagtcaactagcttaataaattggtatcagtagctaaatacataaatagaggatgagacagtaacagmagcaaaaggtcccaaagaattatcacaaaaactggaatgagacacaaaggctaaagagaattgtttatttaagataatagataacttaagaatgctggtgtactgataaagaaaagagggaagtgtttgaagagtgatttcatttgttaagytggaggtgatgtgatccaaaggataaagtggaggatttggcctctgggttgaaagtcgacatttcttcccactagcaagaggtgaagcaaagaagttcaagtggagacagattactagattgggtagtgattttgaaaatgaaggtgctcttctcttatttcttttatcatttcaatgaagtataagtgagatcatcagctgatagaggcagaaatgtgaagagaacggagaaaacattaaatatttgtgttgacagtgaacttacacagctatagaacattttcatcattgcaggaagtcctgttgggctgcactattccagagcaatgtgtggccacgaggtgagcagcttaggtaggatggatgtaattatgattggaaacaaggaaggccaggaagctggaggccagrgtgtcaaatatactattaacatggatgttgttccaggagaattatggcagcagtagaactggagaggaagagattgatttaggtgttctcaagacttcaataaatgacagggagtgacgaggaattagaaaatcacactaagaaggaacattgaaagatacagtcaaatggtgtatgagcatcaaaggagccgtgggctttgaagactgtggagatgttttgatagtatcaaggaggcacaaggagggcatttacacacataatgccccgaaggttcatgaggtatggaaaaaatgaacaagcggcctctactgaagaggactgcaaaggaacttgtgtcagagaaagtccccagtgattatttaaaatctaaagaaaaaaaagcctcacagtgtataattgttataaaagtagacagagtatgccgtggtgtggtggctcatgcccgtaatcccagcactttgggagaccaaggcaggtggatcacctgaggtcaggagttcaagaccaggctggccaacatggcaaaaccctgtctctgctaaaaatacaaaaaattagctgggcacagtggcacgcgcctgtaaccccagctactcgagaggctgaggcaggagaattgcttgaacccgggaggcagagrttgtggtgagccgagatcacgccactgcactccagcctggatgacagagtgagactccatctcaaaaaaaaaaaaaaaagtagagtagtgtactccataatatataataatatatatataatatatataattctaaaacaacacaaatcattaagaaagggtagtgtatctaataaytagtgctgggcactcaagttactaaatatcagaatgattattaaatacaggatgtcaaaaaatagaagaaaaatcaaataacaaatttctagttaggaaaacactttctatgttatgagaaaatctggcagaaaaattagcaaaaaattgacagatttaaaaaaattctaagtaagaaagaaaacaatttaaaaataaaagatgaatcaaacaaggaaaaatttttcaaacaacagaaaaaaacacccagaaaggaataaactcacaacagtgaaaagaacaggaagaaatggttgacccattgaagcgaagattcaacaaattcaaacagggaacctccagaaggaacaatatttgattactaggagtttcagagatgtggaaacgaaaagataaaggaaaatgtaataatcaaagagctgaagaacaccactattctcgagatggaaggagtccatgaaatgcttggtatgatgaatgaaaaaagactcttccttagaaaatttcagaaccccaaggaataaataaagatcatctcatttttaagaaagaaaggaaaaacaaagagccagctcactggcaaaggcatgagaatcagactggcattaacctcatcagtgcactgatagcaaacaaaaaagcaattaaaaggttgaggctaggggggcagcaaacaaactagacatcttgcccagaaaagttaccaaacaattgcatatcagaataaatgcattttcagaatttcagagcatagcagaaagttgttggctcatttagatttgttagtgttttgctttggctgttcatcatccagccttcttccatttttagggaatattccttgtgtatgcagtattggttggacttggttcaacaccttcaaatatggaagacaaattgataaatcctcctctagaggcaatatgggctgggatctaaattttgccactgaatgctgttatccaggattttgaatccaaagtcaatgttataagaatgaaggggcagaaataacttactaatggtagctagaataatatctagtggtgacaaaaggcctattcctgctaaaagacagtggtcatatttcctgcttgagtctccctgcttcttgaactttgttctataatttttatcacatttgtgagctatccaagttcctttcaatagattcctttcctgtttaggatagatactcagtttcttctgtttgcatctaagtatcttagcttattctataattaaatcagattccaggaaacaaacttccaggaatcagtaagaaaatttggcctagctggagatgaaggcaaacagctaatcatattgttcacctgtgatccactgccctcagagggcaaggctttaaacagtatgaagggggtgggaaattcaagaactaccagctacttctgaaagtctcaggtrtgttaaaagaaaggaataccttaatcaggttcctaagttctcagtgaaaggtaaaaatgcaacttaaggaatgcctatcactttgctaaaataatctctcatctcttaaagccacagagctataaaagccaatgaacagatttgagatttaaccatgaaaatagctgatatacaatgtcaattaaattcatcacctagtcatgtcttaataaaggttcgtgtatcacagaaatggaattccgtcttcagtttggagagaatatatgtgattctaattgcttgctatgcttataaacaaaccacaatggtggtccttgctaaataaagttcagatgccagaaatcccttggtacatagcgtaaagaatggaaaaagatatatgacataaaaattaattttaagaaatctagagtggttttattaattagaccaagtagatttcaaggcaagaattactaccagacataaaagtggatacttaatttgattatagtaaaagagaaaagttttaaaagccataagattggaaaggaagaaatgaaattgtcttttactacagatgatatgattatataggtaaaaaatcatgtatttaccaaaaactgccagaactattaaataagagggtgaaggatcaatattaaaaaatcacttttatttttatatcttaaggatctcagagttagggttgtctcagagaaacagaaccagtaggatatacataaagaaatttattgcaagaaattggcttacatgattgttgaggttggctaggtaagttggaaattcacaggacaggatcagcayggcaggctgaaacgctgtggcaggaactgaagttttggtccacaggaggaatttcttcttcctcaaggaaatctcagttctactcttaaagcctttcaacagattagatcaggtccacccagattagcaaggataatctcttttcactgaaggtaaactgattatagatgttaatcaagtctacaaaatacctttatagtaacacatagattagtgattgactaagagccaaactgacacccaaaattgcccatcacattaaacaacaaataattggaaaataaaatgaacaatacaattttcaatagcatcaaaaatcataaaatacctaggttaaatttaacaaaatatattcaagacctctacactgaaaatgacattactaggaaaagttaatgaagatataaagaaagaaatctccccatgtccatgtgttgtcagactcaaagactcaatactgataaaatgtctactcttctaaacttgatcaacaaattcagtgcaagcccaatcaaaatcccagcagatctttctctagaatttgataaactggttctaaaatttacatgaaatgtaacagacctaaagtagccaaaagttttgaaagagaacaaagcaaactctaatgctttcaaacttactataaggcttcagtaatcaagacactgtggtactgatctttgacaaagctgtcaaagccrttcaataggaaaaggaaagtcccttcaacaaacagtgctgaaactggtatatatggtcagatatatctatatatgtctacagcgatctagatatgtatagccatttatagatatacatagatatatgtatacatatacttgtatacacacacacatatacatataagaatatgaacctagacccattccttacattctacacaaaattaacttgaaatatgtcatagaccaaattataaaagcaaaaatcttcaggaagaaaacatgggttaagtaaaaatttcttaactaggaatcattatccataaaatagaaaaggtagacttacaattcatgaaaatgtaagtctctgctcatccaaagacaccattaagaaaacatatggaaactgcaggctggaagaaaatatttgtaatgtctatatctgataaagacttgtatccaggatatataaacaatttctacaactcaataatagaaagaaaaacaacccaataaaaaaatcagccaaaaaaycttgaacagcctttttatgtaaaaaggcacagaaatagttaataagcacaagagaaagtgattaatatcagtcattagggaaatacaaattagaatcacaatggcatatatcacatagtcattaaaatggcaaaggtgaaaaagcctgacaacaccagatactgctgaggatgtgaaacaatcaaaagtctcatacattgctgcaggtactgtagaatggtatagccagtgtcgaaattgttctaatagtttctcataaagttaaaagcacatctattttgctgggtgtggtkgctcacacctgtaatctcagcactttgggggccgaggtgggcagatcacctgaggtcaggagtttgaggccagcctggccaacatggtgaaaccccgtctctactaaaaatataaaaattagccagccatggtggtgtgcgcctgtaattccagctactcctgaggctgaggcacgagaattgcttgaatccaggaggtggaagttgcagtgagctgagcttgagccactgcactccagcttgagcaacagagtgagactgtgtcccactaccctcctcttccccgcaaaaaatatatctactctatgactaaaaattccactttcaggtatttaccaagaaaaatgaaaacataagaacatagaaaatgtaaagaatgttcatagtagtttcattttattcataatggctcaaaaattaaaacaacctaaacaaatgaggagaatggataaaaacgattgtaatataaacagacaatggaatactcttcagcaacaaaaaagaacaaaccactgatacattctacaaaatgaacgaactgccagacttttatgcttagtgaaaggagctagatataagagtacatattgtatgattcaattgatatgaatttccacaatagacaaactaatctcaggtgaaagaaaaccatacagtgattgcctatgggatggggatgaggtgcaatggaattaactgagttattacataagggatctttctgtggtgataaaaatgttctatattttaatagacagggttataggaatatttgcaattgtcacaactcatcaaactttacatttaagatgtgtggatttcacagtatgtaaatgtctcctccatttacaaagaaaaagaaaaaaaaagcttccagggagtaaggtttaggttaagccacactggagctgagctcagttgcttcttatcacaatatttttgcaagatttaatttgtaaccatttgcttgtattactttgattaaaatttaaagtacttgtacagacttccaagttaaaatggtagaataaaaacatctgagactttccttttctccaaccgtaatgatagaataacaaataggaccaaaccagtcaaaatacctaggattcaaccaaaagaaaaggaagagattcatgtgatacaattcaaaatgtgcaacctgagagagaggtttccttgaatacccttgtcttgatcccttgcagtaaacataatccatagtccaaactccccaacacacacacagacacacacacacgtacacacacacatacacacacacacaatgcaatagacgtgagagaaaagtttttaaaaagttattctaagacttccaaacaaagaaaggtgaaccaacacacaaaagttgcatctgcactagaaaaaatgtggaatatgggaaagtttaatttaaatgtccctacgccggcaggaaactaaaagaaaggcattagtcaccactagctataagaatctgagaaatgttgccctgaagctgggtacattactgtactgaataaaactgagtgttaaggaaataagtaaatagggaggaatggacactgagtaggctactagtaatgtatgccatagatggcaaattctatctagagaaaagatagcgaaagaaacagaagaaatgtccataggaagttttcatattgtggaagaacataatgaaaacatgaacctaataaaagcagagaaccttaaaaaagagacgataaaactgcagcgtgaaatgaaaaggaaaatcgtagatctaagaaataagttgaagggcggggcacagtgctcaggactgtattcctagcactttgggaggcggagacaggctgatcccttgagcccaggagttagcgaccaaccttttctccacaacctcggcagcatttgttattttttgactttttaatagtagccatactgactggtgtgagatagtatctcattgtggytttgatttccatttctccaatgattgattttgagctctttttcatatgattgttggccacatgtatgtcttcttttgaaaactgtctgttcgtgtcctttgctcactttttcatggggttatctttttcttgtaaatttgtttaagttccttatagatgctggatatgagacctttgtcagatgcatagcttgcaagaactttctcccattctgtaggttgcctgtttactctgttgttagtttcttttgctgtgcagaagctcgtaagttaaattagatcccatttgtcaatttttgcttttgttgcaattgcttttggtgtcctcatcatgaaatctttcctcctgcctatgtcctgaatagtattgcctaggttgccttcaagggtttttatagttttggatttcacatttaagtctttgatctattttgaattagtttctgtatatgatgtaaggaaggggtccagtgtcagtcctctatatatggttagccagttatctcagcatcatttattgcatagggaatactttccttattgcttgttttttcaggtttgttgaagatcagatagtcgtaggtgtgctgccttatttctgggttatttattctgttccattagtttatgtgtccgttcttgtaccagtatcatgctgttttggttactgtagtcctgtagcatagtttgaatttgggaagcatgatgcctccagctttgttctttttgcttaggagtgccttgactatttaggcttcttttttttggttccacataattttaaaatagtttttctagttctttgaagaatgtcagtgatagtttaatgggaataccattgaatctataaatctacaaattactttgggcagtagggccattttagcaatattgattcttcctatccaagaatatgggatgtttttccatttgtatcatccctgatttctttgaacagtgatttctggttctccttgtaaagacctttcacctccctagttagctgtattcctaggtattttattccttttgtggcaatcgtgaatgggagtttgttcatgatttggatcttggcttgattgttggtgtacaggaatggtagcactttttacacatcaattttgtatcctgagactttgctgaagctgcttatcagcttaagaagcttttgggctaagatgatggggtgttctagatatagtttcatgtcatctgcaaacagggatagctagacttcctctcttcctatttgaatgccctttatttctttctcttgcctgactgccctggccagaacttccaatactatgttgaataggagtgatgagagagggcatccttgtcttgtgccagtttttcaaggggaatgctttcagcttttgcccattcagtatgatgttggctgtgtttgtcatagatggctcttattattttgaggtatgttccttcaataccttatatactaaaagtttttaagatgaagagatgttgaattttattgaaagccttttctgcagctataaagataaccatgtagtttctgtctttagttctgtttatgtgatgaatcacatttgttgatttgcatacgttgaaccagccttgcatcccagggaagaagcttacttgattgtggtagataagttttttcatgtgctgctgaattcagtttgccagtattttattgaggatttgtgcattgatgttcatcaagaatattggcctgaagtttttttttgttgtatttctgccaggttttaatatcaggatgatgctggccccatagaatgagttagggaggagtccctccttttcaatttttgttaatgctttcagtaagaatcaaaatagctctttgtacatctgataaaaatcagctgtgaatctatctgctcctgggcttttttggttggtaggctatttattatgccccaatttcagaactcattattggtctgttcagagattcgatttctttctggttcagtcttgagagggtatatgtgtccaggaatttatccatatcttctagattttctagtttacttgcatagaggtgtgaataatattctctgatggctgtttgtatttctgtgtcatcagtrgtaatagcccccttatcatttctgattgtgtttattgtgtttatgtaaatcttctctcttttcctctttattagtctagctagtggtctattttattagcttttttgaaaaactagctcctggattcactgatcttttgaatggtttttcatgtctctatatccttcagttcagctctgatttaggttatttcttgtcttctgctagctttgggatttgtttgctattggttctctaattcttttagttttgatgttaggttgttaacttgagatctttctaaccttttgatgtgggcatttagtgctacgaatttccttcttaacactgccttagctatttcccaaagattctggtacattgtatctttgttctcaatattctcaaagaacttcttgatttctgccttaatgtcataacttacccaaaagtcattcagaagcaggttatttgatttccatttaattctatggttttttttatatatatacgttgagttctagggtacatgtgcacaacgtagaggtttgttacatatgtatacatgtgccatgttggtgtgctgcacccatttacttgtcatttacattaggtatatctcctaatgctatccctcccccttccccccaccccacaacaggccccggtgtgtgatgtcccccttcctgggtccagctgttctcattgttctattcccacctatgagtgagaacatgcagtgtttggttttttgtccttgcaatagttttctgagaatgatggtttccagcttcatccatgtccataaaaaggacatgaactcatccttttttatggctgcatagtattccatggtgtatatgtgccacattttcttaatccagtctatcattgwtggacatttgggttggttccaagtctttgctatcgtgaatagtgccacaataaacatatgtgtgcatgtgtctttatagcagcatgatttawaatcctttgggtatatacccagtaatgggatggctgggtcaaatggtatttctagttctagatccttgaggaatcgccacactgtcttccacaatggttgaactattttacagtcccaccaacagtgtaaaagtgttcctatttctccacatcctctccagcacctgttgtttcctgactttttaatgattgccattctaactggtgtgagatggtgtctcattgtggttttgatgtgcatttctctgatggccagtgatgatgagcattttttcatgtgtctgttggctgcataaatgtcttcttttgagaagtgtctgttcatatccttcgcccactttttgatggggttgtttttttcttgtaaatttgttagagttctttgtagattctggatattagccctttgtcagatgagtagactgcaaaaattttctcccattctgtaggctgcctgttcactctgatggtagtttcttttgctgtgcagaagctctttagtttaattagatcccatttgtcaattttggcttttgwtgccattgcttttggtgttttagtcctgaagtccttgcccatgcttatgtcctgaatggtattgcctaagttttcttctagggtttttatggttttaggtctaacatttaactctttaatccatcttgaattaattttygtaaaaggtgtaaggaaaggatccagtttcagctttctacctatggctagccagttttcccagcaccatttattaaatagggaatcctttctccattgcttgtttttctcaggtttgtcaaagatcagatrgttgtagatgtgtggtattatttctgagggctctgttctgttccattggtctatatctcagtaccatgctgttttggttactgtagccttgtagtatagtttgaagtcagatagcatgatgcctccagctttgttcttttggcttaggattgaattggcaatgagggctcttttttggttccatatgaactttaaagtagtttttttcccattctgtgaagaaagtcattggtagcttgatggggatggcattgaatctataaattaccttgggcagtatggccattttcacaatattgattcttcctacccatgagcatggaatgttcttccatttgtttgtgtcctcttttattttgttgagcagtggtttgtagttctccttgaagaggtccttcacaccccttgtaagttggattcctaggtattttattctctttgaagccattgygaatgggagttcactcatgatttggctctctgtttgtctgttattggtgtataggaatgcttgtgatttttgtacattgattttgtatcctgagactttgctgaagtwgcttatcagcttaaggagattttgggctsagacgatggggttttctaaatatacagtcatgtcatctgcaaacagggacaatttgacttcctcctttcctaattgaataccctttatttctttctyctgcctgattgccctgrccagaacttccaacactatgttgaataggagtggtgagagagggcatccctgtcttgtgccagttttcaaagggaatgcttccagtttttgcccattcagtatgatattggctgtgggtttgtcataaatagctcttattattttgagataagtcccatcaatacttaatttattgagagtttttagcatgaagggctgttgaatttcttagtctggaattctaatttgrtagttctatggtctgagagactgtttgttaacatttcaattcttttgcatttgctgaggagtgttttacttccaattacgtgattgacttcagagtaagtgccatgtggtgaggagaagaatgtatattycattgttttgggktggagagttctgtagatatctatcaggtccatttggtccagtgctgagttcaggtcctaaatatctttgttaattttctgcctcagtgatctgtctaatactgccagtgaggtgttgaagggtcccactattattgtgtggcaatctaagtctctttgaaggtctctaaaaacttgctttatgaawctgagtgctcctgtgttgggtgcatacatattttagaaagttaggtcttcttattgaattgaaccctttactattatgtaatrcccttctttgttttctttgatctttgttggtttaaagactgcttgtttgaaattaggattgccatcctgctttgttctgttttctatttgcttggtaaatttttctccatccctttattttgagtttatgtgtgtcactgcctgtgagatgggtctcttgaagacagcatagcaatgggtcttggttctttatccagcttgccactcttgagtcttttaatgggggcatttagcccatttacatttgaggttagtattgatatgtgtggatttgatcctgtaatcatgatgttagctgcttattttgcaggcttgtttatgtggttgctttatagtgtcaatggtctgtgtacttcaatgatttttttctttttctttttctttgttttttgagatggagtcttgctctgtcacccaggctggagtgcagtggcatgatctgggctcactgcaacctctgcttcccaggttcaagtgattctcctgcctcagcctcccaagtagctgggattacaggtacgggccaccatacctggctaattttttgtatttttagtagagatggggtttcaccatgttggtcaggctggcctagaactcctaacctcaatgatctacccaccttggcctcccaaaatgctgggattataggcatgagccaccacgcccagcctttagtgtgtttttgtagtggctggtaacagtctttcctttccatatttagtacttccttcagcagctcttgtaaggcagatctggtggtaattaactccctcagcatttacttctyttatttctcctttgcttatgaagcttagtttgtccagatatgaaattctgggttggaattttttaagaatgttgaatattggttcccaatctcttctgacttttagggtttctgctgagaggttgactattagtctgatgaacttcccttcctaggtaactgggcctttctctctggctgccttttaacatattttctttgattttaacatattttctttgattttgaccttggaraatctgacgattatgtgtcttgggaatgatcttcctgtggagtatcttactggggttctctacattttctgattttgaatgttggtctttctatccaagttggagaagttctcatggatgatatcctgaaatatgttttccaaattgattccattctccccatctcttttaggtacaccagttagtcatagatctggtctctttacacagtcccatatttctcagaggttttgctcattcctttttactattttttctctattcttgtctacctgtcttatttcagaaagacagtcttcaagctctgaaattctttcctccgcttggtctattaggctattaatacttgagattgcattatgaaattcttgtatggtgttcttcagctctatcaagctggttacattcttttctatactggctatattgtctctcagctcctgcaatgttatatcatgatttttagcttctttacactgggttatgacatgcttctttagctcagtgaaggttatttttatttgaatctaattctgttatctcagccctctcaacctcagcccagttctgaacccttgctggagagatagatgcagtcatttggaggaaaaaaaggcactctggtttcttgagttttcagctcttttgtgctgactctttctcatctttgtgggcttatctaccttcaacctttaggttgtggacctttgcatggctttattttatttttttcttttaacagtctggccacttttcagtggggctgctacagtttgctgagggtctgctccagtacctagtcagctcagattttccagtacctggaggtatcaccagtgaaggctgcaaaagagcaaagatggcagcctgctgcttcctctgagagctctatcccagggaggtacagacatgttgccagcctgaacgcaccaataggaagtgggtggagrtgctggttgggaggtctcaccctagtcatgagtaacgggattgtggacacgcttaaagaagcagtctggccatgcttttgtagagaagctgtgctgtgctcggataccamttctgctcaggtggcttgggctctccaaacaccgtgggctagaatggctgagctgcccaaacagcaaagatggtggcctatccctccccaccgggaactcgatcccatggagaactgaaacctctgctggccagagaacaccagtgggaggtggttggaggcttcgtttgggaggttccacctagtgaggaggaacaagatcaaagacccacttaaagaagcagtctggtcacactttagtggagcagctgtgctctgctggtgtaccacttcagctcagatggtttggactctcccaagaccacaggctggaatgtttaactcactcaaacagcaaagatggcagtccactctacccccagaaactgcattccatgtaggcacaacactgttgctggtggccggcaggaattccaagccagtgagtcctatcctgtgaggtgtcatggaagtggggcccacagaccattgctgcttggccccctggaatcagctgctttcctaggggtatgtacagaattgtaacttcccactttgctggagttgcagttacttttgctgggaagcctggagccagagtatgtaaagcagctgctctgccaaaactgcatgtagctctgtgtgtctgaatgaaggacctggtggagttggttcacaaggggatcttctgacccaagagttgcaaagatctgtgggagaagtgtagtttcctgaggttgcacctacactcactgcttccctggacagaggaggtttcattggctctgtgttgcttccaggcagactgctgttttgccttgcttttctccattctccatgggtcaagttatttccttgattagtcctagtgtgagtacctagatgttgcagttgaagatgctgtatttacttgtactttttgttcctctccatgaaagccacacaccatagctgcttctagtcagccatcttggccatgcagccccattttcttacctttcttaatgaaaaatcaataaccatttcaagatgaataaatcaacaaatagtagtctaagttgtatattgtttgtatgtcataagggaaatcaccagaactaaaaataaaactgcagctaagaaattcagaaggtgagaaggagaaaagaggtagaagaaagtgtagtgagctaattatctaatctttcgtaggagacataaacaaaaactaaagctgctatagcaagaagtagtgattagataaaatatatcaactgacaaatgtttccatagcaacgtgtaaaaagaagatataagccttccaaattataagaaggaaagcacacactgcatacactgaaccaaagtaatggtaagaaatttcatgaataaaatacaaaaataaaaaacgaagtatttaaaacaaaaaaacccataacattggatgaaaaaactaaaaccaattatattttttgacacctaatgtaaatagggtatattcacagaaagatgaccagattgggtaaaaaaataatattttatagatgaaaatatgttgtatatacaagaaccatacagagctaaaagactcagattgtatagaagaaaaaaagacataacaaggaaatagtaacaaaaaaaaacttgaggtagaaatatcaatatcacaaagactaaatccaaagcaaatattttacaagatagtccattttgtgagtataagatatacaatttactatgagattgtagttgccataaatatgtacataaatagtaaaagatagaacacatatgctgcaaacaaaacaagaagaaatagaccgaaatatggtattgcagtggaatttaacttgcctctaggttcatgacagatcagctacacaataaaataagcacacagaagatgtaaatgatataattattatacttcagctaacagatatgtctcaaactctttaacaygaaagagtatataacctcttttcaagaccccaaacatacataatgccatataaataaacagataatttccaatatatacacaaatacatgaagaacagatcatgatctctggatatatttcaatagaagtagaaattaatactctaaaaagaaaaatatataatcataggaaaattctatatctttttcttaaatactttgaattcaaaatgaaaattwaaaaaattataaaataaagataataaacacatcacttaccaaacaattaagggcttatctaaagttgtgctcaaagaacaattcatagttttatactcttaaggaattaaaaaggaagctaaacaagtaaattaagtagtagactcaaaaagttagaagtgctagaaaattaaaccatgtgttttcaaagaaaacagaaggaataaagtaatgatgacttaagcagaaattactgatttgggaagcagagaatcagtgaaattgataatccttgagcatgcataaagtttgtggttattaggagaagggagaaaacatggagaaaaacacagttgaagaagagtctcaaaaacttttcattaagaaaaaaaaattcattatgaaagccttcaaatacacacaaaattagaataagaaacataataaacacccacgtatccgatatcacattgtcttgattactgtaccttttctactaagtcttgaagttgagtagtgtcagtcctctgtctctactcttcttcagtgttctgttggctattctgagtcatttccctcttcacagaaacccagaaaccttagaatcagtatgtcaatatctacaaaataacttgctaagattttaattgtcactggggtgaatctacagctaagtagaaagtaactgacgtcttaaccatatttagtgtccctatcaatgggcaggaaatatttctccacttacttgaatattctttcatctctctcttcaaagttttgtagttttcttcatatagatgttgtacatattttgtttggtttgcatctaagtatgttttttgctaattaatttttcgttggtaatagataggaaggcaattgacttttccacattgacattctatattgtatcctgcaaayttactataattgcttattagttccaggagtttcttgctggtctttaggattttctacatagacgatcatgtmatttgcaaacatagatagttctgtttcttccttatcaatctgtataaatatatttcttattcttgtcttattttagtaaaatgtagaataggagtggtgagagggtacatccttgtcttactccmaaataaatggtgagaaagcgttcagtttctcaccattaagtatgatgttagctctagttgttttttgtagatattctttatcatgttgaggaagttcttctctattcctagtttgctcatagtttttattatgaatgggtattggatgttgtcaaatgttttttattatcaatgagtattggactgatgtaatcataattgttttctgtagcctattgatatgatggattacatttatcaatttttaaatgcttaactaatctttcatacgtggcatacatgctcataggtcacagagtatgtttcctttcatacattgtttaatttgctactgttttgagggtttttgcatctatgttcatgagagatattggcccataattttctcttcttgtaatatctctggttttgatattaggggaatgctggcctcatagaatgaattaggaagtgtttgctctgcttagatattctggaagatgtygcagaaattgataccattggttccttaaatgttttgtaaaaccccagtgaattagtagaaaatgccactgaaaccatctgagcctggtactttcttttttggaaattattaactctatttttaatggatataggcctgttcaaattattnnnnnnnnnnnnnnnnnnnntcaaattattcatcctagtgtgagttctgatagtcggtgtctttcaagtcactagtccatttcattttagttatcacatttgtagcatagaattgttcatactattcctttattatattttcaatgcccacaagataagtatgatggttctattttatttataatattagtaatttgtgtgttctctttttttcctttggttagcttggctagaggtttatcaattttattaatcttttcaactaaccaggctgctctgtctatggagtagccattcatttttttctttaattctctatcaaacttgtttcactttactccatggactccacatgaattttttcttctgcgagatccaagaatgctctcttggggtctagatctggacctctttctggcaacatcttccatggcaaaccatgaagggaccatactgaagagacccccaactcaaaggaaatagactgcagcaccaattggctgaatttgtagtcaagaaaacttttcttttgagctatttacagcttttaggaattgagtaaaatatactcctgtaaacaaaatctggagcatatttctttctactttatttctccagaatttagaaattatttatatctttttggggtggttgcggggacagggtctggctgtcacccmggcaggagtgcagtggtgcaataacagctcactgccttctgggctcaaatgatccttccacaccaccatgcacagctaatttttgtattttttatacagacagagttttgctatgttgcccagattggtcttgaactcctgagttcaagcaatctgcctgcctcagcctcccaaagtgctgaaattacaggtgtgagccactgcacctggccttatatcaccttttgttgggattctgagttataaatggccctcaccataccgatgctttctcactgaatgcttctctatcctgaatacaagagaccctaatacttagacaggaatatcatcacccattcagcctgaagaagttacagaagatgaaccttttaggattaagggtcccttttagaagggagaggggaaatatgtcagaggtgtttgaatcagagcaactccattctgaatagggactggataaaatgaggctgagacttgctgggttgcatccccaggaggttaggcattctttgtcacaggacgagataagaggttsgtggaactggtttcacaagatacaagtcacaaagacccagctggtaaaacaggatgmggtaaagaagccagccaaaacccatcaaaaccaaaaggaggagaaaagcgaactctgattgtcctcactactcattatatgccaattataatgcatttgcatgctaaaggatactcccaccagcacartgatggtttacaaatgccatggcatttgaarttaccttatatggtctgaaaaggggaagaaccctcagttctgggaactccccatccctttctcgaacaacacatgaacaatccaccccttgtttagcaaataatcaagaaacaaccataactatactagttaagcagcccatcctgtgctgctctttctatggagcagctattcttttgtttctttatttctctaatatatttgctttcacttaaaaacaaaaacaaataaccaatattttgtctgttgatattctctattgctttcctgttttcaatttcttaatgtctgctgtaatttttatttcttttcttcaatctatcttgtattaatttgcttttctttttttgtttcctaatgtggaagcttagatcatcgatgttagatattccttctttgctaatatatgcattcagtgttataaatgctcctcaaagcactgctttctctgcatcctgaaaattttattttattttattttattttattwatttattttgagatgagtttcactctgacaccgggctggagtgcagtggcacaatcttggcccactgcaacctctgcctcctgggttcaagtgatactcctgcctcagcctcctgaatagctgggactacaggcacatgccaccacgtccacatccagctaatttatgtattttttagtagagatggggtttcaccatgttgtccaggatggtctcgatctctygatcacagatctcttggtctgcccacctcagcctcccaaactgttgggattacaggcatgagccaccgcacctggccctgaaaattttaataagctctattttcatttttatttagtttaaaatattctttaatttctcttgagacttcttttttggcatgtttgttatttagaagtttattatttartctccagatagttagggatttttccagctctattctgtcttttgttcctaatttaattctattgtgatctgagagcatactttgtatgatttctattctcttagatgtttgttaaggtgtgttttatgggcaaagttgtggtctatctgggtgaatattccatgagagcttgagaagaatgtgtattctgtagttattaaatgaaatatactatgaatgtcaactagatccagctgatcggtggtggtgctcagttcaactatgctctcattggttttccatctgctgcatctttaaattactgatagagggttgtatatacagttttaataattatcaacattttgccatttcatctattaacctccttttttcaatcgcatgggatgaaatatctctacattgacagaagatgggtaagaatgtgtcaagtttctttaaaaaggttttatccttaatattttaaatgttttaaaaagcatagattcacagagaattgcacagatagcacagagagatcctgtttaccctttacctagtttctcccaatggttatttcttatgtacaatataaaaaccacaaaattgacactggcacaatgtgtatgtataattctattccatttttcacatgcacagatttgggtaagcaccaccaagtggttagagaactatttcctcatcacaaaggtctccctgtgctacccctttaacttatcacagtctactagtattatcattttaccagtatagaaaccttaccaccttttatgtgtctttcccttcctctgtttacaaaataattttcttaaatatttcttatatatacctgagacaatgttataatttttgtatgaaccatatttagaaaaatcaagagataaaatttattgtaattactcatacttttccatatattccctctttttgttctttcttccttcttgtttcaagaatcctttggttaatatttcatttctgattaaataatttcctttagccattattttagggtgggtctgatggagacacattcttgttttccttcatttaaaagggtcttcatgtgtcctttatttctgaaggatatttccactgggtatagaattcttggttgacagttctttactttctttcagcactgaagaaatgggtgtcactcccttctggcttccacactttttgatgtaaaatctgctatcatttgaattgtttttttccagaaaggacaagtaaagtgtcctttctttcgctgctttcatgatttttttctttgcctttaattttcaaaacttggactatgatgagtcttgatgtgaatgcctttgggtttattctgtttaggacttattaggcttattgaatctgtatatttatgcaaagcccaaaatttgaaaatgtttcaccattatttattctccaagtaatttttcagcagctttatcctctttctcttcctttgaaattcagataatcaaatgttacatattttattatagtctcatagctccctaaggctgtttgatttttcagtgtatatactcttcattgttcagtttgagtgatttctatttttctatcttcaagttcactgattctttcctctgctctctgaattttgctgtgaaacccatctattaagttttaaaattttgttttatttttaaattctaaaattttcatttggttcttctttatgtcttctatttctgtgctgatgctttctactttctttcttttatcatctgtttcaagagttttacaatggcccactgatgcatttttattgtagttgctttaagaatattgtcagacaattctaacatctgtgtcatctcagtgttgatgtgtattgattttcttttctcatttaagttaagatcttcctggttctttcaatgataaatgattttcagttgaatcttggaattaaaaaaaattgctggtaaatagtaggtgtatatgaatcttggacattttttactttattttgtgagactttgggttatatttaaattctttgttttagcagcctcctctgatactgcaatggtgggcagacagggcaagggatgcctcattactgctagatgacggtggaagtccaagatctacatgcagcctctgttgacactcttgaggggaggagtaacttgttatttattactgggcaggggtgacagtacagggtcaccactcaagctcttctgtaccactctggctaggacagtggtgtttcattactgctcccaatgtagtttcccatgatattccatgacaccttggtggtggtgggatggcctcattactgctgggcagtgagaagattcctgagcatctactaggtatcttctgacaccatcccagcagacaggggmatctcattactgttaggtggaggtggaagtccagcttctccactgacaccatgggragaaggtggctcacgactgtgcagggggatgaaagtctgagctttccacttggctttctctgacactatccaggagaaggggagggataccttgctacaccctggtaaggatgaaagtctaggctccttacttggccattgttggtaaaggtgactacagtttttttctgtggtttggttagggcagttattgtctaaaagtgttttgtctttctaggctatccctttcttgtcttttggctagagagggcaggctttctttcgaggctttctttggtctgttgccaatggcatttccaaattgccagatttcctagcactcattctgggatacaaaaagcaaaagacaattcaggaaaaccaccatcatgtcattcctcaggttccaaggtcactagcagggtaactagtctgccttcttctccctaccatttacagtcttcttatgtgtgcatgctctctctctccacatatatttatttatgtttagttaagtatacttgccaagaggaataaagtacatctaatccactctgcctttgttcttcttgcagtattttgaatcaaacccaggcatcctatcatttcatctataaagactttagtaagtataacattagccagtatattaaaaatataacaatgattccattgtcacatctcccaaaattaaaaataaatatttaatatctagtaaccagtgttcagttcagtgttctatcactacataacaaattacccctaaagttataggtttaaaaaatttattttgccttagccttttatgggtcaggaactcagaagagtttgcctgggtagttcttacttggggtgtctcacgcagttgcagttatatattgactgtagctgcaaccatataaatragacttactagactggatgatagcatcaaaaatgttrtttttcactaacattcatatcaaaatcccagataaggggcaagcattgcttttggtggttgtgccataacagttcccctccctcttctctactgatgtcatttatttgaagaacttggtcttgtggtatatcccattctagatctggttacctatattctcaaggtatcatttaatatgtttcatggtcctctattgttcttggaaactgggagttaaatgtagagatatggttacattcaggctcagtttttttgacaaagatatttcataggtggtctgtgtacctcctattgcaccataaaaataaaaacataatgtctggttgtcttacttttcataagttaataattaatcagtaggttctggtggtaacagcttgacacattcactaaaaagttcccaattgactttttgatgcacggcttcccaagtaaatttgtattttggaccagataatgctttgctatgggagactggcctgtacatcgtagaatgtttagcagcatctctgatactctcatcaccactcccacacactgtcttgttgtgacaataaaaaatgtctccaattactgccaaatataccctgaggaaaaatggccacaagttgaacacttcttacctaatggttttagcagttgttaaaaaccgttgcctaggtccattattttattagggtttacaagtagtgatttttctaattccatcattcctgcatttacaactgtggttttttttttttttcaaaagaaatactttctctgggtctttctagcaaaggaagaataactggttaataattttatttatcgatgcgtttagaatagtgagctgtgccctaacaacctccaaaagtggccaactaatttttgtttggagtatcattcggaaatcttgaatactgacacacttcatgtatttcaatcttttgctgtcattttttttttctttttgatgctcaagtttccccatccttaaccagcaagatctctttcaacttagctcaggtttccttttgacatgaccttaatagtcagataatttcttgctttcaggcatgacaagacagatagtccagattcactttatgcatttcctttcccagacttagaatctgccactcacccaaggaaccctgattcctttaatttagaaatggtatttaggaaccacaatctggtcacaatgaccttatggtttttgggttgtcactatttctaggtctttggaacatagttccaaagccagaactataaaactaagtttatttagaaaggtttagcttccaccattgtttctttcctcatagtctcccctttctctacagataaccattttttattagatttagtttatacttcttgtttgttgttaaatctataacacactcatacccctaaaaagtagcatacaatattatacagctttcatttaaaaaatattgtaaaaaatagacataacataaaatttaccattttaatcatttttaagcgtgcaattcagtagcattaagtacatgcacaatgttggaccaccgtcaccattatccatttctaactttttcatcatcctaggcagaccactttgtactcactaaacaataactcatccttcccattttcctggagctcctggtaacctttattctactttgtctcaatgaactgcctagtctatctgtaccttgctttttttttattttagtagactgtatatgctagagatcactctctaagagcatacagagtttctcttcattcatatttgacagctgcataatacttcactgaatagatgaagtcatacacaacagttgcttgttcatgggaagtttgtgtttctagtctttcactattataaacagtgctgcaaagaacagtcaaatgtatgcaccatttcatttttttttgtctatgtatcttttatataggttcctaaaagtggaattgctggatcaaagggtaaaggcataggcaattytagagcatttagatttaatgtgatggacaggaatgaaccatgaagccacgtaagtattaaacaacagcaacaacaacaaaaaaagcagatacaggatgttttaaatggtatgactaaaacactgctttaaaccaggagatagttacattagttagctcttttagtttaaataattttattatttgaagcgaagtacgtgaaaataactgtattgctctttctctggattttaacaaatcggtgtctcacatgaaattatgtaactcttatcttttcttctgctttatgagaatactgtaacaaggggtactaccttcagaccctttgactacatggagaaataaaggagggagttgtgccaattactggagaattttggctgtcaaatagcacatctgggcaatttgggccagaaatacatatatatgatatatgatatatatatgatatatgatatatatgatatatgatatatacgatatatatgatatatgatatatatgatatatacgatatatgatatatacgatatataygatatatatgmtatatgatatatatgatatatatgatatatatgatatatatgatatatatgatatatatgatatatgatatatatgatatatatgatatnnnnnnnnnnnnnnnnnnnnatatatgatctatcatatatatgatatatcatatatgatctatcatatatatgatatcatatatatgatatatgatatatatgatatatgatatatatcatatatatgttatgtgtatatatgtatatatgtacgtgtatatatatacacacacacacacacacacaccctcctatacatattcaacattttcccctttaaactaaggttttctaggcttgaataaaccagacactgctcttttgtactgtttcgcaaactgtgcttggatggtctctccttgttttcaggagtgtttgatttttaaattgtgatattccactaaatgagaaatgaccaggacttcacagagatttcatgaaaggagggccacaaaggaagaacccagagcaggccggtgagaggcactctaagaggtacagagggttgcaccaattgctaggatttaatcaatcagaaggggtccaagccaggaagcaagggcatgccccgagcctcatttacccgccttgtcaccaccctgcccgctagtacatttcagagtctctaacccctccctgcatgcaagcccaggcagagtcctgccaggtttcacaccagagcacacccctgcacggactccccaggaccgcggcgccggctggctgcctcggccccccgcggccgcgtgagctccctcttggtggtggagggcgcatttcaatctggaaactcccagcccctaatttggtcccgcagactgacgccgctcccggtggggcggtgggggtaggagggcaaaggggaggtctccctccttcttggattgaggctgcaaccaacagccccgtgagcctctattcctggctgactgcgaatccccccatcccaggtcaggggccgggaccctacagaaagacccgttctcatcctcaaccttgcggcctctgtccggcggggaagttcagctgcgggtcagttcagctgcgggtccggccaagcctggcgcgcttaggcaccctagtcccctggtccgcggccgggcgaggacggagggggaggggaaggggctgctgcctcctttcccaaatccggtccctaatcgccccatcccccgccgtctactcgctttgtacaggcagtcaaaacagagctagcggccaattgacggggacgggaagcaaagccgcctagcgcctcgccccctccagccggccccccgggcccctcctctcggcgcccggaccttggccctccctctcctttcccacttctctctttgccctaacttcgcccccatcccccgctcatttcctctcgcacccgggctcgccaatccctctttccaagtccctcttccagcccggccttcctctcgggttcgccccccttctccccaatctccgtcctcttccctcccttcgccctccccccttccttctcttcccctcacccaannnnnnnnnnnnnnnnnnnnctcttcccctcacccaaccctggttcccctcgttcctcagtcccgatctctcccttactctgtccccgcccactctgcgccggcctctcagtccgggttgagccccacgtgtggacggccgcgcccccactgacagccgccgcccgccggcccgccccgcgccccgccgggcctctaaaacccccgcgccgcgccctccaccgccgcatcttctccagcgcccagcctcccgccctctctcttgctggccgcacgccccggccccgcgcacctccgcccggctccgcagccgctacccgcgcttcgttgccctgtgggactccgagcgagcccagagggaaccctcctcttcttctgggggcgacttttgtttgcttgcctgtttctttctggtgacttttgcagctttccaatatccgtcttcggagcgcacgggaatccgccgagctctgcgtgcaggcccttttttcttttgaggttcacattttttgaaattttacgccagggcttttgtaatttcctcccccgcccgctggcggtcctggagtcgctcggggctttaggccggttatgcaacgtgtaccgctcggggctgccggctgcacctccgccgcgcctcgccgctcactgcgctagacccggcgccccgcgtctcgcttcgcgggcagtcagggggccggcgctctgtcgaggtctccagctagagcagggagcccgagcccgagggagtccccggagccgacgaagggcttattagaccctgactcttttctgaggcgcgcagattttgtctttgatcactccctctccgcgggtctacggccgcgcgctttcggcgccggcgatggggagaagacggaggctgtgtctccagctctacttcctgtggctgggctgtgtggtgctctgggcgcagggcacggccggccagcctcagcctcctccgcccaagccgccccggccccagccgccgccgcaacaggttcggtccgctacagcaggctctgaaggcgggtttctagcgcccgagtatcgcgaggagggtgccgcagtggccagccgcgtccgccggcgaggacagcaggacgtgctccgagggtaagtgggcaagcggctccgcacctagggctccggcttgggggaggggggaatcctcagtttggcggctttctggcccactccgtcccagaccctttagctggagcctagagctgcagccccctttgccagaatatccaaagacccccaggagcgcgtcccccttttccttcccaaccccgcagctcagcgggcggaaagccctctctccgggggttgggcggcgggtggttagggggtccaggggtgccgatcgcagagcgtgtgcagagctcgcgctgcgggaacaggttctgaatgtccggcggcaggcgggcctgggtccgcctgctgcaggggccagagaagcctgcttgctccccacgtcggggccgccgctcgtgagccttttgtttgaggacgtgtgcagggttcacagctcaccttctcatcgtcaacccgagcgctccaccttgcgacgcgctttccttgacacgtcggggccaaagtaacagttgaccaaggaggaatggatttgggaaggagggcaaggattctttggaacggaatggtccctttgttctctgcatctggaagctagaatagtagcaaattatatgtttccatgcctcttttcgccctttaaaaaggcaggcaagggacgacagatgaaaggcagtgtttagacatttctgaccctcctgcattccagcatctagctcttttgcttccacgtctgcctcccgatcyccaataatttgaagtgtaattttgatttgtttgttgtcctgaaatctactcgctcggggcattgcttacgaagaccgtttatatgttgctgcatccctctacctatctgttacgtgaccgcgcttgtccatcacaggcccaacgtgtgcggctccagattccactcctactgctgccctggatggaagacgctccctggaggaaaccagtgcattgtccgtgagtgcttggcagggatcgcagcttggggcagcgcastcggccctatctccggccgacctcttgcactcagccatttggacgcatagttgcgtttaaaatcaagtgatcacattgcactgataatcgggacgcggccccatttgaatagtggggaagactcaaccggtttgagtcagttcagacttcacttctagactctgttraagggcaataatgataaagatttcaaagataattgaaagttttatctttctatgtctattaatacaaattggaagaggggaggagtagagcaattatctagataactcaaaaccactttttctgtaaaaaatccagatragaccacatgttattatgcaaattatcaggcttttaactctgcttgaggtttgggccttatgaagatcaagatttcttaggcatttatataaaaccactttcttatttctggttttatatcaacaaccacataacctagatacgaaaggagcattctcgcggatttagtgttgacctaagttaacaaacttttaaaagacagaactcttacaaaggggcttgagtttttttttttttttgctttttggaagacgtttaaatttagggtttccagaccctgaacctcaatagtgtgcagtagatttccaaagtatgaatcttagaccttgaaaaattctgtatctctgaccttaaaagttttgattattttattctgtttccaaagtgtataaccagttctccaagttctaattggagagctcattagttatcagcctcacagtcacggactctgggatgtcttatttcatatgcctgtaaatttgtgacttgcagtgtgactggccttctcctgtgtgtttatgtagcacaaccacatttgtcttgttggaaggagagccaggtatcatagacagcacattcatttagagccagtcttgactttagattgacctccatgttctccagggagaaaataattatgcaactgtgaacagagaaaaagggcaaggcacactaaccaagggataataaggatgtagtggcatttctaactctgtatttattggttttgtggttttgagatagatgcttaatgttatttctgggcagtttttaaaaaagagatgaaatctccagtgtcataaagactaatttcttcttattttttctaccttaacatcccactatttccaatggcaaaaataggaaacaactgtgttatttaaagtgacttataaatattttgaacaaatcctctgattataataagcctttgctttattttttaaaagaacatgttctgcattcttttctctccaacacagaagtcatatgtgaggcattaatggagggtgggtttactctttcaggccagtagggcattaccatggctgctttaaacttacacggatttttagactcctgaaannnnnnnnnnnnnnnnnnnnnnnnnnnnnnnnnnnnnnnnnnnnnnnnnnnnnnnnnnnnnnnnnnnnnnnnnnnnnnnnnnnnnnnnnnnnnnnnnnnnnnnnnnnnnnnnnnnnnnnnnnnnnnnnnnnnnnnnnnnnnnnnnnnnnnnnnnnnnnnnnnnnnnnnnnnnnnnnnnnnnnnnnnnnnnnnnnnnnnnnnnnnnnnnnnnnnnnnnnnnnnnnnnnnttcatggtacgtgttgaaaatctgtaaagtcagattttattggatcagtgtggaatgggaattccagagagcagagccttccagaatatttgcagtagaaatatatgtatggccccactgatcactggtagaaaatcagctttgaaaatctcagggtaacagtgactattgtaatctgcatttctgagacttgaaatatttggatggttatgagctacattggaatttacacgtatcagaaatctatgagagtaaactttgaaatgatctttatatctgtaagaaacatttataacacttgtgtcaagacgtatctacaaaaatatttattagaarcacatctaaaaattctaagtacctaagattattaaacagtgcacaaaatagggacagtgtaatacctttatattctattgcatgagtctcatttaatgctaayagcctgcattcaattcagtagttcaattagtctgacatttaaaatgatcatatgtagaggtaataagtgaaatgaaaccgttataaactcaaaatcaagaattttaattccaggccttcctgatgataatgaattaagtaaattattatatttattggatttatctgtatcacaccatttagcaaaagaaagtatctgagaccatttacaaaaaagaaaataaataaaatacaaataaataaaaaccaaatattaattttctcatacatttgtacctcagcattcttttaatatagaaaaataaaaaatggtcaacagaattttagtgtttgacaggctttataaggagaagatattaaaaagaaactgtaattctccaagttctggaaacctaatgcattttgatttgagtctctatgttttgttggtattgtgcttagttgtagcctagaaaaattactgaagtacttccaaacttccaaatattcatttccaaaagtacgraattgactttctcacctttttttttttaatcttcttagaacatgaagcaatgaaacaatttgcttattaatttatttattgtgaaattatgctatgaacagtattttgatcaatataataagagtgggatgaggttggctggactaaataacatttgagacctgaggaaacatcagagcattccggtataattcctttatgttatgctaccaaatgaaaacactgaacccagaaaggctgtgggtttttctggagctcatagcagatcaatggcagagtgacaactaaacttcagaccttttgggtactatgtattctttacctggccatgtgacttctcacagcatcactgaagtctcagcccctaggtcctgtctccctctccctctggtatttctaggtctcatagttttagtaattgtgggagggacgtattcagtaagtgtaccatagtctgaggctgttgtggggcaaaagggcctcagcattcttgcttctcattggctcacagatacagagtatatacctgtatccacgacaggtaaatgcctgagaatgctcagtctccagcccatcaaaccttcatttggtttggaacccgggtggaggtactttgggtctcctctcttaagcctagactaaatattggccttctggggaggaggaaactttgaaataaaacaatgttttaatgcacatttgtcattggagagttactggtgatcagaaactgtagtacattttaagaagtaagagtcaactccatggcaggaaacatattcttgcctaaaatatttttatcttaacatcacagtatttgacactattcactttttctttttttattaatttgagacaggatctggctgtcatccagactggaatgcagtggcatgatcacagctcactgcagccttgacctctcgggctcaagctgcattctgacctcagcctcctgagtagctgggactatgggcacatgccaatgtgcaaggctaatttttaaaaaaattttcgtagcgttggggtctgcccaggctgatctccaacttctaggctcaagtgatccatttgcctaaggctcccaaggtgctgggattacagacatgagccaccatacccagcccactgttttcatttataagaagtactaatgctagtagtaatatatggatatcagaaggcatcttggagaagaaaaacaattagtgagttagtttacttctgcaggaaatgcttttttcattgttgagggtcccaaatctctttgaaagttgtgggacctttccctaactacagccagtttcagagcatttccagactttcttcttgtctttatatatccagtcatggcatgagcattaaagtacacagcccttgtgcygaaagagagaactcaattatggttatagagagaaatctctcagctcctaaatgaactgtctctaaacatgggagagacttcccattcgaaggtacttggctacamgtgtggagtatctgtggaatgtattgtgtcagtgagcctaacattctttgctgtgatgaccctcatacctttctgttcattggaggtcacagctgcaggaggctttgactctccccaccatcaaaatgccacagtagcttttctgagcagtaggaatacgctaggttgtggagataatatggaaggagaaaggctgtaggaaggagagggaattattgaggggaccaaagattgatcacagggtaggtcagataccagcctggaaggaatgtgtgtggaacccttgaggcttggccaagtcattagaactggagcctctggttcagccaatttcatgttgtctgtctcctgtgaaggcttttgcatagtgggctgtattttctctattcctgcaaccctcccaactacttagaatcaaggctgtcttctctgggtgaattctgcattttaaactctcagtctttaatgaaagagacaacctgtattgataagacaattaaagatttaggattatgcaatttttttttccttattgcaaagctttaactgtttattaaaaaagtaataatccatacataagcccatcatgcagtgagatccattgtactgtttggtgaaagttcttttagaccttttaaagccagtaaatatgtgtgtgtatatatatatatatatatacacacatacatatatatacacttatatatacatacatatatatacacacacacgcacacatatatatgtattttaaacttaaaaagcctgtgctttattttattctaccatgttttcattctgtaacgtttacttacatatgactttatttttgtttctatttttccataagttattggggtacaggtagtatttagttgcacgaatatgtcctttagtggtgatttgtgagattttggtgcatccatcacctgagcagtgtccactgcaccatatttgtagtcctttatccctcacctcctcccactctttcctccaagtccccaaagtccattatatcattcttatgcctttgtgtcctcatagcttagctcccacatatcagtgagaacatacagtgtttgcttttccattcctgaattacatcacttagaataataagtctccagtcacatccaggtcactacaaatgctgttaattcattcatttttatggccgcatagtattccattatatatatggtgatatatatattatatgtatcacagttatatatatatatcaccatatatatataacagtttctttatccacttgttgattgaagggcatttgggttggttccacgatttttcagttgtgaattgtgctgctattaacatgcatgtacaagtatctttttcgaataatgacttcctttcctctgggtagatacccagtagtggtattgctggatcaaatggtagttctacttttacagccactatggaaaacagtgtggagattccttaaaggattatgcaatttgaaacagcttcatttgtttacacgttttcataaggatacctgtgagacttattcccaagtctgcaatgggtaattttattgcatatctgaagttagacatttatatcatatattttatcttagtttttcaggctttttatttttaaatacagctttcttgttttgtaaactatggtttattatatagttattcattcattttcctattgtgctttctacagcgatttgtagaaatagttgtggagatggattttgttcccgtcctaacatgtgtacttgttccagtgggcaaatatcatcaacctgtggatcaaaatcaagtatgtttcttacttgtggccttttcactgcatttttcttaagctttggagcaaatgctaaaggtccttctatgtgccagggagttttaactgttattactttagttaatccttacatcaacattatgagatactgttaataccccattttacagaatagcaaagtaaagcacacataatttaattaactggcccaaggaaacacagacttgaatccaggtattctgatgcctaagtgtatagtctcaaacactagactgtatttgttgcctttgcttaacatgtgttttgtgggttatctamgggggaaggagaggagaactccaaaggcagcatgtgtttattgagtactgaccacatactttacacataatggacctattttgcttcacatgtattaactgccaacaacttcataagataattataactgtggactatgattgtgtgattcatgacccaattagaaattgttgggtccttaaggtcgaagattaatctttgaggctagtatttaagataacattataacaaggcagaagcaagattgtttatttaattgctcaataattaaataaatgctttcttaagtcttgcctcaaactagtgtgaagtcattatatttttaatacatctttcttcaaattttccctaaaagaaggtaatatagtatgtctgactcaggaataagattcaggattcatacatcaaatgccattgtcttctgatgaaactcctgatgaaaactctcttaatttcacttcctttgaatctgccatttcctcagcttttaaaacctaccattcaaattcatcaagatttcttgaccactttaaccagaacatttcatccccaacttaacctgaacctctctttcttgcctgattacctacaagatactgttgccagtatgttcattatcctgttsctagttttctcatatttgcctttggcaaaaaacacaatgctggaggaattttaagattcagtttcttaattcctctacctgggagctgggacattctctggtccactctttgcttgtggtatataatttagcagggaatctgtgcattcatttggccttgggcaatccttccatttcatcaggaacttttctaaccctcccaatcatcatcctgtttgaccttgmtaaagcttttggcactattaatcattatcttcttgaaatgttgtttttcrttttctttgaaacacccttgacttttaaaatgccagtggccttcagtgctccttttcttgatcattcctttttagtctcttttctatgtcttcatcagtctttcattcaaggtttggtattcctgagttctgccctccctgggtgaactcatgttttcaatgactaccaatctgttgataactcataatatttatctacactggagatcccaccactgacctccacactcatatattccctttcccatttgacatctccactcaagaaatagcaagcaattgaaacttagtagcatgtctaaaaggaaactgaatttattgctgaccacaggctacttgaaccacacagttcctcctgccttggcaaatggctctgccatccacccagtgcttaagtaactgctgcttctctttctctatgtcggctctttaaacaagtcctgtaggctttactggaaaataattatctcagatttatcttttcctttccatctccactgctaccatgtggtgtaagctatcctcatccttctcccagactctcgccctcttcaaatccgttctctgcagagcagctagagtaatctttttaaaatatagattacatcacttcactttctcatttaaatcctttcaatgactccctgttgcatttgggatataatgaaaacccttcggtggccgaggaggccctgtgttagctggctggtctctgcctgggtttccaaggtctcttccctgtctgcctctttttaaccacaggaatctctccattcttcagaagaaaccttttaccatcctaaggtcttttgatttgctggttcttctctctctgaagtttctccgtggtacttttaatatctggcttattcagtgtaaatgtcacctcagagtggtcttgtctagtgccagtatctaagctccttcttggctccagactagtctccttcacaacagtttacttcaaacagtttatcacagtctataattacttagtggtatttgtttacctgtgttttccgtagctccccatcggaattcaagctctgtgaggatagctttcaagtccattatgacagtactgcactgagctggaatggtgggcactcacctcctgcattctgaatggagacaaaagtgcctcctgctttccagaaactatgctgctagtcaccttctgtttatttttttttaacattggaagtgttttcaatgcatcctgaaaaacatgttatcacagatatgcccatgtgtgcacttataaagaaatgatgaataaaaatatgtttgggtcatagtatttccttctgtaagatataattgtcattgaattggataattgagtttatagttttataacctctcacatatactataattttgatgactgatgtttttatactttttgttattgctctttgcagttcagcagtgcagtgtgagatgcatgaatggtgggacctgtgcagatgaccactgccagtgccagaaaggatatattggaacttattgtggacaacgtaagggacattgatttattagaaatcatttgatttggtggatatttcatattaagttataatttaaggtctcataaatcctgtgatcttttgaaaaaacaattttatgtagtaaaccataccttaaaactgaatttctaatttttatcctgtaagaatttttctaattcttttagaattttgtgctttagagcagtgatgttcttgaatagtaactagtcaacaactggtaactagtgctttagcaaatgtgacacatctcacagattttctgtgatttatttttcctttatctggctccataaaacatgtatactttcctgaaaaaaaaagagcaagttttctgtgatctttctttcttttttacttcttccttccctctccagttccctctttgtatctatgattttttagaacttctcaaaattaaccccaggagagccaatctgataaattatcctttgctyaaatatatttaatactaagatacagggtgatgaaatgatttttaaaaagcagatgttattgtgaaacagggagctgtaacccagcaaaactggtaccttcactggagaataccctgtatgaatcaagaaataaccttttagcaagagtgtaaggattgtagtttctggattgtgacacatcactgtggaacatttgggtaatcttctctaaattgtgggacatttttgggaattcacatattttgaagtaatgtcaccttatatgacattaaagaagtgttatttctgaaattgaatcacaaatataagtccctttttactttatttgcatttttacctgatgtagactatacgttcctgctaatcttcaaggcttccttaaggattgctggtctcttttttaaacatagaaaaaccaagtcttaggtgtaaaagaatatctagcttgttttcagttaacattattttatttttcttgcaatgaaaaatttttttaaattgtkgtaaaatatacataacaaaatttaccattttagccacttttaagtgtatagttcagtggcattaagtccattcacactgttgtgtaaccatcaccaccatccatctccagaattcttttcatcttggaaaactgaaactctgtacccattgaacagtaacccccatttccctctcccctgccccgggcaaccatcatttacttctgtctctatgaatttgactactttaggtatttcatggaagtgtaagcatgaagtatttgtccttgggtgactggtttgttatacttagcatagtgccctcaaggttcatccgtgttttagcatgtgtcagaattttcttcattttaaaggcaaaataatatttcattatatgaatataccacattttgtttatccagtcatctgttgatggacatttgagttgctttcaccttttggctcttgtgcataatgctgaaatagctgtttgggcccttgctttaagttcttttgggtgtatacccagaagtggaattgttggattacatgataattgtattattaattttttgaaatgctgccatactgttttccacagaagctgcactgtcttccattcctactagcagtgcacaagggctccactctatatacttgccaaaccttgttattttctgtttttttttcttaaataataataatcatgctaatgaatgtgaagttgtacttattgtggttgttacagtaatttccaagtttgtcttgtagttaaggtgattatggtaattataactttctatttataagtgctataaagttttctttaraataattttatgtaaaataggagtatccatttaaagaaagatattctgttaaggtcaggggtaggtcaactttttttgtaaaggccagagagtatatattttagaccttgctttctccattgcaaatactcaactctgccattgtagtgcagaagtgaccatagataatatgtraatgaaagagctaggatgtgtttcagcaaaattgtatacttyatagacactggaatttgaatttcacacaattttcacttgtgactgagtattatttctttgatttttcaactacttaaaagtgtcaaaattcctcttagctcatgggaagtacaaaaataagcagtggcctagatctggcctttgggccatagtttgcagattccttgtgtgggtgtgggtggttctcaggtatgacaagaggagactgactgaagtttgagaaatggagggtgaaggtttttaagagaatacaatacgttgaggccagttttctagcaagaataggaggggccaatgtgttaaattctctaggctagggttggccaggggaggctaagaaagaactggataacagtggaacagataaatgcagcagagtttctcattccatggatgatactttttctatattttctttgtacattcaggtatttcccacattttctacaacagacttctgtttataaccagaaaagaaagacagaagtctatcacraacacagtattcataaaaagatagattgatatatatttttaggccttagaaaagtgttaggatatctgattgccaactctgttttgcaaagtttcataaccaatgaagagacacatctatccttgttgaaacacatccttttgctctgtagagggaaaaatgaaaattagaatcactgaagaaagcrccttgccttgcctcaactgatctttcagagtatttgctcaaatctgtcctgaaattagctgtcttcagtctgaattaagctgctcttcatgccttgggcataygtgtgtatgtatgtatgagggttgtacagaacacrctctagtgggtgtgtctcttgttcttcacacaggaatgagaaggcaggggatggaaaggactttccgcttctaaaatgctttgatgttcttccgcccctgtgtcaaaccatattgatgttaccacattttccagtcagaggaaaggcaacatcactgggtcagaaaatcagcatatactgaacatttgttctctaggtttctcatgggatgacatcttycttaatgtttacctcagggataatagaacatataggggaagcaaaatgtgtagcaaacacaatttatttgtcagcaagtaagaaggtaaaggtatgataactaatagattaccagctcaaggaatggtgtaaggaagatgttttccaagtcgtcttatatagaaagagtgttacaatactgagagcaaagaagcagatggaacatttttcaatttatgaatccagaaaagtcttggaaataggatgcttgctaaaatgaacattataaaacatttagactgcttagctgctttcctggaaacagacagcacttcttagaaagcattcttctatttcatccatttcattcagcaatgttgattgagtaactactgtgaataggtaagataataccctggccacatattctggtagaaatgacagttaatactaaaaaggtaaatacctaatacacatttaggtagcgagaagttttaggagaagaataaagcagggtaagagggagagagtctgggtcaggattagcagttgtctgctattttacatcaggggtctctgagaaggtgacattgaaacacagatccgagtctgtgcctttaaatctatggaaaaattgttctggacaagtgaaaagcaaatttaaaggacctgtagtgggaacagactccatgtattttggaaaccgtaagatccatgtccctggagtaaagtggggaaagggaaaatggtaagaattgagtttggagagggaggtatagggccttgtagtaggccaaggaacaaaatttggactacagcctaaatattatgagaagtcactggagcattttgagcagtggtgttctgtgacctggttaacattaaaaaaaaatcacctgtctgctgtgttgagcctggattataacagagaaaaggaaagggccatgtaggaggctaccacagtggtgctagtgaamaatgctgcagctgtagtcgctgaagatgtggtaagtggttgtattgagcttgtattttggaggtatactctgatggaccaggygtggtggataaaaaaaaatagaaaaagtaaaaatcaaaagtgacaaggagagggttttggtggagctgctggattaatagcgatgtcatttccagatacgggaaatactgtatagggagtgggttgggtaaggagtggtggggctgaggataagagttttgttttggattcattagattgagaaatctgtcagacttataagtgcaaagatctatgaactctgatcttaggagagaggttggacatagagatataaatttgggaccgtatagaccgaattattatatagataatattttaatcataggcttagataaagatcattaggaagttgttgtagctaaagaagagagttgaaaacagagacccaattcagcccaacattgtgagatggggaagaggaaaagaagcctgcaaagaagagtgagaaagaatggacatgaggatggaatgaaaactgagagagtgtggtatcctagaaaacgaaggaagaaggcagcaccaatagcaaagatttataccttcctatgtcagacagtaggcttttgtttctttcctcttgttaacattttaacttggtttagaatgctatttttctaacacatttgtgtagaaattacaatcatgatttcagacttgacttatgcccaagtgtctgcgcctctgctgagttgtaagggagtctgtctaataaaaatatatacctgacctgttacctggcacaaagtaagtgctcagtaaatatctgttgaataaaaatgtcctctaaatatctgagcttttacagtatgcaaccaacccacacaggaaaaacagtgtgttttctccttctaggattttggtgggcagctaagaaaccagctcatacttctatctgtagtacatcttttgctctcttgcctttcatgccactgtcatgctaggtgtaagcacagttttcttcctgagtggtcagcgttccttctgtggtggaaatttaggcattttccaatttttttctgactccagttgaaatataagttgctgtttccattcttttttgttacaaaaaaatatgttcttttgtaaaatacctttcatcataattcatttgagaaaaggaaattcaccatttttggtttttgcttctacttttatctgtatttcctgcttctcttcttttgctattgctctttaatgtaaacttcggctgctgcagacgtcttgtcttacagaacattttcgtacaaatgttctatagttaaaagaggaaggaaattaagaatgtagaataccttcagcgtgcagccactgtgcactttgtcttatatgctattttatttagtcctcaaacgtctgtaggggaggaactgttaagtctctttttgcaggccaggaagctaagaatcagagaggtggtgtggtgagtgggtgctggggacagcagagctcattatttgttcactgcaccattctgccttgcgaagtacttgaaaaaatgccgtgaaattttgatgtgcgggagtttgttgagttcttgcagtctgtcagataccacagtaggtgacagggattcaaaggcaaacagatctggcccttgtcctgggggaacccactctcacatgagagacagaaatacaagcaaatggttgtatcagtggcccttgatctttttgttcataggatccctttacattttaaaaaattattgaggtcctcaaatgtcttttgtttatatgagttccttcaatatttatagtattagaaattaaaattgagaaatttaaaatatttattgattcattaaaaataacaagaaacccatattataagctaagataaatattttttataaacaataactataatttgcaaacctccaaaaatctttagtgagaagggaggcattgatagtctaacctagacagattagattaggtttaatttgtaatgggccagctctttctaggagaaactcaaggttcatccagccttgttctacctgcgaattggaaactttgttttggaaaaccgtgggagaagcccttcctccatttaccggaggttgtgttctgagtgttacagtcagtgtggacagcttttccccaaaggctggcattgtgataagagaacacatgggaaagtgactgtaatttaaatttcctacagctcaatagcatttaaagaaaattccacacattttaattgatcacattactttggacttagtattttgcagtgcatctttttaacaattgattttttaaatctttcttttttaaaaatttaattgtattttaatttctgggatacatgcacaggacatgcaggtttgttacataggtaaatgtgtgccatggtggtttgttgcacctatcaacctatcacctaggtattaagccccgcatgcattagctatttatcctgaagctctccctccccctgccctccccagacaggccccagtgtgtgttgttcctctcccagtgtccatgtgttctcatcgttcagttcccacttataagtgagaacatgtggtgtttcgctttctgttcctktgttagtttgctgaggataatggcttccaccttcatccatgtcgctgcaaaggacattatgttgttcctttttatggctggatagtattccatggtgtgtatgtgccacattttctttatccagtctatcattgatgggcatttgggttgattccatgtctttgctattgtgaatagtgctgcaatgaacatacgcatacatgtaggaatcttcaaatcctggcagttgtttctatggaattactgcacagaatgctctcataggttttgttttttcccaccttcccatccatctttatttttttcatgttccccgtggccttttttccttttcctttctgcttcgtatttacttatatttcaagtctgcccatatttcaaggcaatgatgagtgggaagtgctatgtaggactcagctggagataggtaaagaagcagaagggtatggttcctagggakctgtacttgtgcagagacacacagaatcatgcctttaattgaagtgtaacttatcaacaaatgcctctgaggccattggcacagtgacgctttaaggtcaagatcatcttttatttccaagtgcgttttagtcttctgaccatcatcagcagaacagaaatcactctgtgcattctggagatgataggcaatctatccggttcaacatacctgataaggaaatagcagcattactgtgctactagatatcagtatacttattgagtttcccattttatgatatgtacctcacttgaagtgtttggccccccacttccctttaatttgagtaattagtgtccttcaactccatttgtggacacaggtcatagaatataatcctctaattcatttgtgaggacaaatgtttcaacagggtgggtagatagggagacacactttcagtatcagtattttctcctggagaagatatgattcttgaattcagctgtcttcattatggatcatgggaatacttaggttccaaggattctagagagtgtgatcttttaggctgaaccgagttgcagtgcacggcagttcagtggggagaggggagtggttcaagtttactggctccctcttgggctcatggaaccctaactcctggtctcccaggtcacaaggctaaaggagcaaaagagagtgtgtgctgtgtgtttgtcagcatgactttggaaacatttggattgtgagttaattttatatgaaaaaacatattatgcttacacagctttttttccctttttttcttctatgacctgcaaatagtctctacacattggttacttcttttggcattttatagctaacgttgatggtattttccccccttttctttgttttgcccttccagctttaccttttccccccttggcttccttttcttctctgatttttcctttttccctttattgccatatcattttcattttttcttattacatttttctcctcctactccttccctgtgctaccgggatcggcctcttttttccttcatttcccatattttattcattccttaccagtgaaaatatagattatagggttagtagtacagaaattgagggttgagtagttacattctaaatgagcatgagagccagcgaatatgattctgattaaaaaaaaracaaaaaaccttttaccaaacacttgcttaacagtgtgatttacatgaagtatgtaagtttttgtctgaatatacttaaatatatttacttaaatttaagatgtgaactttaacctgtgtaatttatacaagttgcagtttaattaacataatgtactataatttaacataagatcctttattggcagcatcactgcactactatattgtgcttggagactggctatataatgagcttcttgctatttttgtatgcagctgtctgtgaaaatggatgtcagaatggtggacgttgcatcggacccaaccgctgtgcttgtgtttatgggttcactggtccacagtgtgaaagaggtaagaagagaaatgagactttactttctgaagaagtctattttattgtaaaaatgtataattttttgctattcaatgaagattctgctaatgaaattatatttttactcttctttgwttatgtctctaagttgaatggtaagattttgagacatagctaatagtggcagaagtgtctcaactttttccaccagtgaactcagtttgrgcggccaactctggggctatggctctagggtaattttgagtgagtgactgatggcaaattctaataatgtgcttaattcaaattaggaggcattgttgaaagtactgcttctgttaaaaatgaaatagtgtcaagttatctttggctgcaaaccccacaaaatctgacataaattgtcctaagcaataaggaaatgtataacatttcacaacaaaaagtctcgagctagtgggcctcaggtaggatgtgatcaaggcttttaccctgttactctgtttctcttgaccctgccctcctttatgtttcactttttgtcctagcctgaacttctttgtgtttgtaaaatggctgtcagcagtcactaaggaaacatgtttcttcttcacctcttgagacagaaaacatctcctccaactgtgggccagcaatagcctccagagacactttgtacgctgcctggtttaagcttgagtttttaaaatagttcatggcaaagtggggggtggtggtggtaatatgtttgatgtagacttaccaggacctgtcgttgcagcaggagatgatttaagcttccccagagtcacatggaagggatgattgggtatctgaagccagtagagcttccttttggtaagagaaaaggggtggagggatggatgctgggtaggcatcccgcattgtccaacttattcatataaatggttagtcaagccaatgtgaaaccaatttactatgatttgaatagcagttaaactcatgacctatatagactgctgaaaaatctctggcattgatccctcattatggatcatgggaatatttatgtttcaaggattctagagagtgtgatcttttaggttgagctgagttgcggtgcagggcagtgcagtggggagaggggagtggctcaagtttgctggctccctctaggccagcggaagcctgactcctggtctcccaggtcacaagtacaaaggagcaaaagagtgtgtgtgctgtgtgtaagctatctaaaataatgtcctgatggtaaacagtttcatgacatatcaagaagttaaacttygtaaaatgtgataaataactagcatcgagccataacagtaaaaacaaacttgagctaaaattaatattacataatcattcattgttatttacatcctcagtgcatttttccagagcttgttgtggcatcaagttatacagcactttctttattgtgaaactagaatatatgaaattatgtcaatgaaatattacagataagtaggggtcaaggtttatatacatatagaggctttgagtcgtgaaaaagccttatattttaaaaattatactcattaccctgacaaaacttcatcttgcttttcaagtttaacctggagaagaaactgagaaattacaattatatggtgaagtttgaaaagtaaaatctttttcacatacatttggatgtatatatacatcaagatatttttattatttttaatgtaattgagatttcttgggactgaagtacattccacaaatgataagagtttaatgttacacttaggatgaatttaaatgtctttaccagatgcttttatttgggaaagaaaaattaattatgaaacgttagcataaaaagataaattattcagaatggaataacacacatttcttagataacgctaagtttatttgaacatcatagaatgtagaataaatttaaaatttcaaacataatcataattggtagagatgatcttcatttttctgggagtcaggtaaactttgtagctctttcatcctgaagcagatttcaaagtcaatttgtaattggcaaagaaattgggtgagtagtttcaactcagaggcttccaggaattacgtcattattcttcaacagttattcattcattagatttgttagtccttactaaatttctgagaattcaataaagatttacatatattttacatgtacagtagcatgttttccaaaaaaaattgtaagattaattagttaatggattacccttgggatattttttaaatgttggtttgtttcttaaaagtcttattacttactactcttcagatggaagttctaaagcttcatttctttcaaagaaggagttaacaagttgcactcttacatagcaaccatgaactttaatattttaaagagatgttttaaattgaatttatacatgtataataacccattctactaaaaatgaagttcataatttttttcaagaaacattgtgtctgtgtggatgcaaaaagagtaactcacttatgttgaggttggtgagtaagctcatgtgccctgttagcgtttaawgtttatatatatatttttaaattactgaatttcaaaatatatgttctttgttatcttaataaaaagacctttgtaaaatcagagatatttgttcctcctaatgtagaacacataatttctctttaaattggccttttgggatcagtcatatgataaaacatggctgcttttctagctgtctgggcttttggcagactggtttccagacccagagactgagtagtaaccaatggctggcatgattatggtatttaacttgagtctgagtgtgggtaacctgaacttctttggagttctcttttcacacttgctgatatgtacaatgaccttttatacttagcatcaaaaaaaaaaaaaaagagttcttgtggttacaggctaattgtaaaatgcagacagctcatttgtggccatagcatatgaaggtactcaattgtttatgtatctctttccaaacaaatgtaatttgagaaaaaataaatatctcacttaatatacacttgagattaaacagaaatggagtcagcattcaatggtaagacctgatgggttttttccctaacacttaaaatgtaccttatgttttatcagtagaaacttggagagggtgggtagacaagacatagatttacctgaggaatttctgaaccaaataggtgattacttgatcrcaaatgtggcctgtctagagtccttctttcaacttttttgacttaaaggattgttgaaatcttttgtaatggaattttctttgaagtttatataaggctcatctgttagaaatatatcccagacccttttaagtaatacataaattactactacaaatggtttttatcatgtaaacatgacttccttaaaatagtatgcaaattgtgtaaaatttcaaataatctggtgcttagtaacatttcctttaaaatgtacatttttttagtacaacttaaaggaaaaagggactagaaaattatttgttaattattgacattttaaagaaaaatgacttttgttaatctgcatcttcagtggaattaaaggtgagatcaagttgcaaatgttagagttcaaaaaatctaaactttcaagcctttatgtaaaatgaaaatagattgatttccatttaggttaccttttatgaaatcatccagttatagacctaatgcrtgaacccaggtctaaaagcgtgctgagaaggagtcactccatctctgcctggatatctctagtcaggggctctcactcactcaccccatcatgaaacagtcctgctcatcatcagagtcctgcttgctggaactctgcattattctgctgctgtccaaccaggacatttagcagatgtgtaagatcccatatagtctaattcagtgggaagatgatgatgacaacttctctgaaaggagtcaaccacaacctgccactcaggtgtgcatgctggcaacttggcktctaattataaactctttaattattgtatacatttttatttattcacccatacttcaggaagtaaagtaactgtagtagccattaaatctacttagaccttacccaaatcctccaagagcaggtgtaaagatggacaaatttggattttcctgaattctgagaataatgtagacccagactcaagttcgtttagaaataactgatatacttgttaatccaatggacttggaatgtattataaagtattcagggtgactgtacagcttatgaacattcaagtaacatagcaaattagtagtatgaccaggaatatagggaatatggtgacgagaacaagctggtattacatagaattctatacccagtgaatttgatactttcaagaaatgtataaacaatgtttttaagaaaataagttccattgtaattttctgttttaaaatgtcatgcatgtttattataaagtaatttagaaataaaacaagatgaaagacgagaatctaattactcataattcctacacttaggattaattaccgttaatgtcttggagactataacgtacactgcacgttgtaataacacaaaaggacaagcaagatrtaagagtaagttatacgtgctttggggtgtttacttcaatttacctttttaactacaaattagaatatacaagagtgtaactaaactaatttttaaatttaaatatttaatatttattcatccaatatttgttgagtactcttacagtattaggctaagtacttggaacttgagttataagaaaaaccaatatatacttcttattaatgagaagcaaattattgaaaaactagtcatctactttacacatgaggatgcaataagacacagtaaataccgtaataggagtaggaacaaaaagtaagagagctcagaaatgctcactaatgcaggacaaattacaaaagtctttctttcagtcaaatgaatgtagaatgaaaaaacatagcttactacagtgggaaaaacagtatcagactaattcctgagatatatcatgattaaatcttatactaatgttatttaaactccataattcatgaccaattaccctaattactaagctgatatttattttgcagaaataaaatgtctccctttttcttgcactctgaagatttagtagaatgaaaattacaataagcagagagagaatgttaccaactgcagatgtcagactcacatgtaccctcaggcacacacacacacacacacayatttctgcacttgtgaggccgttaagaagagcattttataaccttgcactctctaagctaaacttagccttaaatgggcatcagagaaataccaaaagatctgtgggaacttaactttttggcactagctcagttgatacccttatcttgaatgccattaagaacagagggaaagaaaattagagaaggaaaagcagacagtgggaagtggaagaaaaagaggggaaggagaaaatgaagactgataagaaaagagagatgtaatgctagaagagaagtggagacgcttggtgttgtataaaggaaggacttaaatcagggagaaaaatcaattcactgattgatctacctgggagaggccaggctttcacttcttaatccttaatttaagagtctgctgtttagatctgtaaaataagactgaacttttggcagcccagtagatcctgatattttattctcttttgaacaaaagcagtgtgtatctcatttattccagctctttctttgattttggtttatctacctacaggcagggaaacctgcaatataaaatacaaaggctagaatattttatatttttaactccataaatattttttcttgttttcctgtttcaacatcggattaaaagacattagaggttaattggtgtagaaactgggaaaaactaccagacacacacaaattaaatgtaatcagttgttattatatagaatttactcaaaagtaattaaatcagatgtgcatgtatatgggggaagttatgtaacaaataccgtatatttcaaaagttacaaattcttaaataacacctgtctccaggggtttcagataaacagttgtggacccataatcacctcacagattcgttggaaagattaaaagcaataatgtgttaagcacctgacacacaataggcagtgtgcctgacacatggtaagcttccactaagtgttacttgttgtatttttagaacacaggctgtagtcaaaatcaaagcttaatattaaaacctatgtaactttagaaatgtgattgccctatctgatgcctgtttgtacatatataatatatatctattatgttaactttgaatcatttttgtgaagattgaatgatataatgcctggcatccaataaatgaaataaataatggtcattaatgctaatatcgttttaagaggactccccagttatcaaaatgatagatgtggtggctggttattagaaatagaatattcgaaaatggactctcaaatgggagaaaaaagaatgttgcgacctatttaagtcatacaaataaggcttgatgatgtttttattgacagtggaaagacttagaataaagtggatactttaagagaagttcacaatcctgagatgagatttaaacaagaaatgaagtgccgtggcctgtgtctagcacagagttaactgctcaataaatgatcagctataatttaaaaattaagccaagatctgatatgcttttttttttttttttttttttgagacgggttcctgctctgttgcccagggtggagtgcagtggcgtgatcttggctcactgcaatctccgcctccccggttcaagctattctcctgcctcagcctcctgagtagctgggattacaggcatgcgccmccacccctgctaatatttttgtacttttaatagagatggggttttgccacgttggccaggctggtctcaaactcctgacctcaggtgatccacccgcctcggcctccgaaagtgctgggattacaggcttaagccactgcgcctggcctgatatgctgtcttagataaaattgtcctaatgggtgagagagagactgtttcaggatctctgggacatcagttgtgaacagcgtaagtttcactattttaccttttgtgggatttttggtaacggtacagattgactggaaaatattgtatatcattattatgaccttgtttttatgcagttgaattagaccctacttatcttgttttgacatgtttttattgtaaatgtcagtgttcctattagtactcattacttaactggtcttttgaaaatgtcttagtttgcccttttcctatacacaagttattattctaaacagtttatagtataactcatatataggtagagtttacttaagccaagtacttgtaatctatagatttgcatattgctaaatctgaatgaagaagtaggtcagagagtttttcaaacagtacagagaggagtccatctgtgatactttctttgaccaccctaccttcctacccccatcttatttattgggcaaaactaaggcagtctgtcctgtccttttacctgccatatatccattcctctagaatagctcttttcattgtgttgtgactgtgtatttgcttggctgtaggcctcttaagagcagagatacttttctaaaattgcctttgtgtttcttatactccacacagtgcagcataatggaagacgcatcatacatgtgactgcataaacatgggggattccaagtagaagaaataggatgaaaataagtatagagataataaaggtccttgaatgttcacagagattaatcatttcgtgtggttgtaatacacagttagtgaaaggaaagagtagatgatgaggctggaaaaatagacacagaccttaatttacaaagtctgaaatgctggagtcaagaggctgccctctataccctcaagtaggcactgagtagaggagctatgaatgacttgtatgcttgaaagcagttctccacaaacgtcattctggagtggcaaacaaaatagaatgaagggtggaatctcttagaactcactgcatgtctgctagattaaagttgtataatatttcactaggattatgatttatgtgtacaaaacttagatttttaatataaattggaaattatataatttggagggaagataacatttactgaacttttactatgataaatactttagaggaattaatatttttaacaacccaaaatattttttaacataacaccatgaataaaaaaatggaggtataaagaagtgaagcaattttctcatgttaactcagctaataagaaagtaggattggaacactggtggtataacctcagaacccatatacttagcctcaactttgattctagtgaaacacgacattgcaaaaataatgtatttccactctttagaactatattgtgtcagttcaatatgagtactgataacaaggcacatgataccattgaattaaagggatggcttgtcgtttggggattattttcttatctagcctagggaatacacacacatatatatgtatttcagattatgactctgaattcataggctcagaatttctttatgtatataatctaaaatattcaaaactcatagagcttaaaacaaaattcagacttctgtgtttagccaagatagactaacaggaataaattagccttcctgcctgaaaagaataaaacacagaacagaatatatgaaaatgtggttttcatgatattggacactaagcaacaaaaaacagtgacccgtgagagaagggaaacaacagtgtgaaccttttgacttccgcagcttgctgcctgaaagggtttttccaggttgtgctacaacatggaagtttgccccacctgtggcycacaggcttcatgcagcccaggagagctttgaatgcagcccaacacaaattcgtaaactttcttaaaccattatcagggttttttttcttttttctttttttggtcatcagctatcgtcagtgtattttatgtgtggcccaagacaattcttcttccagtgtggcccagggaaatcaaaagattgaacactcctgtgctacggggtgagaaaatccaggcacggcctagcagactccctaagttctggggagatcaagatggctagagttctcagggcagaatcctggtgaggaaacagatatatagagagaacttgtgacatctacagaggctgtctctcaagttttcagcagaatactgacaatcacattcatgtgaggaatctttctgagactggagaaggaactgcttgaaaggagtgaaaggaacaatactcagagttgcacataagcctggaaatactgccttcctctctaaccagattagagggtcacataattggtggggtattggttagagtactcagaatagtgttgcctcaatagtggagaacaattaactatagactaaatgctgctctggctgtggagaataaattttaaaagtaacagctaaaaggatcaaacatctatctagaaagtttaagaatatttataagaatacaaaaatattaagcactaaataaagtaaaaaaaatcccaatacatggtatctaatcaaatatctgcaatcaaaaattttgtgtaaagaagcaggagagcatgatcaaaatggaaaaaaaatcaactaaaattcaccccaaactgacaaagatgttagaattaacagactggaagatgaaagtagttattataaggtattccttatgtccctaaagttggaggaaagattaaaaatgttaagtagagatgtggaatccaaattgaacttctacagatgaaaactacaatgtctgaggtgaacatttttctggatgggattaatgggagatgagacattataggcgaaaagackagtgagcctgaaaacatagcaacagaaattatttgaaataaagcacaaagaaaaaaaggcttaagaatgtaggagagcataagtgagctctgtgacaactttcagcaaactaaatacatatatttagagttagcaaaataatagatggcagaaaaaatatatttgaagaaataatggtcaaaatttttccaaatttgataaatgctataaactgacagacccaagatcaatgaatccccaagcaaaagaaacttgaagaaaattatattaagatacatcataatcaatttctcaaaaccagggatacagggaaatcttaaagtagccagagaaaagagatacattttgtatagaggaaaagaagataaaaataacaacaaattatttgtccaaaacagtacaagtaaaaaggaaagtggaacagcacatttagagcactaaagttgaaaaagacaattctctgtctaggcttttatatttaataaaatgtctttcaaaatcagaagtaaaataaataaagctttttcccaatatataaaagggaagaattcattttccagtcacctgcacagtaagaaatattaaggcagttctttaggctgaagaaaaatattgccaaatatttttgaatattctttgaaaaatattgaaaggaatgaaaagtatcaaaaaacgtaactatgtgggtaaatatataatacttttccttagtattttaaatctttttaggaaacaattgactgaacaaaaattaattacaatgtcctatgkggtgtagagtagatgtggtggtaaaataataaaacaatacacagaggctgggatgtgcctatactatatgtcaagaattatgttacttgaagatagacattgataagttaaagatgtgtggtgtaaaccttagagtaagcactaaaaatacagagtaatgattaaaaagccaacaaaaggtgataaaatggaataataaagaagaaagcaacaaaagaaggtaagaagaacaaatgattaatggatagttagaaaacaaatagaaagtggtagattgaaacctagccatgtcaatcatcacaataaatgtaaatggtctcaacactccaattgaaagataaagattgttatgtaggattttaaaaatccaattatatgctgcctataagaaatctattttaaatagaagacactaatggattaagacctaaaagatgtaaaaagaaataattggctaatagtaatcaaattaaagctggagtagctaagttaatatcagacaaagaagatttcagagcaagtaatagtatcaggcataaagaaggccatttcataataataaagcggtcagttaatcaagaagatgtgatggttctaagtgttctctcacttaatagcatagcttcaaaatacatgaaataaaaacagaactgcaaggaggtgtagacaaatccataattaatggagatttcagtaccccctctcaataattgagagtagrtaagaagtcaatacgggcatagaaaactttagcactgctgtcaatctacttgacctatttaatatttatagaacactttgccacacagcagcagataatatacattcctttttattgcacatggaacatgtagcaagaaagatcatattaaatggatattaagtagataatgaacaactcaaaagcaaaaataaggtaaataatttcttgaaagacatatatcgccaaagctcaattaagaatacaggtggccttttgaatccatgagttccatgcatgtggattcagccatggatcaaaaatatttgaaaataacaataaaaataacagtacaacaaaaaataatatgaacttaaaaagtttagcagtaagacaaccatttatatagcatttaccttgtattatgtactattggtaatctagagcttatttaaagtgtatgggtgaatgtgtgtatgttatatgcaaatactacataatttttttatcagggacttgagcctctatggatttcggtatctctgggcatcctggaaccagttccctgcagatactaagggactgctgtaaataacatgaatatccctgtatcaattaaataaattgaatgtgtaacttaaaaccttctcatgaagaaaactactggcccaaaaagctttactggtgaattctaccaaacatttaagaaagcaaaaataccaattctatgtagatttctctagaaagttgaacaggagttaaaacttcccaactgcttctgtgaggccaaattaccttgataccaaaaccagaaaaagacatatcaagaagaaaacaacatataaatatcaattatgatatacaatttctcaacaaaattttagcaaatgtatcaataatatggtaaaaggataatagatcatagccaattgagatttatcctatgatattaaaaaacatcgtgtttcactatatgaacaaattctaaaaaatcagagtgttcatctaaatatagctgacaaagcatttgacaaattctgatgccaaaatctgttcccaaaacagtcagcaagataaagaatagaagagaatttcctcaacatgaaagaagggcatttccaaaaaaactgtaatatggtracaaagcaaggatagtcactctcgtcacttctgttgaacattgcactgtttggtcctagcaatggcaataggcaatacaaagaaatgaaagtcatgtatttggaaaggaggaagtaaaattgttttactkgtagatgatgttattgtctatgtagaaaatccgatggactttacaaaaatctactggagctcataagtaagttcagcaaggctgcaggatacaaactaatggcagttgcatttccatatctaacaatgatcagttgaaaatctaagttgaaaacaataccatttacatcatcttatttattatgtaatactcatggataattctgcaaaagatgcagaagcccatgtgctgaaaactgcaaaacattgctgaacaaaattaatgaagacctaataaatgaagaaatacatatgttcattagttggaagactcaatattgtggggtatctcttctcccaaaattgttgtatgaattcagcataggactgatcaaaatcacagcaaaagtcttaccaggaatgtatgaagtccagtagagcagtatctcattgtgattttcaatgtcattcatcattagggaaatgcaaactaaaatcacaatgagatgtcattctactgtatgcattgcttgtaagaaagtacatggtacaaccatttttgaaaactgtcaagtttcttaaaaagttaagtatatgcatatcatatgattaggctatttcacgctttatttgccccagctaaatgaaagcttatattcatacaaaaacttgtactcaaaggctttgtagcagccttatttgtaatagtgccaaactgcaaacaacccaaatgcccatcagcagataaatcaagaaacaagttgtatattcatacagtgcatacaacggaatatttattgtttgttaaaaaagtaatgaattatttatatgtacattattgatgaaccttaaattatttaggctgagcaaaagaagacagttgaaaaagagtaaatacattatgattttatttttatataattctagataattaaaactactatgacgacttgcagagtagtggttgcctagggatgcaaaggtatggataggcaggatagaacaatgacacaggaacaggtggtaacttgtaagagtgaaggatatgttgttatataggttgtaatgatgatggggttatacatgtataaaaccatacatgtacactttaaatatatgatgctgattgtatgtttattatacctcgggaaagctgttaaaaaattgaacaatgaaagtaattgtttctccttttgtataagttggtttaggttttgggattaatgcttctggccacatacactttttttctacttgtggttagggaaacacagtgagggatgcttccagaatcattgtgcacatcttttttgggacttstatttggggatattgagaaagtaatgttactaattattgtctgcataatcagtatgagtttttcaaggagcagatggccattgtagtagtctgttctgccactgctaataaagacataaccaagaatgggtaatttataaaggaaagaggtttaattgacacacagttccacatggctgggaggcctcacaatcacggcagaaggcaaatgaggagcagaatcacatcttaaatggcggcaggaaagagagcttgtgtaggagaaaacccctttgtaaaaccatcagatcttgtgagacttattcactaccatgagaacagtatggggaaaactgctcccataattcagctatcttcacctagcccygctgttgactcatggggattattacaattctaagtgagatttgggtggggacacagccaaaccatatcattctgccccgggctcctcccaaatctcatgtcctcacatttcaaaacacaatcatgccttcccaacaactctccaaagtcttagctcattctagcattaacctaaaagtccaattccaaagtctaatctgagacaaggcaagtcccttctgcctaggagcctgtaaaattgaaagcaagttagttacttcctagatacaatggttgtgcaggcattgggtaaatacacctgttccaaatgggacaaattggtcaaaacaaaggggctacaagcctcatgcaagtctgaaatccagtggggcagtcaaatcttaaagctccataatgatcccttttgactccatgtctcacatccaggtcatgctgaagcaagaggtgggtccccatggtcttgggcagctccgcccctgtagctttgcaggttacagcccctctcacgctgctttcatgggctggtgttgagtgcctgtggcttttctaggcacacagtacaagttgttgttggtgaatctaccattctggggtctggaggatggtggccctcttctcacagctccactagacagtgtcccagtggggactctgtgtgggggctgcgaccccacatttcccttccacactgccctagcagaggttctccattagggctccacccstgcagcacacctctgcctggacatccaggcatttgcatacatcctctaaaatctaggtggagttcccaaacctcaattcttgacttctgtgcactcacaggcccaacaccatgtggaagccaccaaggtttagggcttacaacctctgaagcaacagcctgagctgtacattggccccttttagccacagctggagctggagcagctgagatgcagggcactatgtcccaaggctgcatagagcggggtttgagtgtggggggcctggggaccaggcccaggaaaccattttttcctcccagacctccaggcctgtgatggaaggggctgccatgaaggtctctgacatgccctggagacatttttcccattgtcttggggattaacatttggttcctcattacttgggcaaatttctacagctggcttgaatttctccccagaaaatggtgttttcttttctatcacattgtcaggctgcaatttttttcaaacttttatgacctgcttcctcttgaatgctttgccacttagaaagttcttccaccagatatcctaaatcatctctctcaagctcgaagttccacagacctctaggacaggggcaaaatgctgccagtatctgtgcatatcaagagtggcatttactccagttcccaacaagttcctcatctccatctgagaccacctcagcctggactttttgatcaaatccattcaacaagtctccaggaagttccaaactttcccacatcttcctgtcttctgagccctccaaactgttccagcctctgcctgttacccagttccatagtctcttccacattttcaggtgtctttacagcaccaccccactatctgataacaatttactgtattagtagtctgttctcatgccactaataaagacatacctgagactgggtgatttataaaggaaaraggtttagttgactcacatttccacatgtctgggaggcctcataatcatggcagaaggtgaatgaggatcaaagtcatgtcttacagacagcaggcaagagagcttgtgcaggagaactcccctttgtaaaaccatcagatctcctgagatttattcactaccatgagaacagtatggggaaactgtccctgtgattcagttatctccacctggccccacccttgttattacaattcaaggtgagatttgggtggggaatggccaaaccacatcagctgggaagtcaggaaatgtaactagaaaaatagtcagggtatgtttttataatttattgtcctatcacttcttctcaaagagttaaaagctaaatttatgttgaacaaagaaagtgtcatagcacataaagaagaggaattttctgcctgcttatttttgttccttgaaagcttttcttcttacaaaaattagtgcaaaattttttaaaaattattattttagatttactttcaacattatataaaccacttcctaatctcatttgttttgtaaaattttaaaatctgattaaaatacttaggccacaatttcttgatttaccaacattatacaatctcttttatctctccaccataaggggagtaagtatgatatcttttattgttgctttttttcacctcacctatagattgattcaatttttgtcaagtgatttttctaggctctgcttgagtgccttcttattgtgtataatgttgatttgttgctttatacttaaattccaacttggataagtttaacttgggtgtttgtacctttttcccttcatatttctgtatatatgatccaattatcttctgacattgaatgtgttgtggagaagtctgactctagcctgatttttcttctcctaagtcacttgctgttttttcctggatgctcaaagagtttttactttataattatktwttttttttgttctgtataagttttagtgaaaagcatgtgatcatttgattggaatgatagacttcttccttaattttggagaaacgttctattgtttctttgagctgtttgtacctttttccttccatatttctgtagataggatccaattgttttctggcattgtgtgtgctatgaagaagtctgactctagcctgatctttcttctcctaagtcacttgctgttttttcctggatacccaaagggtttttactttataatcatgtatatatttttttctgtactagttttagtgaaaagcatgtgatcatttgatttggaatgatagtcttcttccttaattttggagaaatgttctgttgtgtcttcgagtcatttttctccatttttaggttctctacttcaagtatattgatttctttttttagacttttgatcttttatccactctttacttcttttgatctttatcagtaattctttttagcwgtgtctgttctgttgtttttgccaattagtgtaatggttttataatcatataagatatcttactttgtttttagtttatttagaagtttctcttttatttcactgttttgtttgatcatttagactttatttagcccttttgttactgaattcatttccttatatatttattaacaaatagctttgtaatacaaagaaatcatgcataattttcttttgttttctcattattttttcctacaatgcagtattcttttcttaatctgctttgtgtattaggaaaaaattatagtatggtacatagttcccgacccatttctttctgtcttctgcttccttgaaatgggcttttgcattaatttggtatagatgaatttttcttttctccctttcagaattacctagggattgttttccttccctagctcctgtttgagagccaggtatttcaagtgcattatgttctgagcccctatgaggaaaggaagagcacagctgggatttgggcagcagtgatgaaaggatctgagctctgtactttctcaggttattcttcacatattttgtgtcaggatcactccctcttgtcatggaagtattctttttcaaagaggatatccctgaaatttgaatgattgctcccatttcagctacaggacctgatgcaccattgctatcagaaaatcttgcttggtgttagttttctgtatttgtctcatcattcctcagcattagtctgtcttccttattgtgattgtaaggggcttcaccccagcctgctgctccctgagaatcctttgttcttatgttctttgtgcttaatgctgaggataactaaccctgtgtgatgatataattctgtcttcactgtccagttttctcccatctggtagagatcacaatgactgggcctttctgtttttttatttttgtttttgtttttgttttttcttcgaatgcgatgttatgtgggtaggtagggattttagtcctataatttttaactaatttatccataagctaaagacgaactcagctcttcagaaggaatagtcagatttcggccgggcgcgatggctcacgcctgtaatcccagcactttaggaggccgaggcaggcggatcacgaggtcaggagatckagaccatcctggctaacatggtgaaactccgtctttactaaaaatacaaaaaattagccgggtgcggtggcaggcgcctgtagtcccagctactcgagagaggctgaggcgggagaatggcgtgaacccgggaggcggagcttgcagtgggccgagatcgcgccacagcagtccggcctgggtggaagagcgagaccctgtctgaaaaaaaaaaaaaaaaaaaaaaaaaaaaaagaattgtcagagtctcatcattttcattccctatatcatttgagggaagaggggttatgacactcttccgtttcattccttgtctgttgtttttcaaacatgtcaggaatttgggcatatttcttctttagctgctgacagtaaaagtgttgttagtttcatttgacctttgttgttgttgttgttgttgttgttgttgttgatattagctgtgggaaagggagactctgtgatatggttttactctactgtattttccaggaawtttttttatcacatttaaaaagtttttgacctgaaatctatctaaagtcacacagaaagccaggaggaggggcttccaatcgaagatgatatagtttgtgatactgcagctgacatttaagactaatattgttgcactttattaagtgcatattactcaatcaagaaacgttaattctgtgggtgcctcatcttctgcgaattaaagactgtgtttyccatgaccatacttaatgtcgtggtttaatgcatgcaaactttttgcatatgggcaaagccttatgtttgtgaatgtcttcatctgatttagaaatagcacacaaagtacattccaaatcttgaacaagatggttttcatcttaaaaaaaaaaagaattaagttctgaatgtcacagtagagagtttagttagaatttaacagattactgtgttcttgagcgtgtcaatttacaagtaatttcttgtttgaaaaatgaggacattgggctagatcagtgtttactcatcttgcttggtcataagaatcaccagagtatttttgtcaacartattgattcccacatctgttccttggagattcaaattcagtactctgaatacagtgatttgcaaccattgttgcttattatcatcaccagggagtttttaaaaatctcggcactcaggcttcatcccctatcaattacataagaatctctggagccataggacccatggccaaacattagcattttttaaagcccgcgaagtaattgtgctataaggtgaagtttgtgaaacattgstatagcatgaggcccttacaaagtaccccagggcatttttataattagctaggcttaagaaatcatttattaaaatatctctaatattttatccaataattcaattttcacattgaatagtgcctaaaatgaagccactctgggtataatttactactagattattttgaaagatttataatgtcttaaaattctgttaccagaatagattttgcctctctctgatgaggcaacgctggatttggaatagtcaactttatgttaaggttttctccatctctcatacttttaaatcccaatgtaagaagtacatactccctgcagggggcaaaattgagccaagaatgtttataatagcttcgaatcttggcttggttactatgtggwaaactaagaaataacccaaataaactttaaaaataatatgtagaatgacttgtaaatgaatgggaagctttatctagttttttaaaaaggaaaatcctactcgtttgaaggaaattaatgacaaatcttgctaaaactaaatctgtatcttaatcagttattacattatagatttgtagattatagtaagattgtagagatcatagtgaaatatataaaggaatgtaaccctgcacactttttaagyactacttatataatacttctctttttagaataattactgacattcataagtattcatttcttatttcacagttatgtattttctattgtttatgactctacaaagctataaataagtatagtttatttccctgcatttgagtgaagccagaggaacttgagctctctcttgtaaaaatataaataatttgtgaaggaggtggtgtctgaagagtcgtttgataaaaagacagtttgagggcttggttggtgctagggaataccaaggtccattttttcaggcacagagcacttgaggataaaaacctagagctgaactagacaagatcaaagaacagctgagcagataatggagaaggagttggaggagtgaggaaggtactttgggaaatcccagtggaaagtgctatattcattaattatcccgtgactggtgagatgttggagatttttgcttccattggctgttatgtatgaacaagaaaatatatgagattttgcataagccctagccagactcttcagtaacttccaggtccctgtggggccatgcaagaatcactttgatggtgtcaaccttcagaatggtttgggtttgaatggtcatctctttctggagtccccaaaggaagcaaatgtgctctgccctctgcattcccagtaatgtgtctgacacactggtccaactctgggctctgccatgcctctctcctgcctccctctgatgtctcacagtcctcctcaggacagaggggttgggcttccttttgcttttgcttttccttttcctagtttcaggtgggtgtcagaaagggataaattggttgaggcatgaggggttctaaattgggagttatttcactaagtatgttctggcatatataaagaatttggtacattgcatgatacaaatggctaataatttttttctgttacttaactagaattatgaaacaaactctcctaatcattcagttaaaactgtttggagattttgtgttaattattttaactatcacrttaccaggaatattgaaatatggctccacctcttccactagctcagagacatcactgtgaactagaaaaaacacccccttttaaaaacactttattgccagaaatttgtcatgataaaacatagaartctagatcgactatactttgaattacctgtgcctggagactgcagtatgcctttccttttacgtgctggttctggatggttcaggccactttcttgagtgttacgatgacaacaaagcaaatccctaaaattacttaaccactttgtacaagtttgaagtggacttgttgcccccactattttgttcctcatccatttgggattagatttgtgatgattatcaaaccagatcctagaaattcagctcatagttcaaagtggcccaagaaagtgtaatccacaaatctctgaggatctaggatttctggtgtgtactcatccatggtacatccacatgtgtcattgttaagttttcctaagtctggtgtttggtattccaggtgttgacatgtcatcaggctgcccttcattataactcaaaacaaggaacctatttctgtacctcactcccatctgttgaagacacttaggaaaggatatccttcagtcttaaatcattgttcaatttgttctttttctatttctttctttcatggaatatcttttcatttatatttttaaacatttatttcaacaatgttttatacatttcagagtatagtttcgtacttcttttgtcaaatttatttctattttattctttttagtgctattgtaatagagttgtttcagttttatttttgaaacatttatttccagtgtacagtaatgcagttgagttttgtgtattgatgttgtatcttgcaaycttgcagaacttgttaattctaatagtcttcaatggataatttaggattttacatgtattatatattaaatatattttttcataatgtatattttataatatacatgaaatgcgtgagtgttgccatctacaaatagagatggttttacttctctcattccaacatggatgctttttcttttcttttcttgtctgattctggctggaacctctggtacaaatgttgaatagaagtggcaagatcagatttccttgtcctagtctgatcttacgcggaacgtaacaagtatttcaccattaaatatgatattatctatgagttttttgtagaggccctttattatgctgaggaagttcccttctactcctagttttttagtgtttttattatgaaacttgttcttttctgtgtatattgagatgctcatatggtttttgtcctttattctgttgatatggtgtattacaatgattgatttacatatcctcaaattccttggattaatcccactgggtcgtggtatataatcttttttatatattgttggatttggtttgctagtattttgttgaagatttttgcttttatatttacatagaatattgtctgtagttttcttttcttttgatatctttgtatgattttggtatcagtgtaattgtgacctcatagagtgactggagaagtgttctttcctcttattattttggaaaagtttgtgaaaaattggtattgttatttaaatgtttggtagaatttaccagtaaagccatctgggcctgggcctttctttgtggatagtttctctatccctaagtgaatccctttacctactataaattagtaattagaaaataattactcattaattggaaaatccaattttctaattactctagagtcactgttggtaatttctrtctttctagaaacttgtccatttcatatgtctgatttgttggtaaacttgttcacttcatgttcagagtattacttcattatcctctttatttctgtaaagtcagtaataatgctccctctttcattgttgatgttagtataaataatttgagtcttctcttttttatagaggtggggtcagtctagctaaaggtttgccaactttatctgccagagaaccaccttttgattttgttgatttttctcttacttttctattttctattttattagtaccttctctgatcattattatttgcttctttctgattgcattaggtcaagttagcactttttccagagtcttaaggctttttatccttaattgttatgataaaaagtcagctgttgacagttgtctttttgtctttaatgtttttactgtgatatgtctacatttggatatctttgcatttttactacttaaactttgttwaacttcttggaggtataaattaatagtgtttcatcaagtttggaagttttctgctgtttctctgaatatcttttactgttcttttcctcctcttcctctggtatttcctttattgcgtatttttggtgtgcttaatggtgtcccacatttccctgaagctttgttcacatttcttcattcttttttatttttttcctctgcttttcaaattgtatactctctatagatctatcaccagaaattcactgatcctttcttttgcgagttccaatctactcttgattatctccagggaattttttatttcaattattgtactttctatctccagaatttctacttggttctttttatagtttgtcttctcattgatgatattctcactttgacgagacattgtcagtaaaccttgttttttcagcatggcttcctttaggttttgggacatactcataatgactgctttgaggtatttgtctgttaaggctggtcctgagttctctctaaggacatttctgttgcttgctttttttcctgtgtactatggacacactttctgtttcttcacatatcatagtttttttgttgaaaactctacattaaaataagatactgcagcaccttttgatactgcccacaccccagggtcttgatactattgtttaattattttgtttagtgccttggctggacgatcttagtgaagtctgtttcttctgcagtggaaagcctttcatgctgccccccagaggcacagtcttgaacatgtgcccagttaacctgggatgacagtggttttaacagtgctctcttttactgttcttgtccctgatctgttaagctgttggcttctgttagtatcacacccatctgttaggcctcactaatttctgactgatttcttaattgtttttttacaatgccctggggtataaattgctccatagtctgatccagttaaatccaggaccctttgcaggataaatttttggggccagcctttgagcctctgactccaaaaagacttcttagctgtctctttctctaaactaactggccatggcttagctgaatgccctcataaagctaccagcctccttttaattgcctaccatcaaaatctccatttccaaagcactttcagatttgaacttccctactttatctattttaaataaagtcagttcctttggaaagagtttcagaggtctttcttcttatgggcctgcctttctctttgggtaaaatctctgagccactcctctggactgaaggcggagacaatggtctatcttggagtgacactgctgctttataaataggatgcagggtagggctgatcacctctagtcttcttggcttgcctctcctctgaaatatctgtgtctccagcttaaactgagtcacagacccatatttgctattgcttgcgtaaacaaagctctctgtctcgcagaaaccttgcatatgacatgtcttacattgaacctgctgtcatcccctggttttctctctgtattccttatgtcagatagggtcattagcatttacccagttatccaagctaaaaacctcacagtaattcctgacacttctcactcctccaccataacagatctgtcaccaaatcttgttattcgacctctgaaatgtcacactaatgcataccctcctcttcagtatgatgctaatttagccctagttgaggtctttttttctttcttagaccatgtagcagtcatccttccagtatcacacagccttcagagtttrttttttcctacattcttctcagttaaagaatttttgaaagtgctaacataaaatattttcatggatttcctgttagtatataataaagcccacatttcttaacttgatatagaaggccctttatgaaggattataccccattaatatttctgaaccctagattgtaagtgaggataatatgcattatgggagttgtgaggttttgatggcatgatatatgtcaagtgcttacccagtgtctgaaacactgagtgctcgataactgttagctgttatcatcattattattatcttttctctctcataactgaaaatgtcttcagcctccccatccctaacacatacacaactccagccacagtaaactgattttttgttttttcccaaatacaccttcgcttttcaccccatagctttgtacttggtgccatcgctgcctggatttcccactggagtgcatcatggttgtaactgaggattgagagtgagtccccctctcagaatccctcattacacttactgtgtacatctagcattcagtatttctgtatttgtcactgttcttgccttaacagactgtgagttcattaaggccagtggtcatgttttatttgcctttgtatccctagatctctactaattaagatggataaagcctcgtagcacttgcccaggaaatttttgtttaatgtacatttatttttattgctagtctttgtattctttttcattatatggttttgcactgagcattgattttttttttacgctttacactttaattttaattcaaaataaagttttatctaatctgccagtttcccccatatgccaataggtatttctttcttcccttttttttttttttttttttttttttgagatggagtttcgctcttgttgctcaggctggagtgcagtggcacgatcttgactcaccacagcctctgcctcccaggttcaagtgaatctcctgcctcagcctcccgagtagctgggattacaggtgcctgccaccacacccagctaatttttgtatttttagtagagacagggtctagccatgttggcaaggctggtcttgaactcctgaccttgggtgatccacccgcctcagcctcccaaagtgctgggattacaggcatgagctaccgcgcccagccagtatttctatattttaacaaaagtttgaccctgtttattaaatgttgtaaaaggtctctgatgtcatggaaatagttccatgatagttatgtagctgcctctttgtgcagaataggtgtgctctaattcagaggtctccttaatcatatttattacctacatggctcatttccttctgacttttagaaatagtaggctattggacagtgaaaaagaaaatgattcttgggactgggtgtttaccctcttttaatgaggattatcttgggttatagtgagtaataaaactatattcaaggaagagcaagaagagttctgagagaagaaaatagattgaacatatattaatactattttcactgaataattgcagaataatctgcaaattatgaagacacacaagcaccctcagaaaggcactggaatgcctttctaactttgacaaagtgagagggagggaaaacttaaccctcatttaggtatgaatctcaatatctttaactgattttacaaaaggagaaactatattcaaattatagcataataattaaagagaatttatagatcatagatcaaaatcacaaaatggtcaagctgtttattagaaggagtttgaaaaagagagaatagctcaaaaaagtacctcttttaaaggtctttcattaattgccccaaacgaatataaatatttgaataattgtggttctggttgaagaaaaatgcccatgatccaaagattggccattcaattttaatatggtgatatatttcctttattcatcaaggtagactttttgttgacttgtttttgttgttgcatttttcctctttatgcttaacatgagaaaattaccctcttcagattttggagcagctatggaagaaataaagttaattctattaaagagtaaggagaagcttttctatcaactaagtggcagcattgtgtcaaagccgtaagcttacagtgggttgtggtagtgtgaatgacaagctagccctggcagtcttctgttgctccacttcctgtgtagacaaaacgtgattactycctaagctcagttaccatctgaccctgcaaggaaggatgccagcactgtttttgtcagtaacctgcctttgttctccatcagttacagaatcacaaggtctatcactgcctggagaaaagtttacaatgttctaaaaagctcttattgcgttacagaaaagttgtctgatgaagaaaatcctaattatacttttgaaagtaaatggcttgctgtccttttcaaaagtttttcaagcttttaaaagcmagttttaaagctagtacagactgtgtgtgttctttcttaattgtaacttgaaaaagaagtcctttccttttttagaaaattaattttctcgtctccttacctgaaaatctgtaacattaggttttctctgttcacatcatattatgtttctctgaacttaagatgctatcctcacaagttaaacatttggaaaaattacatatgatgaaggcttttctgagyattgggtcaaataacaattatggaaatagatcagagcaaactcaagagcactctgtacttggaaggaaaaaatgcattccaaaaattctgcattactggttaagaaattgatgagtaacctctttgtttctcatacaagccactgatcagtaaagtagaaattttactatttattgttcatgtatttgttactgctaatattaggaacaaaaaagagatgaatttattttttagatttcagcatttatcattaagaatttattgaacatgtgccatgtgccaaacactttgctagatgctcagtgttttccttgttctaaaattaaattttaaaaaatcgtattaactggaggtaaatggatagaattcgaaataaaatatgtgtcccttggggacataaacctgtgtaatcayttatgcattactatatatacttgatattacaatgtgagcattagagttgatgttttcacttcccagtacataaaactttttcgattatagaggtgtaaactcttgttttacagttttcatttaagagaataagctgtggaattttgaggaacaggttggctatttttatgattcaattatcttkgttcgctttgcacttgctgtggcttccatgatttatgccmacagtcttggttttgtcttcagcagaaacaccaggggaagttctcatgacatctctcaccatcagtatggctaacatctgttaaaacagagttgataygaaattggatagtttttctttttaatacttgatctgggtatggctctgatctcaaattgttaaaacaataaaactacattttatatgatttatgttttttctgattataagaataatacatgcttgttgtataatgtgtggaaagtgctgatcattagtgggaaattgttgaattcatatctaagtaatatgatagctttcctttaatgagcacctactatgttaaggctctttccatgaaatgatttcactgaattagtgtcaagcagctagtaaatgattgcactgagatttaaacccaggtctgcctcattcctacatatgtggtctttgtactgtagtctatagtacatccgtagatgtatgctcctacatctgtagtcttcatctgtagtctatacaatattggcttcctggttataaattataacaagtgaataatcacaaacacacatcctttttctttatgttrctgtgttgctttggatatagcatctaacctctgaggtcttctatttccttaggggtcaattgagtataataattacacctacttcactgtacagagttaatgaatcatttttcacagagtggttagaacagggcctgatgcatgtatcttttaattgtttcctaatgtttttattattacaaataatcataattcctttcatttaaaaaatcattttatcatttctcattcatgaattcgtgacatacttacaaacacatttaccagaaagcctgaatacattaaaaattcttaagtagactagaaggaaaaatgtttaagtgaaaagatatgagaaaaacagcctaaaagcatgtaaaagagaaaaacaaattcaaataagaagaaacagctaaataatttctataaagacaaaaattccaaataaaatttgatcaaaagtattttgtgggctgtcagatacttcttaatggttaggaatccaaactaaatttgtaacaagtttaattgccattattgacttcgatctagcatgactgcatagaaatattcatttctaacaaacttgtcttaatttgcttcttagaactggccagttagaatggcaatcattaaaaagtcaggaaacaacaggtgctggagaggatgtggagaataggaacacttttacactgttggtgggactgtaaactagttcaaccattgtggaagtcagtgcggcgattcctcagggatctagaactagaaataccatttgacccagccatcccattactgggtatatacccaaaggactataaatcatgctgctataaagacacacgtgcacgtttgtttattgtggcactattcacaatagcaaagacttggaaccaacccaaatgtccaacaatgatagattggattaagaaaatgtggcacatatacaccatggaataccatgcagccataaaaaatgatgagttcatgtcctttgtagggacatggatgaaattggaaatcatcattctcagtaaactatcgcaaggacaaaaaatcaaacaccacatgttctcactcatagatgggaattaacaatgagaacacactgacacaggaaggggaacatcacactctggggactgttgtggggtggggggaagggggagggatagcattaggagatatacctaatgctaaatgacgagttaatgggcacagcacaccagcatggcacatgtatgcatatgtaactaagctgcacattgtgcacatgtaccctaaaacttaaagtacaataataataaaaaaattaaaaaaaagaaataaaatcaaagaagcacagaaaaaaaagaactggcattttgccttatctaaaaggtagaacttgaaattttattaagctgagacctccagtcatgctaaactctaccataagatacacgatagattgaaacttacggacaattcatggttgatatatagtcactggcaaaagggtggcagctgacaaaaactgmtagcacagcaagccttagtcccttacaccctggcagttggaccagaagatttagtgtttcagtgaatgccagcttaaaattcatttttgtaatagattcttgagtctgggttcattgaagcgtgaactcccaaggttttatcctggcaacaaaagatacgtggaaaatgaaatagtcataaatatgactgaaacatttattaaattgccagtaggaaagtaaggaccctagcttagtatatgtgttctttatgacttcaataaaatatcatttttataactcctatgactttttatgtgttggctaaatttaagtctacattctgtttacatgaactgtgtatctgagtttatctgaaattggtttttgtgataaatcaagaaatctcctttaatgatctctaaatttagggacataaggggttatgatgtaakgtgaaatatatagtttatatgtcatatggatgctcaaatttggaaattttacatttgttataagaagttattgtgctggataattttttcttatcattgggttttctttgcataggcatgtttgtgtattaaaatttataaagtacttaatgtattattttaaattaaataaagtgaaacattcattgattcttcaaatttactaagaagctctcatctgctagtcactgtgctaggtaatagagaaaccaccataaccacatttaaaatcctttctatatgtacttacggtctttttgggaaaatttaaaacaaatatattttaaaaatgtgtattgtgataagtgcccaaagaaaacagagaggtttttgagatactgatttaaaggtatttccagtgattgtgtaagaaatttcactctaaagagagaccctttaatctgagaccttgtattagtcagtatggcctaggttatgctatcataacaaccaaccgtaaaaatctctgtggcttgttttacttaataaacaaaggttaatttcagttcatcttacataactaagtgtccagtgtaagttggcaggggaactttggtcatcatagttactaagggacttggaatgaaggaggctctatctcaacacatgcctccatggctaccaaagcaaagagccrgatggtgacttgcacattggtccttaaacactttggcctggaagtgacacttctgtgttttcatatcattggccataaaaagtcacatgttgtggccatacctaattttaaagggggcagatacgtacatttttctatgtgcctgaaaagagaggaaaattggatattgggaacagcactaatgacttgtacaggcctgaggaatgagaagaaactagccattctaagagttgcatgagttcatgtcctttgtagggacatggatgaagttggaaaccatcattctgagcaaactatcacaaggacagaaaaccaaacactgcagttctctctcataggtgggaattaaacaatgagaacacttggacacaggaaggggaacatcacacacctgtcatgaggtggggggatgggggagggatggcattagtagaaatacctaatgtaaacggcgagttaatgggtgcagcaaaccaacatggcacatgtatacatatgtaacaaacctgcacactgtgcacatgtaccctagaactgaaagtataatttaaaaaaaaagagttgcaggaatagagttcttgtaagaagtctactcggtaaggggccctgcataggaaaaggttctgaggtaggaaagaagtgagtgtgttttgaagacatacaagaacaacagtggaactagagtgttgtgaacaataattttgtatacagctaaatattgattaggtgagacattattttgaatatttttctgtcttccatttaaatattaatatggtaatggtgactaatatgctggaaatattttgattagttgtcaatggggttatctttatagattgtggaagtttgtcatattgtgttccatttatgatatgggggtacagtggcatgggatgtcattatatacttattctttaaagggctctcatttaatgttaaggcgtctgcatttataagaagaactgtgttttgtttcttctaagatttgacgggtttatgatagtactaagaagaaaaagaggtctaaggagtaaaaattgcagggtaaaaaactatagggcagataacaacattctgaacatacttttatatatgggcattaatgagatatgtctgatttttttgcagttaaactctgagaaatgcctccaaataaatcctgtacttaaatgataagtttgatttagtcctggaaaataggacagaattccctgtgatcactcagttgtttagaagcactgtgttcttaattaagaaagggatcttttaaagtgtaatattttggatagctttaaaagtctggaatataataaaggccacttcaagaagtcctttatgtgcctaccactcaaattgaataaaaactttgaaaactattgcttcagatcacttcttgcccttcctcccttcctcttttaaaaagagtaaagctttagagataaaacagaaatccctatattcttttcaattcctccttttccagagtgtaaccgccctcatgaactcataatgtatttagtacatgcttatacatttactgtatccggtatttccataaatattatatatcattgttttatatttttaaggaacataaatgctatcagtctccatgtattatgcaacttgctgttttcattcaacattgagtttgagatcttcccttgttcaaacatattaggactaatttattcatttttaactactgtcaaaattctattgcataattgattctattgcataaatgtacagcaatttgcatattcattctttcactaatagacatttagattatttttcatttttcacaataaaaaaatactactatgaatatctttttaaatgtttccttctgcaggccaggcatggtggctcatgcctgtaatctcagcactttagtaggccaaaataggaggattgcttgagcccaggagttggagaccaacctgggcaacatggcaagaccctgtctctacaaaaaataaaaaattagctgtgcatggtgtcttgcacctgtagtcccagctacttgggaggctgaggtaggaggatcacttgagcccaggaagttgaggctgcagtgatccctgttcgttgcattgcactcaggcctaggcaacagagccaaaccctgtctcaaaaaaaaaaaagtttccttgtgcatttatgcaagagtttcttttaactaaacatctagaattgaatgtgccaggttatatgcgtatgtatcttcaacttactaggtattgtctgattgctctcccagtcacatgcccgtgggtgtgatcgtattgtcactgaaactcagtgttgttgggttgagtagttgggctacggagtgcacaagagcctggactctgagtctcagccctgttgccaccgaatagtgcattgaccttgggctttaccatacctttcatacctctctctgtgtctcactttcctccactgtgaacagagggtaaaaatagtcatgtcttataaggttttcttgagaactacatgacataaaatatataaagagcctagactagtgcttgccacattttttggcctgtcaggtaggtatccaatgaaacctcattgttgttttaattttgtttctctgaagatgagtttgcacatcttttcacatacttaccaaccatttgtattctcttctgtgtctgtaaatatatttttctgtttttctaaaggtgtttgtctttcttgttgatttgcatgcttccttgtgtatgattggcattaattatttatggcaaatatatatatttctttctatgattcagctatctgctcttagactgttgctggcctttgcagttttagttaaggtgattttcttatacaaaacattttagctttaactaattccctttttactaatctcttctattatgacttttgctcagaagcaaatatttaatttctaagtacgtgaaaataatatccttcatctaatgcataagtaataacttagaaggrcttggttatcaatattactgagagagatatgaatgagaataaatgtactcaagtatggataatttgtgaaaaatagctataattctrtgaaaatctgttagaaaatggaagggaattctgcattaaataattggtttttctctcatttctgtctcttgcccattccatatgtaattcgctttctggaagtatattaggcagcccaatccatcatagacttccatcacatatgtggtggaaaatgttacaacacagcactgaagtcagacaccagagtgggattgatatgcggttaagtagtctctactggcaaccagatttgtctactctataaagaggattatgcttttgaagagaattgctatatactttaacattttttccagctattatcgcttaaaatgttttaagaaccattgatttatatgaaatatgaaaattccttgacatgccaccccccaccccygattgccaaccagacaactcattttcaatacttgaaatacttttatgggttcaaagtcattacattttacgtgtcctgaatatttcattaaggctttaacatagaattagtgaaaattcagaacttgaaaatgggcagactttaagctttcctgagtctgctgccccaaatctaacagtttgctttgggactgtcagcctcttgcaagatttaaaaaaaaaaaactcagccaacctcaggtagttttccaaaaggctgtctgtgattttcagctggtatggtttctctccgtaacttgttggatgtcacttctcataaagtgctttttattcatatcaaccctaaatcagtgtggcccatctaattccttgttcatatattttattgagctgttatttatttttataatttcaacttttattttagattcagggggtacatgtgcaggtttgttaccagggtatattgcaagatgctgaggtttgggatatgattgatcctgtcatccaggtactgagcgtggtacccaatmgttagtttttcaacccttcttcccttcctccctcatctattagtccctggtgtctattgttcccatctttatatccatgtgtagccaatgtttagctcccacttgtaaatgagaacatgtggtatttggctttctgtttcttcattaattcacttaggataatggcctccagcttcctttttatggctgtgtagtatttcatgatgtatatgtaccatattttctttatccaattcagcattgatggccacctaggttgattccatgtctgttattgtgagtagcactgtcatgaccttgttcgtatattttaaaaaccttgtggctggtctcacatcttggtaagttagtatgaatgagaccagaacaatttttcacattataatgatgataaaaaaatctttactagaataagtagttatacctttgtaagggttaagcctcatttaaacatattaacttaatatttgcaggtgacatggaaaagattaaaaaatgggactctagtggagaatattaatatagcaattctaaattgatattaatatatcaattttaaaactctaatctaaatgcagacacacatgcaaaaaatgatagctccccataaactccacctcctacccacaagtgaacaaactgaaagaattaaattcgtattgcgaataatgtgtcacctgtatcagttaagggtcttggttgcaaaaaagacaaaacccaaatctgcctcattgaactaaaaataataaaagaatgcattgggtagatcattgaatcttcaggcagtctggagaaacaagcttagagaataggtgagagtgaggggaagttgccagcagtaaacaacagctagctagtccctgcttggccctttactgccttcatcgtcctcttgctgggcgggggaaatttccaaatgtgtgtctttgcatcagtttctcccaccaagactcagacaaagtaaacatcctcccaataggaagaaggcttgaatgcagaacagaaccggtaatatccacattttctctccatagctcatcatatattttgactatggtttttatgagctctatatatccatttttgttgagagttcagctttagaaaaggaagcaatattgaaaacaatgttagaacaatcctatggatctcagctatttagacttcccagaaattgaagtagagcctttctagtaagtaacagtttagtttgcccccaaaatgtataattacatatgkaacccacagtataagatttgctattttctgtctctatatgaaggcgtgcattctgtaattacctaagaatgggaagaatctgcttaccgagcagaaacacgrtaggtacaactattctatatcaaaaatgataaatgtgaaatgtgtgagatttatagaaactcaagtaaagtgttttttttccactaaaaattttctagtatttttttgtaaataattagggacagaagatataaatagataatacaaataataagaatcatatttctctaatttttggaggctgtttaaacagagacacatactcaacctagcaaacatctggttggaaatttaaaattttagttgagcatcagaatgtttttctgtatctggaatgttagcggagtttggaaacatgtggacactcaactggggtttctttggatgtttatcattaggcattcagagcctctcccataagttcacatactgacaaacttgtactctgtgccataatcccttcctacctgggcctcctctcagtggcatgacgcatagtctcctggcaaaaagttagaggctgcaggtagataatctgaaaaacagataatatcacggctgatcagaaattgatgacagcacttttgttgccaggtcggaacagtactgctggaataaaggctaacagtcatgaatcaaaaggggtcttttacagaccacagaactggataaatgctatgcttttgtatttgtccattgtacttcctggtgaggtaaaaagggatttttttttttccctgagtaaaaattatgtgggtctggtatttctctttgctgaataatttatttctggctgcacagtattaattttcaggctgtgaaacctggctttgattccaaacagatctttgggaaatagggagcttgaataatagagaaaataactccgtgaggaagtatattacttcttggaaggatcctgctatccatttaagtggtttcttgcagctttcatatccaagaaagttttatccatatgtaattaggaggatcaaagccacagtgaggtttatgtagacttttctgcctctctcatctttagtcttgcgatatcactgtcatgacataatgaaataacgcataggaaagtgttttggaaaaccagagagttcttcaaaatgttagtttattaatggccacaataatcacagctaaccggtgctgaggatttatttctttatttatttrtttgagaaggagtctcgctctgtcgcccaggctggcgacaatcttggctcactgcaatggcgcaatcttggctcactgcaacctctgcctcccgggttcaagccattctcccacctcagcctcccgagtagctggaattacacacacccgccctcatgcccagctaatttttgtatttttgtaaaagccagtcattgtgctcattacttgagagttttatctcatgatattcacacatcyacatcatacactataagtaaagctcccctgttatatccatactacaaatgaggaaactgacttagcctattcaagaccataggcgtgtagctggtgaagctagaattctggytgtgaatccagagctgtctgactgcagccctgtgcttttagtcagtatgctaagtgcatatgtctataatggcagagacacaaaatatgacaccttacctgttgagattcctagatagaagataaactgcttgaaagttttaataccatgtggagtaaacatagatgcttcacctcattattatatatataaaatatataatatatatattctctctgtgaatactatgtataatatatatgtatatagagaggatatatatattatatatatggagagaatatatatattatatatagagaatatatatattatatatacatagaatakgtgtgtgtgtgtgwrtrtatatayatatatatatatatatatatatatatatgagagagagagagagagagagagagagagagagagagagagagagacaaggagacaaggtcttgttctgttgcccaggctagaatgcagtggcatgaacatagctcactgcagccttgaacttctcgcctcaagcaatcctctcacttcagcttcctaagtaattggcatgacaggcacattctaccatgcccagttaattttttaatattttgtacagatggagtcttgccgtgttgcccaggttgactttgaactccttgcctgaggctatcctcctgttgcagcatcccaaagcactgggatttcagacatgagccaccaggtctagaccattagtagcttttaagaagaaatttatgtgaatctttatcatgtcttttcacctggttcagccatttattagatttgtagtcttaggcaagttaccttatctcactgtgcttgagtttcctcatctctaaagtgggcataaggatagtacttatttcatagtgtcatgatgattaaaaaagtaaaaatatgtaatgtatttagagtagtratataatattactatatacgtacatatatgtgtgtatatacatatgtatatgcatacacacgtgtcactatttcctctaccytgcattgctgataaaggcctacacaggaatataagaccacgtgctttttatcaccacttataagacgtgagattttaggttctatgtgacctttggtataaagaagarcaatgcaaaaaaacaaaggaactttgggactgtaattgcgtacaaatagtttcaatactattatccatttaagcaatagtttggcaactgctaagaaagtttgagtgttacggtcatgtcacaagattctaaagttctccaaggtacttatggtagtagtgatgtcatctggaggaaagccagttacacaaaatatattgttttattaaatctatttcaggcagccatgtttgaggataatgacaagggatcccatatactgataaagttagataagtgtttgccaaagtgtgttgcatcccacacttgtcttcaggaatgctatcgaataaaactattttatgagcaaataaattttgaaggctgcctactatagcctcctcttggcagttaagaatgcacaagagtacattaagggcccctgaaagtcatgtagtttcacccaattctgtcttttttcaacttgtaatatatttgaccacagaatcctgttttggcatagttctcctagtgttctgtagaactgatagtccattgaccacattttgggaaatactgagttagaccatatttctggatctaaactcagcaggtgcattttgtcctgaaaagaccttgacatatcagattcatcagttgtaggcatttaattaccattttatgttgtgtgctacaggagaattagtcaagagccctaagcagttatgtcaactcgttttgacttggggccagttgctgaaactttctggattttatttcctcatctgttaatcacataatcagatcaaacagtttctaagatggttcatgtttaaaggttaccaaaagaaaaaaataacaatacatttctgaaaatgcttttatacatgcctcatctagggtgagctggatgacttttaaaaagctgacagcaaagcccaatgcctacccagcactgcagattatattggaacttttttgaacaattagagtttaccttccataggtagtgtgtgtctggcttcttagacacttggccagtattgtctgaagtccaacagcaccactgcaacctccctcagcrttgcaaaaatacttactcatagttcatccactcagagaagagaagctaaatgccgataagatttgaagtggcttgggctgtaatgccgtggagtacctactgaaagagaatttccatagctgagaagtacttgcacacaagaagtgaaaagtctgaatcgaggaaaacattcagcaatctcagatgtcgtggttctatttagaggttatatcaaagtggccagtgaagcattgaataaaccaggctaatttatcaactgaataaaacggttacagtcttaaaacaagggaagggataaattagtacagaaaaaggcatttcattcagtgcaagcactattgatcaaacatggataaactccccccagccccctcgcaccatgatgatcagtgccactgagagatggcagagtgagatggttaagagcatggattttggtgtcagatacacttgtacttcagactcggggtctgttgtgcatcatcagtgtgactttgaacaattttatttaacctgtctaagcctactgtcatcatttgtggaggaaagctattcatgctgaccaaatacggttattgtacagattaagtaaaatgatggctataaagtactacgcaaacttcatggttgtgtagttgtgttttatatatatataacataataataataaaagaagtcattatagcagattcttgtctctaaaacttttatctttaagtgttttatggtgctagccaactcgtaattccaggatgcctttgaattttattgcagtttatatcagaatctacccagtttcaaacataactccttaaagaatcattacctctacaccaaatgctgtgatattccccatttctctgtggtacygggagacaactactccaatatgcattgaaagaactttctgggatgatggaaatgctctttgtgccgtccaggacagtagccactaagcacatgtggcccttgagcacttgacatgtggctagtgtgactgggaaactgaatgtttactttatggaatttaaattttaagtttaaatttagaaaaccacatgtggctagtggctactgttttggatcacacagctatacatgatttaaaaaaacccacattggtgtaagattttaaaactgctaaaattgtcaatttcatgccacagattctgcagttaaaaagctgttattgatgctttttgaaaagagaccacagggtgttcttttctggtggtaagtcatcaatcacattagttaaaagctttctatgcatagactgtggaaagtttcccactttcacactgtggaagacaaaatcttctgtagaaacctcacggagctattgaatctcattgtaataatggtgtgctgtgactaaggacttgatcccctgcgaagctgaaggttccatgaaaacagaagtagaatatacattctctgtttatatggtacaaagctgtaaacctgtctattaagacacgctttttgattatgttcttatttattttttttttgtctacttgctctgtcaaatttgacttgtatttctaaaagtttttgctctttttatttcactatattttttagttagataaatcttatatcctcttaatggattttagttttaatccttataatactctttttttgactcagtttaatacttttggaattaccttttggaattccattctgatattgattattactacttctactttcttttgtattttctttggtttttctttgccgttctgtttattttctactcattttattttgatggttttaatatagacaggatagggctgagttttgttattttagtcagatctattgatgacttcattgtttgattaaaatctaagcttattcatatttattgtgatttcagtatattttattcccatcattttaagtatataaagcattatattttgtggttttccttttgtcatttttattatcattttggtttaatcaattatacttcagttatctattttcaccacctttctttaattaagaaattctgtgtccttcattgaactaatggtcacctttttatctttcaccattattttgaaacacctgtacctctgtcacaacttttgcgtaatgtctaaattgtacaaaatgtcaccccaagacattttacttattcactcatcctggtcccaaattgagattgtaggaataatttactagcgagtcttcatatggcagatacttttgctatctctcagttcctgttgttatcatttcaggctattattaagttttatcttatcacatggctcttttgtttcaagratcctttctcagaagtgtagcctgtgaatgctatttcactgtactttaactctcaggaaacacaggagaaaacgaatgctagcctatttaatctcctttgtaggtagactgttctttctggaaatggaaggatttttctctttttcttttattttcagagttcagaaattcagagatctcatgaagctttttcgttgagtatatcttttttattatcattatttctgtctaggatgccatgagccattctaacctgaaagtgtgaagttatttttcatttaaacttaggatattttttccaattacatctttattacttctgtayttgttttttaaatcttagtttggaattcatattacttacattccagtttctaggctctatgttgtgacctgtttattctcactgacttccagacaactaatttagcttgaagcagtgaccatccctttttttgcacttctgttgagtctaaatattgaaaggattcactctcctgaactaaagagagactttagtcttttaatttttgtctgtgacatgaattttctcactaccaatactagtaagttatatgggtttccctgacaataacacattttcaggctgtataaaataaggtcatttttattttgcaaagcaggtaacacagtactaggacccttctgttgagatgagaccgggggatgtctttgctcttgcgcctctcctggtgctaatgtataaaagacaggcatggtataaggttctaattccaggagccaggaatggttcacctccttacagaccactaccaccaccaccamtgggccatcagtgccagcagggtcacttgattatcrctgttcttcatgcagcaaataactgggaaagagcttcccctgtgcatttcaaatggatttattgatagatgctacctgtgtcctcttagaatgtcctacggtctaatggttttctaacttttcagcatttccctagaattctcaagtaacgacaaccccagtaatgaatcacatggcatttgctggcttggagaatctcagcacagttgcttagatgttgtattggaagttacatgccaggacagaatcatagagagaggtttttgttttcccattacacattagtttcctcggaaaggtgttatttactaagtttgattgactcagtagcatgtatttggctgcttacatcactcaggaggcattgatttgggcagaaatttcagtaggaaaatactacatggaatccatgggctctgtcagcaaagtgtgtgtaacattttcatggcagccaccataatccagtcttgtgaccatattatttttggaccaaagatgcattagatctgttcaagcaccttgtttctattggttctatttctgactttattgataatggataaatgttttctgagtacrtgtcacttttccctgaaatatattcaggcctacttaacgatagtacagattttcctaagatactataaaatgtggtacttttaaatttgacttgcttatgatccatcttttgtgttaatcatttatatctctggcccccttattaactcatgtcaaaatattttcatctctttaactttcttcttcaaaagtgacgatatccttctgcttaactaatcttactagtttttaatcttcagcaatttttgttgtccttaaagtaagttaattggttttgctcttgggagagtgcacttttagggttataggctgtgaatttgaggaccacatctttgatggccttcacccgtatgaaacgtgacatcaaagatagcaattttgtttgcatcactggccagcacctaattatcgttacggcctcttcattcttaaaatgccctttgatgtcagcagtagccttgtgctttgaaagactgcagagaaaggtgaaagcagtcctttggccaagcccacattccactgaaatattacatgatggtattaggttgaaataaaatgcaaggcaactgtggtaattaaagtaattactcatttatttgcagaaacgaaagtctttaatgtttctctcaatgcacagagataatttctccctggtgtaacacggctagatggagactcatctttgggagaaaccagaagaaaagcaaacctgggcatggtaattgggagttaggaaattatacataggaggcaggaggaggcatctgtggggttgtgacagtactcattagcacggtgaaggcaaagttaccaaaagctgagaatgtagaaaacccatgtgttggggtgaaggaacatagtrtaggggtaaaagcacacaagcacttggagtgaaatggatctcaaaggtgaatctcactttcacttgtctttagctctgtgattcaccatgtattacttaatctgtgacttttaatttatttgtaaaaatggcaaaaatatttttagtacttaagataaaaagatatattaaaagggccactacaaagtaatatgtaccacattgttaatttttctagttttcaagaatggggacaatgagttgctgtcaaaattcaacaagaagatattgtttttacccattaaatgaataaaaaataaactctttgcctctactctgcattggagagagtgtgagggtacagacttccttgggcactactgatgacagtgtaaattggtgccacctatttagagagcagttctgcagtatttttcaagctggacacttgacccagcagttccagtgccaggaattagattacagaaaaacttgccaaagtatagtcagtaagtatgttgaagagtgcctatgtagcactgtgtgcacttgaaatcagttgaaaacaatataaatatccatcacgaggggcgtggtcaatgtcgcacgtgaatatttccatgccctccatggtgactctgcatccaaaaaatactcagtttatttttgtgttaaatattcaggcttgctttatttaaatatgatttcaaaagtctacttactcccggagctttttaaatatttatttttaagattgtcgtaaaacacacattgcataaaatttgctgtgttaatcattttttttttttttctgagacggagttttgctcttgttgcccaggctggagtgcaatggcgcgatctcagctcactgcaacctccccctcccgggttctagcgattctcctgcctcagcctcccgagtagctgggattatgggcatgtgccaccatgcctagctaatttcgtatttttagtagagatggggtttctccatgttggtcaggctggtctcaaactcccaacctcaggtgatctgcctgcctcgacctcccaaagtgctgagattacaagtgtgagccactgtgcccagcctgtcgtaatcatttttaagttcaggggcttgaagtacattcacattcttgtgcacccattgccctcatccatccacagaagtctttttatcttgtaaaacagaaatctccttacccctcaaacaaacagtaagccttcattttcctcccaccccaaacccctgccaaccaccattctactttctgtctttatgaatttgactactctggataccttgtgtaagtgaaatcatgcagtatttccccttttgtgactggcttatttcactcagcacaatatgcacaaagttcatccatgttgcaacatgtgtcagaattttcttcctttctaaggctgaataatagtttttggtatgtatataccgtattttgttatctattcatctgtcagtggacgcttaagttgattccatcttttgttattgcaaatagtgctgctgtgaacatgggtagataaatatctcttcaagtgcctatagtcttaacagattttagtagtcgctttaagagattttaaataatatttgtttctattttcatacctagtttatgaaataactccatgccttttgaactgttttgtttattaaatacatcagatatctttttaaagtgctttcttaggtacttcagtcgtgcaccttaaaaagtactcaactcctaaaagctaataaattaaaaactacatgtataaatactcaaacttataattttataagacctgaagcttaaatgatccaattctatatataagcctaatgacaatcatcataactctaaataagttactcaataatttatttaaaattgtggttaaaaggcagtctctcatgcattaaaaagagttttttttgtttttgtttttgtttttaaggccagtttcatggaataggccaaatgttttcaggcattacaggtacataatatttgcacagatctcttaaaataaaaatattaatttaatggctttgattctcttaaacatttttgtacttaattctaaaatttctgagattgaaagatgcttaacctcaaggaaggcaattatatcagttatttgagtttatttgatctaaagatttagacccagcatgaagtctggagctgcagacatccaaggcaaatcttactgaaatgaaggaaatgtttttattatcccatataattttgggtactgccttctttgcttgctgtgtttatatctgtgattagagattttagattctcaattataacctcatcattgaaatacatggaacctcatttataataaggacagaattgttggtcaaaaactccattactcgaaggaattagtcacctagccaggatccttagattaagttacacatattgcagaattctttattttacatgtttatgtctgtaactcccatacaagatgatcactttattagttactgagaacataaataccttcttgcctaagttgaaagaccatgcaagttgataggaaatcctacatttttaaatgtactttccaagatcaggtaattcttttctgtaccaaagtgataatgataccttatggcgttatctgacttgcagttacagcatagaaggtctctaacattgtcattccattgcacaactccagggaatgacatttacattaaagtatgtgggaagcttctaagttatgcagggcacaatctatgcagttgtacactgtaactgcattccactgacagtcacataaatgatattatagccacatgggcagctgatgtattgttgtccctctggctgtttcccttctcaagtagggcctcatggggacatctagtccattgatctcactgctttctttcatttcttaatctagcagtccttttcttacttcccgtcttgtccagcatagattccatggtctgtaatttcaaaatatgctaacattctaccctgagcttccttgccattctgtttttttcccccacatctgacagacaaaagcaaaaccctggatgaaccctaatctctgaatgagctcagctgcctagagttgctggaaaaagtcacaataaaaaccttctttcttaaccccaaaccccctaccagactcttttgtctttaccttgaggaaacttctccaaaggttgtctggttgtactcattgtcttattttctcatctccagccagttccttaactctctccaacgtggctgcaacttccatcacttcaccagaagatctcttgctaagatcaccaatcacctgcagatgcatggaaccagcctcctgcaatttggctgctcagcagcattcagtactgttgagcctcctttctacagcatgtgcttcctatgtcctgtgggagtacaatctcctgttgctctcccatctctctggctatccatttcctgtttcctcagcagactcattcccttccagcccactatcaagtgctgaaattcctcaggactgtatcctagactcgtttctcttttaactatattctctcactccaaggaattttatccacacccattgctttgaaaactacccaactcacatgactcattagtgtgcatcttcaatccatatattctaaattctgtaacacactggacgtctcctgttgggtatctaaaggcacctcagtgtaacatgttgaaaaatgaacctaaaatcctgattgtcttctattaccagtatatcaggaaatgacaccatcagccatcctcataagtgaactaaaatcctgatcctacttttggtatctcttgcttactcatcttccacattaacacattcacccgttcattttttgaattcaggaacttttattccaagctctgttcacctgtacaatttctggttccactgtatcttgtgtcttgatcatgagatttctaaaagatttcctagcatctactcttaacactttagaatacaaatataagcttgtcattccatgccagaaagaagtctctccactgacttttttttttttttttttgagacggagtcttgctgtcttgcccaggctggagcgcagtggtgcgatcttggctcactgcaagctccgcctcctgggttcacaccattctcctgcctcagcctcccaagtagctgggacaacaggcacccaccaccacacccagctaatttttttgtatttttaatagagacagggtttcacctgttagccaggatggtcttgatctcctctccagcctcatccttcaccaatctcctctcttacatgagccacacactaccctaggtgcaccttgcttccaccccttcatagggcctttggactttatgccccgttggccttttctgtttcccccaacaaactgtaaattaactctaaaaggtcaaagacattggtgctctcttctctcactttcttctgtatgtctccttcctcctctctttcttattcacttttttcccctcactgttacatctccagagcccagaacaatatctagtatatactagtcactcagtaaactcagttgtagacttaatttccaagttatacaattaagagaacactccaggttcagaacactgtatataaataattcaaaaaggtaagtgtaagagatgattaattgtgtttttatttagaaaaaagtatcacaaatctcaacatgttatgaaaagggcattttattttttccgtatggtttggattttagcaagtgtattatattttattttaagaatgtttaattttctcaacttgtattttctataaacaataatgctcaactttggttttctagcatgatttatcatctctaattgtgtaaaaaggacttgtgaaattacagcaaaattcccaagcaaatgtgtttatttaatgtaaaatgtgaacccaggttataataaaaattgtagaaaacagcaaatattaacaaagatgtggaagaactagaaccctcatacattgctgaggagaatataaaatggtgaacctattctggaaaataatttggcagtttcgtagaaagttaaatgtatatttgtcaaataacagtttcttagaaagttaaatgtatatttgtcaaataagtagttccactcttaaataactaccaagagaaatgaaaacatatatccacacaaagactttcatgcagatgttcattgcagcattatttataatatcccaaaagtaaaaacaacccagatggccacagactggttaacagatgtagtacagccatacaatggaaatttattcagcaattagaagaaatgaagtattgatccatgctactgtatggtcttgatgaacattatgctaggtgaaagaagcaagacaaaaaaagaccacgtgttatatgatttcacttatattaattgtccagagaaatcaaatttatagtcacagaaactagattagtggytgactgaggctgggacagggaatggacacaagttctttttgggtgatgaaaatgttctaaaactggattgtggtgatggttgcataattcaataaatttactaaaaaccattgaattttacmcttaaaacaggcgaattatggtacgtaaattacaccttcctatagttatttgaaacaacaaaacaattagcagccaaagtttttgatgagcttgctaactgcactaattttttaatgtgaataaaaatggaaattgcataagcaaattaacacgccatgttgcacttagatattagaaaatcaaactagcaatatttgtgtttcacagcctaatttttaacaaaattttcttggtcatgtcataacgtgtaacataactgtttataggtcattagttccaacatactaagtgataagcaattttccccttttacacttagttaacacactgcaagtatccttgtgactatgaatggttagcatggtatacatcagtatttttcccacagtgcaacttttaggaagagaatgcatggccaatcacaattaattaaggtattttaaggactcttttgtccataattaaactgcaggtagagtctgggacaggatgttttaaccctatcaggaaatttaaattcttttacaatatctagtatttgttcttattttacatggtagtaattcttgaattagtagataagattgtaagtttaaattttaaagtatttagttaccaaccagaaagcaaattgtcatcatatacaaacataggttcagcatattttgtaaggagtaaaatgtaagcaaaacaaataagaaatggtcaactctattcctgccaagtggaaggttgccttaattagtgacttcaacaagaaaggtcatttgcagaggacaaacagctgtccttgtccagatattccccttctccacagagacggtactaagaggacataagtttaaggtgtagttagragaaggaatgaatctactgtcaagttggtttatttatgaatttggttatgagggagactgtgcagatttcattctgggaatcctaaaagtgcatagaatgtgaacatgggtattcacacattgacctaaaaacaatatgtgtttttatattttttttgcaaaaaaacagacttttccccacgtattcagaacttgatataacttataattaggaatttaatgtttatttaaaatgacaaaatatttatatctgaaggacaataggatagattttaaaagtttgcaacctgacaatttgcagtataggaagtgtgtttgtttataaggttgccatatcttcacgtatactccaaagatctttttcaaaaacgagacttgcagccagcacatctgttgttcttatgcaagggattaaaatgagctatttttgttgaagttcagctgcagagtaacaatgttaaaatggcttgccaagaaattacctattctcgattttgtttcttaatattgaacttctaaactgttctttgcttctgtcggagacagcctcattcttctttaaagcaaatcgaagttttatgtggttttaaggtttttrttgttgtactgcagcacgtatatgatatctaaggcttcctagcttagcattttgaatgttaaattatatccaagtttgattttcctagaaacagtttttcataaaaattataccaacattattgactcttcctcctttaaatgttaggtagttttgttctcataaaactatgaattaaatctgtgtagctttccccttggagtagaataatatcatttatgttagaccttatcaagaaacctgagtggtattttgtattcccaagaattaataaactgtattgacataatccctgtgtgtaaggaaaaacacacaactttttcatgtatttctgttgtattttatagcaaatgagaataattgaattggtgaatcctcagaaaactgacctttctctgatttcttgtatctctcaaawcagcaacaacaacaaagctgaaattaaaatttatttagttcatgattcagttctgtttcaccgatcatcgaaaagtttcactgaaagtaaatcacagaagaaagcaggatagagcagaaatacccagggctaactttccaactgcctgcagtctatatcagcccttctgaaactccaaggtgcatattaatgcccggtcttgttaaaaaatgcagaacctgggttagtgggtcagggtagggcttgagtctgcatttctacccggccccaaagtgatgctgttgctgctggtccatagaaaccttgagaggcggggatctaaatggactgtacttaatattcatagaagaatttgcctatgtatcacacatgccatacatttactaaggcttttgttatcaccataacagagctggacaatgtacagtcacttgctagagaggagcgatcatataatactaacttacgtgtaaggaattcatgactatgtgccttattaatgagatcttcctaactaggctacccatagaactaaactgactgacacagaaacagaaatcagattcttagaactgaatatttacaggcagtttagattgcccaaatatatgtgtgatatggaaggagcatatctttattgatttgttttaattttctaaactcttgttcacctagtcagaaaagaaaatctctgctaagtaaagaggagtcattaatgctgatgccttcagggcccaggaaggaaacatcagtgaatgtacygagctsggatttagtggtgtcctggagaaaacacacttcatcccaccagtgctgtgtgacatggcaggtctagcatgaccagaacttccaatttttcaagagaagccagaaatacaaatttcatgtggaatttcccaagtttacaatgttggctactaatttaaattctgtaaaagcattattcaggccaagaaggcacatctgtatcccagacacagccctgagccacccatttacagtgtctagtgtggaatacattgaagtctcttaaggtacttctcatgaatggaaaattatgaatttttaacatgaaactctctagccttctgtctttggacactttggtcagaagaaatagtctctgttttatgcatttggaggcactggtataagattagtatatgatcataaaacctgtctttctttcttctcccacattccagattacaggacaggcccgtgtttcactcaggtcaacaaccagatgtgccaagggcagctgacaggcattgtctgcacgaagactctgtgctgtgccaccattggacgggcgtggggccatccctgtgagatgtgtccagcccagcctcagccctgccgacggggtttcatccccaacatccgcactggagcttgccaaggtgagtcagctgtctgcctgtgcacaccatcrcagacctgccacttctctttttgttggagttggagaatctggcactggatggtagcttttaacagaatactgatttccaagagtggcctcgttaacaaccctgaccagagaaggtttatcttttagccacctaatgaataattgtttcaactgttgacattaatggagaagagaaagagatgaagaattgggggaaatgtaaaaatacagtgtaaaatatttaatacaatcaaaggatgaaccactctatttttatctagatggcatgactcctcccttaactatactcatgcaaatacccaggaaaaacctattttttctctttatctcattcaagttatgagaatctgaacccaagtaacaaggagaagaaagccacctaatattggccctctatcattattaatagtgtcttcaaagacaaaatgtgaactctgtctatgattgcagttattacagactttgtaacctgggttggtcatgatctctgggttttgacactccctaactgcattcatgacactgatttctatattagggccagatcagggccctgaggatgctaccttagtagactgcaatccaagtagccaaaaattgttacctatttactgattaattattttaattaattttcagctgccgcaattcttacctttttctagcaacttctctgatatcaaatgtcttaaatccatttttagagctcggaaatggtctctctaatgacttcttaaatggcagttgccttcatattgcatagcagtaagatcacaggaaaacagaaatgatttttgtattattcacataaataatattattcatatttgagactttgagagttagggttattttctataattaaaacatgcacaaagttagatccaaagtctttcaaattgatgttagtaagctgtgtcacaagtgaagatgttatctattgggcctgtgtaaatcttacattgtagcaagcctggtcagtgtcctaaatctcaaatgagaattacagtttggggagcacatacgtaactttagttcattgaataataaaatgtgagtgttctgcataattttgtaaatgtgtccctgacagcagcatccacagatttttgttagtgttgtagttttataaaaggtatatttttaaaatggtctatttctaaaatcattttgaatccgaactacggagataccaaggggatgactatataactaaaacatttaccgactttatatttaatcacatatgaaagctcacatatgtgagctgtggacttagaatagttctttttagtgatgaacacagctcaggccttaatgatgaagactgagtcaaatgccatttttaatctattgtttactatggatagtaaaattctgtatgttttggtatgaatattagtctgaatatatagagttcctggtagtgcaacagtttcttctataggaagatattctatattatattgtatctgtctttactgtgctccatatggtctttactacatcttagtatacagattaccatgtaatttatatagtggatatagattattattaaaaataaaatactctactatattgatttactagtttaataatgactggatttactatagtactactttttgtttattcggtaccctttattaccttctaacatactaacttcatttctttgttgtttttaattctcttttgactagaatgtaagctctatgactgcagaaatctttttcacttattcactgatgtctcagacatctagaacagtgcctaatatacagtagaagctcagcaaataccttttgaattaataaatgacattaagattgaaatacttccaaaacccactatttcagagaaagaaacagttcaggttaagaaaagcctttaacttcaaccaaaacattccaaattattgacttttctcatgttctgtatttatacttatgcttttttactttcatactttgtcagaggcctagtttttttcccaaacacaattataaaaaatgtgtcatctgatctcaaactttctgaatgtcctttagggtttagtaatgtctgaaggattacttatttgatttggtttatgcatcaaagataagtttcaggctccatttgcctaaaaatctgagggattaacacagtaacaggaacaaaatgaaatttgccacatgattaaaatgtctggaaaagcacgttgaaaagttctgctttatttcaaaatcatggcatagtcagaaagttctcaattaaatactaatccgtagttcaggctattttaagacatcttactgtgatttcatttttttcctttaaattcctagactgtttcctgaatacttatgccaaattagtttggaagagatggggcatgaaaaaataatacattaaaacatggtgcatatatgtcattaaaaaaacagtgatcttttttatacgatgattgagaagtgttacagagttaaaaataaatttcaactatgtggatgataactgtaaatagcttaacactagctctaaatcatggttcttttgaagtttggaagataatgatatcctgtagctgatgaaattagttgtgaatgaaacatgcccttgtartaaacagagtagctgtggaaaatgagggacaacaggaaattaagataatacttaaagaattaagctgtgagaaaatcagtaactttattttatttatttattttgctttatttcttattaaaaaaacgaatacatgtgcagaatatgtaggtttgttacaggagtatatgtgtaccatggtggtttgccgcacctattgacctgtcctctaagttccctcccccgaccccccaacaggccctggtgtgtgttattcccctatctgtgtccacgtgttttcaatgttcaactctcacttatgagtgagaacatgtggtgtttggttttctgttcctgtgttagtttgcagaggatgatggcttccagcttcatacatgtcccagcaaaggacatgatctcattcccttttatggttgcatagtattccatggtgtatatgtaccacattttctttatccagtcttatcattgatggccatttgggttggttccatgtctttgctattgtaaatactgctgcaataaacatatgtgtgcatgtgtcttatagtacagtgatttataattcattgggtatacacccactaatgggattgctgggtcaaatggtatttctggttctagacccttgaggaatcgccatactgtcttccacaatggttgaactaatttatatttccaccaacagtgtaaaagcattcttatttctccacagcctcgccagcatctcgtttcctgactttttaataatcaccattctgaatggtgtgagatggtatctcattgtggttttgatttgcatttatctgatgatcagtgatgatgagctttttttatatgtttgttggccacataaatgccttcttttgagaagtgtctgttcatatcctttgcccactttttgatggggttgtttgtctttttcttataaatatgtttaagttccttataaattctggatattagacctttgttagatgggtagattgcaaaaattttctcccattctgtaggtttcctgttcactctaatgatagttacttttgctgtgcagaagctctttagtttaattcaatcacatttgtcaattttggcttttgttgcaattgcttttggcatttttgtcatgaagtctccccccatgcctatgtcctgaatggtattacttaggttttcttctagggttattttggttttggattttacatttaagtctttaatccatcttgatttttgtataaggtgtaaggaaggggtccagtttcaattttctgcatatggctagccagttttcccagcaccatttactaattaggagatcctttmcccattgcttgtttttgtcaggtttgttgaagatcagatggttctagatgtgtggtgttatttctgaggtctctgttctgctccattggtctgtatgtttgttttggttccagtaccatgctgttttggttaccgtagccttgtagtatagtttgaagtcaggtagcgtgatgcatccagctttgttctttttgcttaggattgtcttggttatacagggccttctttgattccatatgaaatttaaaatgtttttttttctaattctgtgaagaatgtcaatggcagttcaatgggaatagcattgaatctataaattactttggatagtatggccattttcatgatattgattcttcctatgcatgaggactgaatgtttttccattgtttgtgtcctctcttatttccttgagcagtgttttgtagttcttctttaagaggcctttcacatccctcgtaagttgtattcctaggtattttattctctttgtagcaattgtgaatgggagttctctcacgatttgactctctgtttgtctattattgatgggagttcactcatgatttgactctctgtttgtctattattggtgcataggaatgcttatgatttttgcacaccrattttgtatcctgagactgctgaaattgcttatcagcttcaggagattttgggctgagatgatgcggttttctaaatatacaatcatgtcatctgcaaacagatacaatttgacttcatctcttcctatttaaataccctttatttctttctcttgcctgattgccctggtcagaacttccaatactatgttgaataggagtggtgagagaggggatccttgtcttgtgccggttttcaaagggaatgcttccagcttttgcccattcactatgatattgcctgtgggtttgccataaatagctcttattattttgagatatgttccatcaatacctggtttactgagaatttttaacatgaacggatgttgacttttatagaaagtattttctgcatctattgagataatcatgtggtttttgtytttggttctgtttatgtgatggattacgtttattgatttgtgtatgttgaacaattgaaccagccttgcatcctggggacgaagctgacttgatggtggtggataagttttttgatgtgcttctggattcagtttgccagtattttattgaagattttcacaatttgttgttgttgttgttttagcaagttttttgttgttgttgttgttgtgtctctgccaggttttgatatcaggatgattctggcttcataaaatgagttagggaggagtcccttcttttcaattgtttgaaatagtttccagaaggaatggaaccagctcctctttgtgtttcttgtagaattcagctgtgaatccgtctggtcctgaggtttttttggttggtaggctattaattactgcctcaatttcagagcttgttagtggtctatttaggggttcaacttgttcctggtttagtcttggtagggtgtatgtgtccaggaatttatccatttctactagatttctagtttatttatgtggggtgtttatagtattctctgatggtagtttgtatttctgtggggtcagtggtgatgtcccctttatcattttttattgtgtctatttgattcttctcttcattcttctttattagtctagctagcagtctatcagtttcattaatttttttcaaaacaccagctcttggattcatttatttttttttggagagtttttcttgtctctaactccttcaattcttctctgatcttaggtatttcttgtcttctgctagcttttggattagtttgctcttgcctctctaactcttttaattgtgatgttagggtgtcgatttgagatctttatagctttctgatgtgggcatttagtgctataaatttccttcttaacactgctttagctgtgtcccagagattctggtacgttgtctctttgatcttattagtttcaaagaacttcttgatttccgccttactttcagtatttacccaggagtcattcaggagcaggttgttcagtttccacaaaattgtctggttttgactgagtttcttaatcctgagttctaatttgattgcattgtggtctgagagactgttatgatttcagttcttttgcatttgctgaggagtgttttacttccagttatgtggtcaattttagaataagtggcactgagaagaatgtatattctgttgatttggggcagagagttctgtaggcatctagtaggtccacttgatccagagctgagttcaagtactgaatatttttgttaatttcctgtctcatttrtccgtctagtactgacagtggggtgttaaagtctcccactattattgtgtggaagtctaagtctctttataggcctctaataacttgttttatgaatctgggtgcttttatgaattcaacagaagagttagctcttcttgttgaattgttccctttaccattacgtaatgcccttgtttgtcttttttgatctttgctggtttaaaatctgttttgtcagagactaggattgcaacccctgcatttttttgctttccttttgcttggtaaatattcctccatccctttattttgagcctgtgtgtgtctttgcatgtaagacgggtttccttagtacagcacacgcacaccgatgggtcttgacagcttatccagtttgccaataagtgtcttttaattggggcatttagcccatttacatttaaggttagtattgtcacatgtgaatttgatccggttatcataatgctatttggttattttgcacactagttcatgcagtttcttcatagtgttattggtctttatattttgttttttgttttttttttttgcagtgtctggtactggtttttcctttccatatttagtgcttctttcatgagctcttgaggaacaggcctggtggtaatgaaatccctcagcatttgcttttctggaaaatattttatttcccctttgcttatgaagcttagcttggctggatgtgaaattctgtgttgagaattcttttcttgaagaatgttgaatattggaccccagtcttttctggcttgtagagtttctgctgagaggtccactgttagtctgatgtgcttccctttgaaggtgacctgacctttctatctggctgcccttaacagtttttccttcatttcaaccttgaagaatctgatgattatgtgtcttggggttgatcttctcatggagtatcttaatcgtgttctctgtatttcctgaatttgcctgttggcctrtcttgctaggttggggaagttcttctggataatatccagaaatatgttttccagcttgtttccattctccctgtctcctcctggtactccagtcaatcgtaggttaggtcattttatgaagtctcatgtttcctggaagctttgttcattccttttcattcttttttctctattcttgtctgcatatcttatttcagtaaggtggtcttaagactctgatatcctttcttccacttggtcgatttggctgttgatacttgtgtatgcttcatgaagttctcatgctgtgtttttcagctcccttaggtcgtttatgttcccctctaaactggttattctagttagcaattcctctcaccatttatcaaagttcttagcttctttgcattggcttagaacatgctcccttagctcatcatagttttttgttacccattttgtgaagcctacttctgtcaattcatccatctgatccttcgtttagctctgcacccttgatggagagatgttgcagtcatttggagaagaggcactctggccttttgtgtttttaggattttttcattgattctttctcatctttgtgtgtttgtctagtttctgtctttgcagctgctgacccttggatggggtttttatgggggcctttttattgctgttgatgctgttgttgtcactttctgcttgtttgtctttcttttagtagtcaggaccttcttctgtagggctgctgcagtttgctgggggttcacttcaggccttattcatctgattcgcccccatgactagagatgtcactcaaggagactagagagccgcagagatgggtgcctgctccttctgggacctctcacctctaggggcaccaatctaatgccagtaggatctctcctctataaggagtctgacaaccgcttttggagggtctcacccagttgggtggcactgggagcaggatccgtttaatgaagcagtttgtcctttggtggagagagtgtgttttgctggggggaaacccactcggccgggctgcccagattcctcagaactaccaggaggagaggctaagtctgctgatccygagactgcagccacccctccccctaggggctcaggcccagggagatccaaattctgtctctgagcctctggctggagttatcggagatcctgcaggaaggccccacccactgaggaaggatgggtcagggttagacctgaagaggcactctggcctcagactgccacagccagtgtgttgggctgtgaggacaagtcttgggaccaagccatccaacctccctggctccagcaggggaaaagcacagccgggagctatagaaatggatgcagcccttccccgtgcccagagagcttagtgtgttcagcagttgcttttttttttttttttttttttttttttttttttgttgctaaccctcccccaaggagctcaaaaggcttagagagcagacagcagcagctggagctggtcgccacaacccccggggggctccataggcttaagcagattcctgctcagaggctgtaataatctgtacgttccagggttgagatggtagtcccctgtggcttgggtttgagagtgggatcctccgattcgtgggttgcacagttccctggaaaaaacagtttactaggctgggtatcacactcactcatgacctcccttagctgcggggagggggtttcccatccccgtgtggctctcaagtgggccgtggcaccacrctactcatccttctctctgtggatcacgccagccttctagtcaactttgatgaaagaacctggatacattggttgccagtgaaggattcacactctttgtttttttttgatgggagcctctgagagacgctgcttctagtcggccatcttggccccacattttactttaaactgttgccatgctaacattctggacttaagtagtgtcagaaaggtgtgccctcctagcgtggtatgaaatcagtcatatcaattcttgatggctttaatattgagagccatttgagttttagccgttgtgcttaatccacatttaatctactttcttccattttattatacattaaaggaccaaagttaactcatayaggacttaaaatttaagctatcataaaacaagtgaattaaaaatgttaatagtgtcattaagcccttttccaataatatttgtgaactttaaatatataacaaattgccatgtgcatatgatgtataattttcttacaaagtttcttctttttttgtctttagtctcatgaacctactctaattaggagtgacattttgtttaagattagtacttggctttggatcttttaggttttcaaatgaacagggtgctcctaaaatttttttaaatatattaaaattaaactggcataattattaatttttgtaccatgtgatatttagggattaggcttttaaactacttcaaatgcttcaaaactgaaggtatagcagaagaaaattgtttgtgaaatttcatctcttgcttcatcattgatgataataacattgatgccaagcctctgctcctttccaggtaatgtgaaatgcacaggaattcacatatttgacacaggccctagctaggacacaggataaggtcatgaataaagaaatagcaatacagaccctaaattggtttctgcaaaacaaatgctggtgtgtgttcttttcatatggcgttagtgcaccagaaacataatttctttagtctgactgcatgtgagagagtagaggactttaatctcagctgaaatcaggcagatgttgctagctcctcaattgttgaatgagcagaagacgccctgagtagaaagttatttccaagccttccacatagccaagtaaaaagtaaacttggctattatctgatttatttgattagaataaattattaaagatagttacagccaaaacaaattcatcttggctgcctacattaaccaagttaacgagatcattataaagtctaactttaattcatgctgtattaacacaagytattcctaaacaattaaaaaactttaaagcaaactcaattatagaaactcctatttaaagataacagaatattcctcttcttctaaccccacaaaaaactaacatgaaaatgaataatagagaacaacacatcattctaaaacaaaatcctggaacaaaaccagtgatgagcacatgtagctgttgggaagtcactgggacagggagagttttctaagcatttactctgagtgtcataatcctgaaaggtrtttgaacctactaagagcagagagctaggattgtggatgttctattggagaggaggagatgttcccataagagacagatctacttcagaacctcacagtaacagagggtaatggaaggagaaacttggggggggggcaagccatttctgagtattctactcccagtcttccatcccagagacactccttgagtgaggtacaggagggtggaaggacaaagaggaagtatggaccactagcaagtaatctgtaaatataagagtcacaccaccaactgacagttgaaaattgatgctcaagggaaaaaaaagttgggggaggagtttggtgacaaactgtttcaggactatgccttgtggaagtttcaaaccaacacgtttcctttgagccttccccactctgcatttcagcaggaaatggctgcattgagagatgaataataaagagaaaggcctgcatataaaaactgaaaaaaaagaaaaccaacaacaaaaaaagaaaacataagtaaaaggcgggtatgaacatgcttcaaagaattactacccaaataaatgcaaagtttatatacttctctcttatctcaaggaaattaaaaacaacatttttaatggaaatttaaagcaatgatgctttgtggagcatcagttataggaaggccagagtggatgccaagaagccagttataaagtttctgcagtagtccaggtgctatatgatggaggctgagaccgggtagtagcagaggaaagatttgagatattcttggaaagtaagcagttgttgctgatgaagtgatgtgacataagtgagaggaacatgccaagtttctctcttaggcttctgactttaacagctggaacacgatggtgacatttgtgaagataagatcgagatagaaccatgctctgttcttgttattacaatttcagggtcctgcagatatcaagttaccaatatatacttgttttgatgatcattttaacatttgaattttgtgtatcatacatgagtagatattcattmtggatcaaaccatattaaatgattgctaggacaccccatatgtttcagattccaaatagaaatagacctattatttagttgctgcccttaaagttagacatttgttttcataggaataaaatattatgtgtgaatatctacagagtatagaaataagaatttctgtttactaatggaaataataagcactggggactccaaaagtagggaggctgagaggagggatgaggactgaaaaattacctattgagtacctactgagttttcactatttggataatgggttaactagaagcccaaaccttaccattatgcaatatattcacataacaaacccgcacctgtatccccgaaaccataaaaattgaaaagaaamagcaagttcaatgtaaaaaaattaaaattagaaatggatctaatttggtaacaagaaaagttaaaaaacacgctatgaaatatagtagtaatttctatgtcccctggttgctacacatataaattaaatgaaccatttttatatgcctataatactgcacatattttccatatttggacatgaactaaaaataatatatcatctaataataatttatgtaataaaataagtttaattttttagaacaagtttacacggagaatttggagaataaatgaggttataaactagaattattgttgctttgttacattatttttaaccttaatagacatggactgacgttattgcataaggtataaatttcaaaatatataattgtgttctataaaattgttacatgtgatttggaataattcaaaatttaaagaaatagtaagtttttgcctgaatcgaaggaatgagcaaagataacatctgtacagtctggtcattggagaattaatcaatcattagtagttgcttgtgataggactttgcagatgtagaaattcttgcatagtttgaaggcttgaggcatgcttttttatatttataaagagcacatcttggtccaaagtggttattttttggttatttctatataatttcttttaaattttcttttttattttaactgctaacttgatctaactaaaagaaattaattctacataactgcagagcctaggagacttcaaaaataagggtttcgttcttctaaaaaaatactttttaggcagttacagaataaatcctatgatgctggattgtttttctttttgaaaaatcactgaatctactataatccgtatgcagcatacaattttatgaataatgttaaggttttatagacttggtctcatttttcagcttttaccatattttttctctgatttatctgccaggaaaacaagtttctagagctcttttataccacactgtaatgagagtgggagtgtagtacatttaaaaatgaggtttaaggctgtgcgcagtggctcatgcctgtaatctcagcactttgggaggccaaggcgggtggatcacctgaggtcaggagttcgagaccagcctgaccaacatggtgaaaccctgtctctactcaaagtacaaaattagccggatgaggtgtctcatgcctgtaatcccagctactcaggaggcctgaggcaggacaatcgcttgaacccaggaggtggaggttgcagggagccgagatcgcaccattgcactccaacctgggcaacaggagcaagtataataataatttctcaaaaaataataataacaataataataatgaggtttaaaatgtgctgaattagaatgtttagtatatagacttcttgccatatattgtattcatagttgatttttgtttacatcatgtatcctttaataagacactgaaatctactttaattcagtacaaaaatactttggacttttgtaattagttcaatagatatagctaataggaggaagaaataatctgtaggcttgaattcactaatttacacactgagatatacagaacttttgagcttaccaaaaaataatagggcaaattgatatgtactgacacagagatgtgttcatgaaatattttataatgaagaaaaacaagatgcagaaaaacacatatactatggttttattctcgttaaataaacagaccatcatcytgaatatgtgtgtgaataaaagtctaaaaagacagaagcaaatttatattgatggttatttctttaattttctattttctgtatctttaacatttgttgcaatgagatatgttattttgtaattaagtatatagcattaataaatctattatgtaagcttgtaagtttgaagagagtgtaacaaatttgtgtaaattcacatttatttttatatacagtgtttattataaaaatcaactgatttttttacttgtatttccaaaagccaggttttatagtaattgattatctctatttttttgtattttatcatcattattttattgattccatttactttgggtttaatttgctcttctttttaaaatgtcttaatatggaaactgagatcattgatttaagaagcttctctttttgtactataagcattttaatgctatacatttacctctaagcaccactttagctgcatcctgcaaattttgatatggtgtatcttcattttaagttaattcaaaatatgttctatttctccatgtgattttttttctttgacctgtgcattgtttcaaagtatattgtttaaatttcagatatttgaggttgttccagattttttcctttattactttctagtttaactctgttgtgtttggagaacatattttggattattttaactttcttttacatttaatgaaccttttacatggcctcagaatatagtctttcttggtaaatattctgtgggcacttgataagaatgtgtgctctgcttaagtgaggtggagtattctataaatgtcaactaggacaagttggttgaaaatatggttcaagtctaatatatccctgatgattttcagtctacttattcttttagttaagagaagaatgtggaaatttccacatacttgcaggttatctatttctgttttcagctttatctgctgaaattacccttgctccaggagtttaatgctttataatcatgcatgcacagttagcattatcatgtcttcttgatgaattgacccctttgtcattatgcaatgtccatttttatccacacactttattacttgtcgtgatgagtactacttatagtattaacatagccattccagatttttttaattgaattcttaatatatctttttcatctctttactttttaagatgtcaaaggagttttcttgtagacagcctaaaattgagtcttgctttttaaaaatctgacaatcagactttttaatggaatttttcgtaccactgacatctcatatgattatcaattttattgtgtttaaatctgtcattttactatctcgtgtctgtctcacctattctttgttactctttttctctttgcctgactcttagattaatagtgtatattcttgtattgcagtttatctccacagttggattattagctatatctctgcttattttttagtgtttatacgtatttaacttactacattctattttcaaatagtataatattattatgccatagtttaatagtatactattatatagtatactatataattatacagtatactattatatagtatactatataattatacagtatactatatagtatactataattatacagtatactatataattatacagtatactatatagtatactatgtaattatacgtatactatatagtatactgtataattatactattatatagtataatagtataatgccacttcacttataatgtaataactttacaatggtaccatttacctcttcaatttttcatgttattgttgttatgctttttacttctatgtgttataacatccaaaatacgttattgttgttgttgcttggaaaaatcaattctgttaaggttaattaaaaaataagaaaatatattttatctctattaacatattaccattcctactgcttttcattttctgtgtgtaggttakaattttaatctcacttttattttacctgaagagcttccttttacatttaaagtccaaaaattctttattaatgcttcgtgaattttattatgtcaatactaaggatttctgttcctatgtggatgaaattaatagacaatttaaaggataggatgataatttcaatgtctaaaactgaaattttaaatttagagtaagaggacgacaattccaacaattccaatataagagtgttcaaggaatatagacaactttcacatgaggaaataaaaaagctagtaagtgtaggagctagtaattagagaaatgaaaactaaagtaataattagtattcctttacaatattagggtatttataatattacaaatattacaatatttacaatattacaatattcctttacaatacaagacaattaggatattggaggccaggcacggtggctcatggctcatgcctgtaatcccagcaatttgggaggccgaggcgggcagatcatctgaggtcaggagatcaagaccagcctgaccaacatggagaaaccccatctctactaaaaatacaaaattagccgggcgtggtggtgcatgcctgtaatcccagctactcaggaaggctgaggcaggagaatcgcttgaacctgggaggtggaggtttcagtgagtcaagatcacgccactgcacactccagcctgggcaacaagagcaaaacttggtctaaaaaaaaaaaagaaagaaaattaggatattggatagtaatatcatgtattggcaggaaagaagaaatgcaggagtcttcatgaacagtagaggtgtgtagactgctagtggtatgaagactcctgcaggcattctgaaggaccactggacactatttattcattataccctatgatctagtaattctgctctgggtctacagcaaagtgataaagaatctgagtcctcaatgtccatagtcattccacaaagaaacgtagtggagacattcactgtaccattcactgaggttttgagaagctaaagataaaccaagtgcccatgatcaggagaggaaacacattaagtgttctgcagccaactgaagcaacagattgtccacataacagtatggatgtatgggggaacccgcccccaataattcaatgttatttcacgtaggttcttttctatttccctaagtgttgsccagtctgagaaataaagggaaagagtacaaaagagagaaattttaaagctgggtatccgggggagacatcacatgtcggcaggtgccgtgatgccccacaagccgcaaaaccagcaagtttttattagtgattttcaaaggggagagagtgtacgaataggctgtgggtcacagagatcacatgcttcacaaggtaataaaatattacaagacaaatggaggcagggcaagatcgcaggaccgggccgaaattaaaattgctaatgaagtttcgggcatgcattgtcattgataacatcttatcaggagacaggatttgagagcagacaaccagtctgaccaaaatttattaggcgggaatttcctcatcctggtacatagtacgcctgggagcactaagggagaccggggcttatttcatcccttatctacaactgtaaaagagagacagtcccagagcagccatttcagagacctccccctaggaacgcattctctttctcagggctgtttcttgctgagaaaacgaattcagcgatatttctcctatttgcttttgaaagaagagaaatatggctctgttccacccagctctcaggcagccasacctaatggttatctcccttattccctgaacatcgctgttatcctgttcttttttcaaggtgcctagatttcatatcgtttaaacaatttgtgccgttaacrcaatcatcacagggtcctgaggcgacctacatcctcagcttaygaagatgacaggattaagagattaaagtaaagacagacataggaaatcacaagaatattgattggggaagtgataaatgtccatgaaatcttcacaatttatgttcagagattgcagtaaagacaggcgtaagaaatgataaaagtgttaatttggggaattaataaatgtccatgaaatcttcacaatttccatgcttctgccatggcttcagccggtccctccgttcggggtccctgacttcccacaacaggatggatcttaaaaacaaaattctaaaaggaaaattaagaaacaaactaagatatataacatgataccatttacataaattaaaacatatgcatacaaaggtgttttacttctctaaccccactctcttgagaaaaactgagtttcttagaagaatgtttatataaagtttttatagtaaaaaaaagtatagatattctgaaaaccagtgtcatctgtgttcaaaatgttttcttcttgcagatgttgatgaatgccaggctatcccagggatatgccaaggaggaaactgtatcaatacagtgggctcttttgaatgcagatgccctgctggtcacaaacagagtgaaactactcagaaatgtgaaggtgagtctctctactttgggaagcatgcctaattgtgactttaatgcaagaaaaacaggacttcatttgaaattttgaagactactggtcacaattaaaactctttatctactatgaaagcataggtttaagcctagagtmgttctgtgtttgtgtattgtagccttagtgggtttgatttgaaaagagtcaatgagcatttgcatctagtttgttatctcagttgtgttgcattgagaatgggagtaatccagccatttatgtttcttcttaataaagtaggtttccatttcacttataaagttatatcaaaaacgaaaattgagatagaaataagaagtccaagtgaaatacagtatcatgtgtaaatgatgtgttagtagttggcaccgtgtcatatattataaaataaaatactctaattggtatactgaatattgtttggccatcaaatttttttaaatggattattgattcaggaagggtttggaaattaccactacaaatatctcaataaagaatagcttgctcaaataaagatatcaaaaaacctaatacttttctgcaatattaaatatggattataatattgaaatgtaaattccattagcagttcttaatagaataaatttatttgttatatatatctgtgatcaaaacctgtatcatttttataaaattcaagaagtttctaagtgcatgtggcttcaatgatcatggatatttagaatagttttgatgattctagtagttttgatacaatgtttatcttttcagttatgttacttaaataaatttatttcatctaaggcagttttctaaaggcaatagagtataactgttctcattttttgtgacataagcattatcatcaagtcaaattaagtcttttgctctttctctttccaaaagtagtttattttttgttgattggttgtaaacagctgcattcctctttgtaaaaaagaaaatgggaagaggcaaaatctaaagtttaattatagaagataaacagcagtatgaactatattatttcataagagatagaatgtgggtacatatgccattgtttcaatgccagaaaccataatcttataaatccttgagacatgtattatcctgttttttttcatttgccctggttcatgtatacttagctccaaattaattgttatagttatatacattttatgtaattacaaattaatttcatgctccctctaggaagaaagtttaaaaaaacatagttgattattttaaggaccaaataaattctctgtgaaattgtttacaagaatgcccaagtgtcttatactacttaaatacactgtcgatagtcaaagtcagcctgtagtggaaaggtgaaagtaacacttggaagacatgaaaaaatatctgaattacctgaagaagcacccacattagaccaaaaactcagggatctgcagaaattctgggttgtgctgctttttcctggccgctttttgtattttttctcctggctttttgtaagttgattgtgttgctcaaacttttctcactccctttcactttttacttctggactaatatctaaactagatgtacttgggaacaaagtttgattatagatgagaaggcacagccactgactgattatagtagttgtgacatttctaatgcacatcgaacaatgtatttcttcttagttaaaaatggaatgaggcttttctaygttacatttcatcaaagcagcatacagagccaagccagacatgggagaaagacagtacaagtctttattcaccacttgcctatgttctttaggaaagaggracattgatagcacgtaggcaccacccaaagccctgaatccagtcgtgcctttctttgcttcctgcccaggcagccaaatccatttaaccattgcccagaaataattatgtgatttaatatttgggattggtggggaatagcagaattggaagaagtagtgattagaatttgaaatataaaggttttatgaaggccttacttgtgtataaggcatatttatttaaatatttcttaaaagcagctattttcaattttatttgggtaatattgtttctttatataaaagaacaagtgggccgggcgcggtggctcacgcctgtaatcccagcactttgggaggccgaggcgggtggatcttgaggtcaggagatcgagaccatcctggctaacaaggtgaaaccctgtctctactaaaaatacaaaaaattagccgggcgcggtggcrggcgcctgtagtcccagctactcgggaggctgaggcaggagaatggcgtgaacccaggaggcggagcttgcagtgagccgagatcgcgccactgcagtccgcagtccggcctgggcgacagagcgagactccgtctcaaaaaaaaaaaaaaaaaaaaaaaaaaaaagaacaagtgatatttgcttatataaaactatttaatgtaatcagtagtataatatatctggaaaaactataaacagttgctacacttagtgacaggttttgaattgtagtcagttttatggataatgtagtgtctgtaaaaatcttgccataaatgtaatgtttgctctaaataaaaatataactatagcaattacttttgatcaactatcaaaggtaaaatattttaatttattatgtgaattacagtgcaaatataaaacatagtactattggcagatttaagatgatgttcttcctgtttttacagtagcacatttcatgtttctgctcacacagcaattaaattctctttaaaaaccttttttggtctttaagttactaggtctgttcagaaataagaaaagtaagttcagtattttgggtctgagtaattaggaaaatggtggtatccttaacaagaaactgcaattagcttattaatcgttaaacattatgttattgatattttctgtgtgtatttttttgttaactatctcactccaacccttgaatgagatccttcaggacagagcctctgtctttagtgctgtatcccagagcctagaaaagtttagtaggctccaaacaaatatatgttgattaattgagagtaggatatataataagttagtttatttgacttgggctgaaggtccaaatggaaggtaaaatgtgggtccagagttaaaactgaatttggaaagaagctactggtcttcctcaaaggaatttttgcttcatcttagcattttttgttttgttaataatttgattttcctttggttgccattgagagatcaagagcatgtaaacattaaatgcagtttcaaatgtttagatcttctgtgtcatggttcctctttggtcacctgcaggtaatgcttctgatgtcaaggwcctttgctttttagctaaaagaaagaaatgtcttctgctcattcactgtgatgtcttcttaacagaaatcttattctgaaaggcttattctgccaaaaaatcaagtttgagcatatatagtttttattaaaaatgttttaatgctgggggcagcattcatctcctaacttaatgtttgaaacatgtctgtcactatctatcatggaggcttatgttgtttgattctcctgcgactctttttttccctcatattcagatatagacaactaggtaagctgtaaatctgaacccaaagcagaaagaaatacatatttctcccttttcctctctctctgtgtgtgtatgtatgtatgtggtgtgtttgtgtgtgtgtgtctgttttaaggagaaccagttattatccccctttgctcaattagggtcctggatctcaaaaaaacctctcatgatgctcactgcagccatgtttatttctgctgtgccagtttggttcccaaatctaatttcctaattctgtaatacagcggataaaattattctttggtggaataaaccatttcttcacatgcaaagagaaggttgtttcagttaacttcctctgttcaaacatccattaatttaaatatccatttaatttaaatgaagaagggaaggagaacacatcaatataatatgaaatggtacactaaaagacagctcagcgtttttcttttgtacaataaagtattttcgtttgaatttcagtccatgtggataaagcacaagcaggagccagatgtccttgcgtgatcctcccttccagactataccttcgttaacattccttgagctagttattctttcctggcttacatgggaggcagaaaaagaacatcattgtattggaaagtttcccttaaatggctctttatgtggcagatagttgtttgcaatttagtttgaagagttttcagctttgttccattaacacagcattttgttgtttgagacttgtgacaacaaatatatttatttaggctcatgaaactcataaaagttgttggcacagtctcctctgctgctgttccaactctgcttagataaaccatggaaaataaactttctgtactaaactgaaaagtacttgctcttattcatattacataaagtatattaattttaaaataaataaaaataaatccattaacattctcaaggggaaaactcattaaaatggagagtgaagcaaggggattgctaacattggaaacagataagactttttgggtcataaatttaaaaaccatgaaaatcatcttagcttaatttataacactgtagttaaaacatatgtattccctctctctygaataagaaagtcaggggtgctacactcaaacctgctttctgcccccatcacaaataatttattcctcacttaccatattgtatctgaactatttttcttgcctgactctgccagcaggatatatgtaccaaaataaaattaataaaagctgtattaattgaacattttctatagtccagacaatatttaaactactttacatgggttatcttattaaatcatcaccacagagctgtgaggttagttactattattaactcaccttagagatgaaaaaactgaggcacaaagaggccaagtaactttcttaggattatatggatgagaaacagaagagccagaatgccagtgtgctagattgactccaaagcttttgctcctagccagtgctattgagcaaacaaaggtgttggatgaccaggcggcacacatcccagcctgggactgcactgacggggaaactcatggagacagcagttgcagtaagagtgtgattctccctttgcccattgcattttgtggtagtaccctggccagaatctaccaaggctggaagtagatccagtttaaagatcctggcactggctgtagagattataagctgcgtgattggaaaaagcatcatctgtctgccctgaaaaaatgaaggcaaaaaaatacagagccttgaccttcatttctgtttcttcacttgagccttcctggttgggagaactttttatttgtatcgtcagggattgcagatgtatgacctggcagttcactggctccaacccaaatctactgcttcaggccccctccccagattgaccaatttaagcactgcactcataatagctggtttccatggagccttttaagaagttagcccatgagrgctaattcctgaaaaagtaaacgtttctctccgaagtattctatgccgcctctctggctgatatgttagatattcagttaagggatttttgttatattttctgttaattaaattaaaatgtattctgtgcctaaataattcattcattatgactttagaattgtaattgcaggtcttggaaaacaaaagtaggtgtaagaaagtggaactgaactaattttatctttgttcacagaaggtagttgatatggcttggccctacgtccccacccaaatctcatgtcaaattgtaatccccaatgctggaagaggggccttgtgggaggtgattagatcatgggggcagatttcttccttgctgttctcgtgatagtgagtgagttctcatgagatctggttgtttagaagtgtgtagctcttcccccttctgtctctctttctcctgctctggccaggtgcctgcttcctgttcaccttccaccatgattgtatgtttcctgaagcttccctagccatgcttcctgtactgcctgcagaaccatgagccaataaaataaaactttttttctttatatattacccagtctcaggtagctctttataacaatgtgaaaatggattaatacaggagtcagtagcaatagtctaaagaaatagttttaaaatagccaagagtgtactttactattcctatggaaagataagacagcaaaatatttgaaagactggagaacaggacattttagatactaaaacatgttataaagcgaaaatatttaaattactatggtactagcatgtaaatagcccaatgaaacacaatagaaatttcagtaaaagttgaaattgtgccatttaaatcaataagggaaaagatcaaatatgcagtgaatcatgttgagatgacagggtattatttgaaacagataaatttggatctatgtgtcacatcttataccaggataaattttaaatgaatcaaagatacaaatattatctatacaattttgtataaaatattatgtatacaaaagaaagtgatactaaaaataatcatgagcatttttatatagtcttagacctgagaaagcatatttcagtgtgttggccacttaaaagttatagagaaatagattaataaattcagttacataaaataaaataaattacatggcaataaaagaaaaaaaaattactaaccagaaaaaaagacaaatgctaaactgggaaaagcatttgtaactcataacacacagaaagacaaatttttctagtacaaagagattccacaaatcagtaagaaaatatccaataaaatgttcaaggatatgaattgactattgatggcaagggaaataccagtgactcgcaaaaacatatttatccttatttatataagcagagtgtatttagaataagagagtgtaatataaaactgtgagacactattttttacttctaaatgttgataaaataaaaattctaatggcaaactgtattggtgagggtgttaagaaatagacactctcacaaattcctgataagagtataaaagtgccctatatagagggcaatttagaaatatctatcaaaattacaaatatccatactataatatttaatcacttagttttaattctaaaaagttgttttgtctatactcataatcaagaaatgatggattttaataaggttattccttctgtcttttttttgtaatagcaaaatatcatagacctatataggatagtggactgattcaattaaaaacatgcacacagtgggaaactgttcatccttacgaaaagatagcagacactttatatattgatataaacgtatgttgaaggtatattgttacatgacaaaggcaatttgtaaacattttcataaaaaatattaaaaagtgtgtgtgtgtatgtgtgtgtgttaatgcatagaatgtccatggaaggactagaaagtctgtggcrttggatattgttgggggtgaaattgtctggcttggaaaaaggaatggagaggagatttcacattgagtgccctaacctaagtttttgactttgaaccatgtaaatgtattacttattcaaaaaatttaaaacagagagtaaggttgggggtgggaagacccatttatttggcagtttttttcttgagccctcagtgaatttccgtccagaactcttgtctccccggaacaatgtatacaaagctgttagagcctctgtcacagggcattgcaacctttatcccccagaacagtaggtacatctatggcacattatgtgctgccaagtagacaatatatgcacatctaaagcttactgaatgtgggatgaaaatatgggacctttccacttaccataaaactattacttttataaatcaataaaagtttaagagtgtcaaatgaaatgtgtttgattttaatgatcctcccattaattgctgtcagagaaaaatctcattaaaatatatttagtgacttgaagtaaaagtaaaacagacattaagggacagatcaaagatggttattacaatgaagctgattataatatgcttttggaaaaaatacaagacttaaatgggtgaatgtagccgggcacggcggcacacacatgtaatcccagcactttgggaggctaaggcaggcagatcacttgaggcccggaagtttgagaccagcctggccaacatggtgaaaccctgtctctactaaaaatacaaaaattagccagacgtggtagtatgtgcatgtggtcccagctactccggaggcttgaggcattaggatcacctaagcccaggaggcggaggttgcagttacctgggatcatgccactgcactccagcctgtagtagtcatgttatgaagaaaaragatgttgttaagtcattttgaaacaaaaagctagtaaaatcctggtcaccaactgcaaacaaactacatggcctactgaaattaagactttcaaaacagaaaaacagatcaatttctttttcttttttatgatgctttcatttatttatttcagcatttctcctgtctttctgtctgtctgtctgtctatctatctatctatctatctatctatctatctatctatacatacatactatttatctatctatttatctatctagactactctctctatatgtggtgctccccttttctctttcaggtgcataatattgtattaatcatagtatttgattcatgattcttattattattgatccatgacctacttttgctttgctattacaatgtaataagcacccatgaagccaccaaaaccaaaagctaggaccatgacaataacctgcatctacccatggtggttatgaggcccccatataaccatcactttgtataggaatctcacattttcttgttaatttttagawaattttattaaatctagagwtactccattcatcatcataatcattattgcagttgttaaacgttacaaaagagttttaatgctgtgtggaatttaactttttcacttcrtattataatgatatgattgatctatgtaattgcatgctgctctaattcattctttagagtgggatacaatattccattatgtagctataccatagcgtgtttgtcagctttcccattgatgggcatttgtttccccatttcttttcattgtgaatagtattcaacatactttcaggtacaaagactctgtgcagtgttgtaccaggtatcttcttcaaagtagactatgaactccaccctggagcgagtcatttggattttcccaaggaatatgtctgtcctgtcttttgatctcttcattaccaaaaggtgactcattcacatttctatcacgagagatctctgtgtgagcagcttaggtcatagcaatgttagcatgctggagccttgttttggcttactgttgctgggtgcctgattgaagaacaaagagcttgatattccccgcagttagggtgagtgatctacatctccacctcagcccaggactgtgtgtctcccagccctctgtccagattggtgagggaataactgccaagggattctgccctggcttaaaggactttgtcttctgggttactttttatgtctcttccatgaggcgctggacacatcgttcagattaggaaatcatacaggagaaacgaagataccgcaaatatttccatacttttttttctttttttttttttttaagtggagccactgggtttaagaatcaaagccttttttgactttttcttatttgtgctaagcaaaaatgacatcacttagggttaccgttttcctatctttctccatataaaatagacaattacttgtaatccaatgaaagttctttgcrctaaggaatctgctttttatgatacatttatgttgggaggcagagcatagagtagtttggaaatttagtgcagagtcatttggagaatatatatyaacagttaaaatgtgaaatggaaatttgaagtatrtatgcttttataaactatttgggaagggcatactagcagtgatatttttagtctgatttttagaagcycatgctgtgtttcataaatggaaaygtcacatccaagaaagtgagaccagcggggaagagtgataggaactccagaggggcagccaaacagcagctcagagctgacatacgaggcaaaatgagcacttagcacctcctagcatatttatcagaagttgccaatctaaactatttgagtttcttcccacaaatggmgtgcactagtaaaacacatgtgttaagcaacttggacagcaccttgacggtgttagttaactaacagccatatttcatggggaattactgaagtgacgtcactcctttaatttcaacctaaacaaaactgtttacatggaaagttgcatgcataggtttctataaaagtctagaccagaaagagttctttatttgaggcacagtgggtaacatcattgtcataaacatgaaatctgtgaaaaaatacatattccaaaagaaaattattcagcaaaaggtaatctttggcatgtgaagacaggctttgatctggattgtgatctggagcaaagtttgaaatatccagatgacattttaactttttaaaaatctattttattttcaaacatatttatcccmgtaacaagaggaaaattatagagaaaaatgacaatttaagttttcagtaaaattaaggaaataaatttggggagggaagagaacatttgggacccaaatgtccatctgtgctcctgctgcaccccatatgaattgtgtcatctcaagaaaattaatgcctgcatctttacaataggaataataatggtcttttctgcttaaggtttttatgcatracatataaagcatttgacactttgggtccttgttaaagacaaggatagcaaagaaattaattgtgkaagagttctgatgtgtaatttcagtgatgacttttagtacagtttctaataaataaattcttttaaaaagctaacaaaaatcttgaaaataacacagttgacttactagagcatatatttgcctagtctgatgaaagtattaacaggcaatgaaatgaccccaagtctatcatgagatgagaaaatgtggaactagggtatccattaattcctgactggtctcagcctgtttttattcccctgctccagttccacctaaattacagcaatggagagttaagacccagagggcttgatttatttaacataagacagtggtcaggaaattgcastttgatggattcaggaaaaatttcccaaatgctgagaaccaatgttgtttccctagtgccattgtatgtttaaattctttttttaaaattatgaaaaaaaagcatggtaaagtaattcacatgattcttgcaattcagtgtctgctaaagatgactggaaaaattgagagcctccaagacatctttctcagagacataaaattagatgtgtgttaatgataggaaaacctattctaccctgaatgaaaggatcaggtgaacattttgttgaactttgccattagaggaaaaaggtatctgaaatattgcctccctttcagttactaaaaaattgctcgataaatttttattttgcttaacatataatagccatttcatagtagaatgaaaaaacaataattcaggccaaaataaaatgcaagttctataatattcatatgtayctttatattctcttgacaaaatgaggaagaaagaaggagagggacagggaagaagggtaggaggaagagagagagagagagggaacctttctccatctcacaaattaccttggctcagtgcctgaaagaaattagtctactctaaagaaatcctgctgtagtcaaataaaaatgtaacaaaacttgaaatgtaatacctagatccaagactgcagttctcgccagtgctgtcacttactgcccatatatayatatatatatatmatatatatatatacacactttattcactgccaggcattgaaaaatgtatgcaggtctggagacaaatgttatgggctgccatttcttttagatgcatccttgggagtatattatggcaggatgtaaataaacaaagctgtgataatgcttgaattgtctttctttcttaatcccagactaaatccccttatcttaatgcaaacttttcttattttaatatagtgtttctcatccatactttgcctttactggattttagtacaaataattatattttaaggataatatgaaggattctgagaattttagttctagtcacctgctgtattggtcgcaaggttaggtaaattgtttctccatgtgccagtagttgttttacctgcttccaraagacagctatttaaagagcccttattttagaagacacaaaatcaatataaataaacaaatttagttatagtatgagaaggtttcttttaatgtcatacagatactgagtgagttgctatgtttttatgtaagctttgattttcctagagggctgtggtttcatatttcacatattactgtgtattttctagtttaattataaaactatctgaggtatatttttgtcccagtctagcagcagctaacataggacaaatgaagggttgggttgcaggtttgtgccttttggtgaayggcagaggaaaatttgggcattattaaccaacagctgtatgctatcaaattaaattttgcatagcttgatttaactagccatatagctgatgctaatctgaagcgtaaacatattcttcagctataggtttcatcttccaaattctcagaaatgctaccaggactatgtgactataaatcaaagctttgcttttcccattagtaatagtgcattataataatctattatgttttattacatagaagaaaattgctttttgtattgttcttacctgttttaaggattatagtaaaaacctcttatgttgcaaaatcaatattaagtatttgaatgttataacaagtttgtaaaagagaggatcgtaaaaattatttatcttttagtactgcagtctaacttcaaacttgtatgttgaccaatattttccaatcctctgatagaggaagtaggccttcttttagaaagtggtttcccaaataagttcctgacctgccattgttgtgtaaacctcacccaaatgctctgatttccagtttcatttctttaaattggagcaaacccctaacatcttttttttaaggcatctgatatggtttggctgtgtctccacccaaatctcatcatgaattttaatccccataatctccacatgttgaaggaaggacttggtgggaggtgattggatcagggggtggtttccccactgctgttctcatgatagtgagtgagttctcatgagatctggtgattttataaggcagttttccctgctcttgctcagtctcaggcttactctcctgctgccgtgtaaaatrtgcctcttcttctgccatgattgtaagtttcctgaggtctcggtagccatacagaactacaagtaaattaaacctcttttctttatcagttacccagtctcagggagctctttatagcagtgtgaaaacagactaatacaacaccctaaatgcaggtcaaaataaaatactagttttattaaaacttttttttatcacttatgactattaaaataaaatttatttgtccacagaccacctaaagtcatcgagccagtcactaaatgcagtctttctagatccgaacactaaatgcagttcttctagatcagggcttggcaaacttttctgtgaagagccagatagtaaatattgtaggctttgcaggtcatactgtctttgtcacaaatagacagctctgccagtgtagtgcaaaatccgccatagacagtaaaaacgaatgagtgaggctgtgttccagtaaaactttacttacaaaaacaggctgtgggctgtagtttgccaactcctgttcttgatttcactattcttactctgtatttcaaatggtgtcaattttacttaattttaccactattttcttagtgactggctagttgattttaagtggcccacggacaaatagkttttattttaatattaataagctataagaaaaaaatttaagaaaaaatacaaccagtgcatcaaaactatgtgtttatgaatgttattcctgaaaatattattgattatcccaaagttcatattaaatttttaaaataagtatacatgtagaaatagagagatgtaatttaaatgattcagggtatttcaataggtatggaggtgaagttttaaatgattggagtttgggacatgttattgtaagatttatcattatcatcattattattacagtagtccccttatctgcagtttcactttctacagtttcaggtacctgctgtccactacagtccaaaaatcttaatggtgaattccagaaataatccatatgttttaatgcgtgccattctcagtaaggtaataacatcttgtgctggagatgtgcctcatccatctgtccagcatatccatgctgcagacactccttgcctaggagtcactcagtagctgcctcagttatcagattcactgtcacagtatcttagcgcatgtattcaagtgacccttattttacttaataatgccccaaagtgctagagtagtgatggtaatgattcagatataccaaagagagactgtaaagtgcccccttttaaatgaaaagatgaaagctcttgacttaataaggcaaaaaagtcatatgctaaagttactaagctctacagtaagaatagatttttktatctgtgtaattgcgaagagggaagaagaaatttgtgctggttttgctgttgtacctcaaactgcaaaagttatggcgacagtacatgttaagcacttagttaaaaatggaaaaagcacgaaatttgtgggtagaagacgtgaacaraaacgtgttcctgattgacagcaatcaggttcagtaccatgcatggtttcaggcatccattgagggtcatggaacatatttcccagagaaggagagactgctgtattagaaagcgattttaattcttaaagtaagtgttgtcaaacaggaactcaggatcttattatttttgccagaaagttccaaagggaaaggaatggcccactaagataacaataaatttggctctactgtttttctttgtagatctaccttacttattcccaactatcacctcctattttttctactcttcgttatattacttctctttctaatcttctctactattgtctagactgctattaaaacctgggcattcctgaaattagaagacatgaaattctctcaacattatccaaatcatttcagttgttctatgtttatgagtttgtctacctgtacactacatgggatatgagtcagtgtggcacttgaaaagaagttcatgctattgcaatcagtattttgtgttatttatttatttatttatttatttatttatttttgagacagggtttcactctgtcgcccagactggagtgcagtggtgctggtgtgatctcggctcactgcagcctccgcctcccaggctcaagggattctcctgcctcagcctcccgagtagctgggattataggcctgtgccaccacacctggctgatttttgtatttttagtagagacagggtttcaccatgttggtcaggctggtcttgaactcctgacctcaaatgatccactcgcctcagcctcccaaagtactgagattacaagcgtaagccacctcactggcctgtattttattttttcaatatgattttgcaagagaaaacatataagcaactactgctataggcttagacataaataggttctgttttagacacgaatgtgaacaagaaagaaagtgctttaaacataatgctatgtttgaaatatgaatgtaaaacataaggaagtaagccaaatataacaaaaaagtaaagacttaaattttaaatagaacaataaatgtacaataatacaacataagagaattcttttatgttcaaaatccagaaattataaaagaaaataaatgacatattcaactacataaaagtttaaaaaaaatgaaaaatgaaaaaactactggcaaagacatcaaaaagaatgtcaaaagaaaaatgccaaagaaaaaatatttgcaagtaatatttaaggcaaatgactaaattaaaggcaaagccctagaaataggtaaagaaaatggctaacacctaacagaaaaataactaaaatattagaaggtaactcacaggaaaggaaatgcaagaataaaaaaagtgctttaaatgatatgtgaaaaaagtctcagaggttgctttcttgttttgttgaattctaagtacaacagatttgtagtgcttgaagatgttttgtaacagaaaacttgaaatttgcaaaagaaaaaagktctcatttagctttagtgaaaccatactgtaaaaatttaattgtaggcttagaaattaattcaacttaataaactcgtagcatatcatctttcacaaattaaattatcataatttttctcccacatggaatgtttttcttaatttactatgatagaagaaatatttctcataattaacaagtaaagcaaaacaggaagtatagtatcctggcattaatgtaaaatttgattatacattttaaaatatttcttctatgtcttcattttccttgtttgaaggtggaagattgttattttgatgtttttttccacaaagtataatgttacgttgtgtatagatcctttatgccagtatatataaacactatttgcaatggctagttaattacatattaatatttctacctggaatttaaaaatggtgtggatttcatgaataaaatatattctcaaatctgttcctctttaagaagataattaaaatttcatttccgatttttttaggaatactgctatactgtaaaccattgtcttcagtatttgtatagtgggtgggcagtaggagtgggaggagggagaacagaagtgacgaaaggaaggggaagactgttttgcctttagtggcccatcgctcacccccaagctgtgtaaaaagagaatccttaaggagattgaagagaacggtattggggatcttttttgaaaagtgtcatccatgaactagagtgtgggagagggagaaggtaaggagtacagcctgactcacacctggaaaggctgttctgcgtttccagagtttgaaaggcagaggacatgtgagtttcccatctgccaggtgagggcctcacagaaaacagatgagttgaattgtcctgagaggggctctgtccatgcaactacctggagggtggctgatcccagcatgaggataagctgtcaggaacctggggccratgagagtggccaggtagaggagttattatccctagaatcatccgtgagaggtgagagaccttaggattaggaggattctcaaaacacactaggctttggacctgccacacccagatgacactgataccagaatcactcatacaaaaatatatttacggagttccgtcactgttctagaccctgggaatagagtaatgaacaaaacagatcaaaatctttgctttcataaagtctacattatagaggcaagagacagtaaacaactaaagtctgtgctatgtcagaaagaaaataaaacaggatgagagcctataaaatgctaatgtggtgtggaattttaaacaggcaaccagggaaagtcactgacatggccttatttcagcaaagatctgaaggaagtaaagtgataagccagggctgaattcctgatgggggccagcaagtgcagtgcccctgaggtagaggcacccctgaggtatctaggggacgacattaggagtccagtgtgactggagctgagcactaaggaggagattaattagtaagagatgggtttagagatgtagtccagggccaaatggggaggggccttgccagccacggtgcatactttggactttagtttgaattctcaaggatgggagctgttagagcttttcagttaagaagtataatattctgaccttcattttggaaggtttactccagctgctgggtagtaacaagataataagggaacaagtggggaagcatggagaccacttgggaggctcctgcaataatctaagtgagacttgatggtagcttggaccaggggtttttgtggtaaaagtgatgagaagtggttgaattccagatgtattatgaaggctgagccagaagaatttgttgacagatcagttgtggggtaggaaaggaaaagaattgagtaatttcaaagtttgtagaactgaaggttgaaattgccattaactgagatggagaacatctgtggggagaacatagcgaggagaaaagttatcaggaatgtttaccgaaccgaacttgggttcacctgcccaatgcaggtaagccaaacactggcatcgagattgcagcaaaagaaaatgaggcatttattgcagggtgcccagcagggaaaatcaggcagctcgtgcttcagacccggaytctccaatggcttataggtaaggatttytaaaggcaggaaagcagaagttacaggcaaagtcctaagtcaatacatggagcttatacattggtttgactgaaagaggctgggtatcttgaaccaggggcttacagaccataggtagagccaaatattttccaatttgcaattgattaataaagagcagctttatttaaaattgaaatcagcagaaaagaatgttagctctggcacgtgggcatggctttctccaggtgcctcaagaagaactttagaagaaagaatggcggtcagagttcagtcctcagttccccttggtctgaggtctatgtgccagcagatccttttggtgggggtcagggtttctgaaaaacaactcagggatataatggtaaggtgctatatttagtttctatagagaacaaaaatctcattattctaacttccttggttattgttttaagctactattaccttcttgcttattaagttgctcatttacttctcaggactagctatgtgcctggactttctctcgaaggaactcaagattatcttttatttccatgcttggtggggcagtggcaggggggtgggcagaagctcaggcccctacgagggatcccacctccatctcaggagcttagttttagagggttaatttgagacatctgttagacagctagatagatatttctaattgcatatatgagtcaagttcaagggcaaggtcaaggttggcaatataaatttggaagtcttcaacttagagttggtctttaaagccatgagactggataaagtcagtcaggggaggcattttgctagagaagtccaagtgctgagccctagaacatttcaacatttagaggtgcaggagatgagaaagcaccaacaaaggagactgggaaggaaaagtcagggagattatagctccataatcaagaaagatcttcgttcctagtacctgtcctctcacgtccttactgcaaccttgaaagtgctcatagtagttgccagctagaaagaaaggactggaaagatagaagaaagaagacaccatgccccttcattactgagggcttctgagcctgggggatgctcaccctaggaagaagggaagctttaactgaatgaaagattagactgttagatttgttacattttatttatctgaaggggattggaaaacctgtgtgaactgcatgagatttcctagggtcaagaaagaactggtcaagagagaatatgcaaaacagcagtgggagaaatagttgctttctgcttgcactctagcagtttcaaatacccatttaccatatattctctcagttgacatgaaactattcaaaacactttcagcttcatgacttatcgtcctaagtctacaggcaaaagtttaacttttgcataaatcatcaaacagcaggtgctctgagtaacttaaggaaaagggaatttcaaatatgaaggttttcgaagtctcggtcaagatctctgaagtgtgtgggcgcacttgagaattgtccagatgtgtaatgtgaatgtgtctgtgctgtattagcatagttagagtgtggtcctaatgaggttcagccacagaattggtagtctccccattcagctattttgaatttgtcgttttgcatagagaatgccagtgaatggcttgttgggtttatgcaattccatcaccccactgagaacatcaaagtgtgtggtttacaggcaaagcattaggagtgacttctccctactcacaccttcacacgtacaggacctactttatgcatatacacagctaggtctatgtagttcaatgtatatgcagctactttttaaatttaaatagggtacatatgaatgtaaactgtcaagagaataagaaaatcaaccaataatgagaaaattcaactctatgaatttgaagattaacattcttcataaaaattgcacatrtatgtgtctcagtgaatgagggtaccattttcattgagtttctttctttttatgatattaagtgtgaaaaacacagaggctaatgctcattyatatgataattctatagtggaatgtagggtggatttctttttcatttggtgccatttatttagaagatacaaaataaatgatttttagatgcatcctcagagtactgataaaagatcaatacttcttaaattaatgttcttactgcattatgcaaaaatttgttttaaaatcctcaggattttatgatcacaccttcatgtactgatgcttaatgggaaaatattaaattttccctattaaatactacattccaaattctaaattcttgcagctttgccaagttcaaataagtatagtaaatttaactttggaatttcctgacttttgcattgctgaaattttagattttgcccaacrttaagggagtctttcaatttaaattccctttatttaaaatgtttagggcaattgtgaaaagtgaggaaattggatgaaagaaattttctggaggacatggttttcacagcttgtcacttaattgttaaaaaatattcccctgtaaagcttagtgtcattatgttaagtcttcagtattttaaaacataaataacttgatctcacttgtcttaaaggtctatgttttaagttttaagtttgtcctaatgtgtcttaaatttggactaacaaaaggtgacaaaatacttccacttgagtaaattacctccccccgaaaaagacagagggacagagagagaaaaaaaaaaaaaggaaaaggaaaagagagaaagaaaaactactgctggcaaacagctatgccttccaagaaatatttgctttggaatgcagaccaaatattcaaactcatattgtttgactatgttatcagtaacttttatgtattttgaaacagagatagctttcagactgttataatgttaaaaagcactgtgatggagctgcctcttgccaccattattacttcatgcctgagttactgcaaattagtgtttagaaagatgcagtattgatttcaggccaaaagggaacctttcattactttgctgcagtagtagcctttcaaaaatgcaattattcagcctaagtgaacaaaaagctcttaattaaaaagttcccttagttcctattaatgataacaaagactattttcaatgtatttccttagactaataacaatagaaaagagggacaagaaagaatatatattgtactatagtaaaatcctgaaataatgcaaaaataatgatataatgtgacagaccacaggctttcatcctctgcataacccttgttgttttccatcattctaaaaaatatccttccctttctatcttctccttgggtaactgccctcgcttttccttcttgttcacatcaaactttggaattatccctaatcattctctgttttctttcttctgattaactcccgaacaccttctaatctagggattattctcaccagtcaagtgaaactaatttcatcgatgtcaccagatggaccttttgcattttttatcttactgaaacatccctgcggaacaatcatctataagcagttggctcccaaaactacaatacagctctctcttctgagttccctacctttgtctggagctgcctgccaggcacgtatactttaaacatcccacaattatctcaaactcaacatacacagacygagtcttcagctccactacacccaccccacgtataccttatcatcatttctcacgttcatcatgacagtgattggcacaattattcattctctttcccaagttataaacctgggtacaaatcacccattttatcatcaagacatttaggtggagtctaaatatatttcctaaatatattttgaattcatccactttcctgcctttgtcactaacgtctctcttctagatttctgaaacagctttccttcaggactcctatctcctacatgttccactgcaatcctttctccacactgcagcacaactacctttctagatcacaagtttggtcatgtcactttcctatgtggatctcccattctcaggataaagttcctgcctgatcattctgtttacctctccagcctaacttcttttcacacattctgattcagacacaggtagatttatttagttccttcaataaattatgctctctcttgctttgtgatatggtttggctgtgtccccacccaaatctcaccctgagttgcaataatccccatttattgtgggagggacctggtgggaggtaattgaatcatggtggtgggttttctcaagctgttcttctgatagtcaagtcttatgagatctgatggtttgataaaggggagttcccttacacatgttctcttgcctgctaccatgtaagatgtgactttgctcctcctttgtcttctgccgtaattgggaggcctccccagccatgtggaactgtgagttcactaaacctcttttctttataaattacccagtctcaggtatgtctttattagcagtgtgagaacggactaatacacctggcctttgtgaatgctcttccttctacctggagaagaatattccatttgattttcatggcctgtttatctgtttcaatttaactgtcactttcccagggaagtctttcctggcccctttctcttctgcattctctcactacctttcactatttctgctgtagaatttatctcaccatattgtcatcaggtataatctcagtctcttggccaccactgacggcttctggagaaggagtccaactagtttcagcttagctcactgtttttcaatactatttgtggtctaaagaaatatttatcttttattttgaaaccagctgcatctttttttgtttttctctttttatatgtcatctgtcagtgctatgtgtttggaaaaaaaggatagtaccaaagctttttgactggaagtcaaaatctgcatgtttaataagctgtccatgtgattcttacacacagtaaagttttgtaacatctgtactctgttttactctcttgagaagagtaaaagatatctgacatgaacttactcaacttcagttctattactacatattcattctccatttcccctgtctttgatgaagtgtcttcacatttttccagagcaaaatgttccagctctgcacattaattccatcacctttctgtactccttttaactcttgccattaattagttcattttctagttgggatctcttctctttcctgactcttcctctttacctgcaaagccatcctaaaacacattaaccataaaaccactctttcaactctttagtcacttctcactatactatttcttgctgcctttcttcactgtaaattttcccaaaagcttagtgtataccagttatctcaagtttctacttatttcttatccttttgtaaaattgcttgtgttccctagaatccctcattgcatttggtgttcttgcttattctgtttcttcttaattgtttttcctcaacatactagtttctttttgctgtcataacatgttgccacaaactttgtggcttaaaacaacagatttattgtcttacagttctagagatcagaagtcagaatggtctaaccaagcccaaatcaaggtgttggcaggattacattccttttgaagtgtctagggtacagtccatttttttgccttttcaagtttcgagaggctaccctcgttccttggcttgtggcctcttccatctttaaagccagtagtgtagcatcttcaaatctgtctctcaatctgacactctatttccttgttctactgataaggattcttgtaattacattggacagaggaccagataatctaggattatctctgcatctcaagatcagctgattaacaaccataattctctttgtcgtgcaagctcacatactgataggttctaaatatgatatcattgggtggctattattctgcctcctgctattgactttcttaaaacgtaatagcttttcagtaatactggtgactctgtttaccttttctttatcttcacttgcttcccttctttcaaatgaatatatccccttaggacttacctttaacgtttttcttctcgtgtgatctcttcattttatattattcatctcaactgattttatccacattgatggtttcaactgtctatacccatagattccaatcaccttgcaaagacttactctagacagtcaacaatttttagatattagtaactcaaattgttaatcatgaagccattaattttcccagaatatattttttactttactgattttattaatattagctcaataatgaaacttattgccatttccccttattcttgcttttactttcaggatattttttcatgtattcttttctctcccagtcccaccttcattagctggaactgagactgtgccatcatctctgctgtccctgacccatttctacgtcagccctgatcatctttatcgacataggtagaaatctttgcctaaagtgaagttctgatcactctccttgcctgcttaatgatttggtcactcctcattgcctacagtgcaaggacagattactgaaaatggcattctaggcctgtcacttaactttctagtttyattgttttctaagtaaatgccctcaggtcatggaaagctgcccatttctcatccatgccttataattggctacctccatactttagctagagtattttcattgtctggaagaactcctccctcctgtcttccttgcatgccaaagttccaccccattctttaggggcctttatcaatcaataactatatctgccaagaacttttgccgattctcatggttgaattgaggtaacatgttgttaatcttctttgatggaataaattatattgtgccttgtttcacatttaggtatttggtatgtggcaaatcaaaggcctttttaattagcaattacttaatgagttcatgaatgaatagtatatgcccaatcagtatctgtttatttgatttcttaagagaagttgagagttttaaagaatgaatagcataattttcattaactattgtttctttttatttcaaacaaaatatttatttaagagatatacccatttatggccatttagttgtcatcggtaagctaaattttcaatgtgtttaaatttcagtctgattcaacccttttctataaaaaatacctttgatcaatgtatatactatagctaaagctaacatttgttttttgaagctgaaggtaaaacaatgataattcagaaatttcataactatccttgccagctttgatgtatacttttatgctgtatgggaaaaaaatcaaaagaagatcctggggattacatttgccccccttcccaaaaacaaattatctattagaggaaaaagtttttatgttaagtggctggtctggaaaagttagtatgccagatttctkgtttataataagaatgtaataagtaagatctcttccaatggctaatggttcatattaaattagaaaacctgaattcagttaaaaagaacatggaatgggaggacaaggctttcagaatggtgatataagcaccttggtagactctctcccaagtaaaataagaatttaactcatgaaatacattttttaaaaaataccaacaatataaagtctctgaaaattgaagaaaaaaatccagccccatatagaaaagactatacatcattgtcaattatcaaattaaccccatataaaaagaagtatacatcagccgggtgcggtggctcacgcctgtaatcccagcactttgggaggccaaggtgggcagatcacctgaggttgggagtttgagaccagcctgaccaacatggagaaacctcatctctactaaaaatacaaaattagccaggcatggtggcgcatgcctgtaatccaagctagtacttgggaggctgaagcaggagaatcacttgaacctgggaagcggaggttttggtgagccgagatcatgccattgcactccagcccgggcaacaagagcaaaactcttgtctcaaaacaaaaaaaattatacatcaktatcagttgagatttatctcaggaatgccagattggttcatcatctgaaaattaattgatgtaatatattatttaaataaaagacaaaagccgtgatcacctcaatatatgcaaaaaaccaaaagcatttgaaaaaaagccaatacccttgtattctaaaaataatcagaaaattaagaatagaaagaaaaaaataagaatagaaaggaacgtactcaactttatagagggcatctatgaaaaactacaactaacatcatacttaatggtgaaagaattaatgctttccctaagattgggcacaagactgatgtctactctcaccatttctcttcaacattgtactacaggttctagccaaggcaattatgcarttaggtaaataaaagttacccggactggaaaaaaagaagtaaaactatctctatttgtagatgacacgtgtttagtggacaaggtaacaactgaagtgaataaggaatacactaaagtggctatggtgtactctaaaaactattagaaccaatgaatgatttaagcaaagttgcaattgtacaagatcaatgtacaaaaatgaattttatttttatacaaagaataaatggcttaggaataaatttagcagagtaggygatagatttgtacactgaaaactgtaaagccttgttaaattaagaatgatctaaataaacaaatatacaccatgcttacagattgaaaaacttaatattgttaagatggcagtactctccaagtcgatctgtaaatgcaacacaatccctgtcaaaaatgaagcttgcttttttkcagaaattgaagaactaatcttaaagttcatatggatgcaaaatacacatttttcgtagcagcacatagaatattctccaggatagagaccatatgttaggtcacagaacaagtctcaacaaattttttaaaaatcaaaatcataccacatatcttctcagatcacaatagaataaaacaagaaatcaataagaagagaaacattgaaaaatgtacaaataaatggaaattcaacaacatgctcctaaatgaccattgaagaatgaaatcaatgggtcaatgaagaaaggaataaggacattttaaaaatgtcttgaaacaaatgacaatggaaacgcaacataccaaaacctatgttatacaacaaaagwaatgctaagaggaaagtttgtagcaataaatacctgggtcagaaaaagtacaaagattttaagtaaaacaattaatgatgcacctcaaggaactagaaaagcaagaacaaaccaaacccaaaattagtggaaggaaagaaataaagatcagagcaaaactaagcaaaatagagactgaaaaaacaatacaaaggatcaacaaaatgaaaagttggtttttctgaaaagataaacatgattgataaaccactagttagagtaatcaataagaaggagagatgactaacaaaattagttgagatgactaactaatcaaaattagaaatgaaaagggagacataacaactgataccacagaatgcaaaagattattaaagactattataatcaggtataactaamaaactggaaagtctagaagaaatagataaatctgtggacacatacagcctaccaagattgaatcaggaagaaattgaaaaccagaacaagccaatataagcaataagacttaatcagtaataaaacatctcccaacaaagaaaagcccaggattggatgtattcactgccaaattctaccaaaattataaagaagaactaactccaattctcctcaaactattcccaaaaattgaaaaggaaagtactgtccttaatgcattctacaaaaccagacaaggacaaaacaacaaaaaagaactacaggccaatattcctgatgaatatagacgtaaaaatccccaacaaaatagtagcaaactgaatccaacagcacatcagaaagataacacaccacaatcaaatgagatttatcccagagatacaaggatagttcaacatatgcaaatccagaagcattatacatcacatcagcagaatgaaggatgaaaaccatatgatcatctcaatagatgcaggaaaagcatttgataaaatccatyatcccttcatgaaaaatccctccacaaactatgcatagaaggaacatacctcgacattaaaaatgccatgtatgacacactcacagctgacaccatactgaatggggaaaagctgaaagcctttcctcgaagaactggaataagacgatgcctacattcaccacttatattgaacagactacagaagtcctagccagagcaatcagacaagagagaaagaaataaaaggcatacaaattagaaaagaggaaatcaaattgtctctctttgtagatgacatgatcttatatttagaaatcctaaaaattgcaccaaaacctcttagatctgataaataaattcagtaaattttcaggataaaaaaatcagtgcacaaaatcagtagcatttctatataccaataatgaagtagctaaaaaaagaactcaaaaggcaattctatttaccatcgctgcaaaaacaataataaaatacttaagaataaatttaactaaggaagtgaattcttccataaggaaaactgcaaaacacttacgaaagaaattgaaggggacacaaacaaatggaaagacattccatgcttatagatcagaagaattaatatcattaaaatgattatattacccaaaacaatctacagattcagtgcaatccctatcaaaatatgaatgtcatttttcacagaattagaaaaaacaatcctaaaattcatatagaatcaatggaggcatcacactaacctgacttcaaaaatatattacaaggctctagtaaccaaaacagcatgatacttgcataaaaacagatactagaccagtggaacaggagaacccagaaataaatcctcctatttacagattttcaccaaaggtgccaaaacaacattgaggaatggacatccttttcagtaaatggtgctgggaaaactggatatctatatgcagaagaatggaactagacccctgtctctcaccatatacaaaaattagctcaagrtggattaaagacctaaacataagacccgaaaccataaaactactagaagaaggcatatgggaaacactccaggacattgtctgggcaagaattttatgactacgactcaaaagcacaggcaacaaaaacaaaaattgacaaatgggactctattaaactaaaagcttctgaacagcgaaggaaataatccacagagtgaagagtcagtcctgttaaattggataaaatgtttgcaaactatgggttcgggctcagtggctcacgcctgtaatcccaacactttgggaggctgaggcgggcagatcacctgaggtcaggagtttgagaccagcctgttcaacatggagaaaccccatctctactaaaaatacaaaattagctgggtgtgatggtacatgcctgtaatcctagctacttgggaggccgaagcaggagaattgcttgaactgggaggtagaggttgcggtgagccgagatcgccccattgcactccagcctgggcagcaagagcaaaactctgtctaaaaaaaaaaaaaaaaaagtgcaaactatggacatttctcagaagaagtcataaaaatggtcaagagatacttgaaaaaatgctcagtattactaatcatgagagacatgcaaatcaaaattacaatgagatgtcatcttattccagttaaaatcactattattaaaaagacagaaaatagcagatgctgktaaggatgtggagaaaagggaactcttatacactgttggtggtaatgtaaattagtacaaccaatatggaaaacagtatggatatttctcaaaaaattacaaataaaactgccatgtgatctggcagttccactacatagcatttattcaaaggaaattattatatcagagggacacctgcaccctcatgtttatagcagcacttttcactgtagcaaagatatggaatcaacctaagcattcgtcactggatgactggattaaaaaaatgtgatatatatacacaatgaaatactacttggttataaaaaagaataaaatactgtcaattgcagcaacgtgggtggaactggagggtatttatgttaagtgaaatgagttcagaagataaaggcaaatatttcatggtctcactcatatgtgtataaaaattgatctcatggagtgagagagtagaataagagttaccaaaggctgggaaggatgtttgrccatagtggaggatgaagagaagttacttaatgtgtacaaacatacagttagacagaaggaataagttccagtgtttcataacaagagtagggtgactatagttaacaacaaggtattttatatttcaaaataactagaagagaggacttgaaatatttttaccacatagaaatgatagtcaagatgtgagggataccctaaatgccctgacttgatcattacacattctgtgcgtgtaactaaatgccatgtgtcccataaaaatgtataaatgttatattttaatgaaaaacttttttaaaaagtttacatggaaattcataggcaaatcatataacatgtgggacatatgtaaagaatttttataactcattcgttaaaaacataagtaacttaattaaaaactgggcaaaggaattgaacagatatttctccaaagacaatacgcaaacggcaaataaggacatgaaaatatgctcatcattattaatcatcaggcaaatgcaaaccaagttataatgtgataccacttcacacctacaagcaaaaaaaaaagtagataatgagtgaaggtgaggatgtggtgtgtatgaaggactccctcatatattgctagtggggatgtaaattattacagctgctttggaaaacastttgtcagttcctcaacaagttaaacatagaattactgtatgactcagcaattccacttctaggtgtatatctaagataaatgaaaacatatgtctacacaaaatgaatacctgaatgttcatggcaactttatttataatagccaaaaaataaaaaatggaaataacccaagtattcattgactgataaatgaataaactgtggtatatccatacaatagaatattatttagcaattaaaaggaatgaagtgctgatacatgccccaacatgaatgaaccttgaaaacataaactaagtgaaagaagccagacacaaaggaccacatattttatgattctatttatatgaaatgtccagaataaacaaatatatagagacagaaatgagatcagtggttgcgtagggcttggagaggaataggaggaatgattgctaataggctggaatttccttggggggggatgaaaatgttctgaaatcaggttgtagttatggctgcacaaccttgtgactacactaaaatcatttgagttttacactttaaatgtgtgaattgtatgacatgtgaatcatgtctcagtaaagctgtttataaattgaaattctgagtacagttgatacacaccatgcttttgaaatctgaaaagaggaaagcagacatcaattttccattgcaatttgtaatattgatattgcctgttgtctttagaaaagctggaaataggcagcaaattattgcacttaacacttcaatcatgaattttcctagtgtcaaacagtatacgaataagtggaagttcagtgtatgcaaaaatatgcttacttttttctatatcaaaaagatattatacagaatattccaaatatgtatagttcttggcatcagtggaaacaaaatgttctaagaacatgtttttaaaacaaaatttcttgttttatttgtactaagcttctgtaacataattgttacatggatggctttttttctgtgacatgtacctataagaatggacagtctctctagggtgttcttagaattcattgatatctgagatcatgttatcactacttatcaaattattcattatattccgtttagtrtaagatttacaggaaatgttggttgacaaatatgaggttatgtggtttggcagtcagaaatctgtcagatggttttgtttagattggatttccttttttaaaaaacctgtgttcagagtcttcacattactgaagacttcccagtctttctctttttttgccctttgaagtcacacttgacaatccccctgttttcacagtgttcttccttagcctccgtttttcacattcttcctccttcctccatgatccttccttcccagactcctattctgcttttcttcctctgactttttcttagatgttgatagttctcatggtttcctccttcaattccagtcttttcatttgtcttctttggaaatctcatatgttgccataacttcaaaggcaatccttatacttggtgataaaccacaaatgtccatctttataatttacctctttgctaagtttcatacccaaatttttagctctgtagattagaatttttactggtttctctcaaacatcccaggatcaaaatgtccaaagctcaacttaactgtaaaacatgttcttccattcgtgttccattctttgttaatagcactatgtcatcatccttgtcaatcaaaatagtagtgtaagatatctttctggtgacaaagtccttcctgttgatttttccttcaaattatatcctgaatatatgttcccttcctcatcataaagccttacttcaagttctcaacatttatccctgractattatatcatctgtccacattaaacacaaggactatctttctaaaatattgataggcttatgtaattcttttgtttaaactccttcatagacactattcatcaccttcagaataaaagccacagtccttggcttggcttttcaggatttagcatatgcctaactagctaagcttattgtccatcagtttcccagctgttctagtacactgtgcattcttcaactgtggtgtattttcagacccagttgcccatgctgttttttgttgttgttgttgttgttgtttattagttggaagctaacttcactcgactggccacaaaaattcattcaggactccaggcctatgccaatcagaacattttcctggccagaggcatcattcagaaattagcatgtgacccaattctagaaattaggacaaaagggatgatttgctgggggcttctggaaaaagttttcttcctctcaggagagagcactggaaaagacactctcttccactaggtgtcccagtcaaaggaatagcctaaagctgctgtatccattttgctcccatcagggaaggcagctcaagtcaaaatacagaggaaggcctagttgaacatatctcacagaaactgaacaagacacattggttgaaaccacttctagacttcagatatgacagctattaaatttttgatttatatcartttaaatcagtttttctgatatttgcagaccaaagctgcaaactgatatagtttcaaaaaagatcaaggagagatgggtggcagtatattcagtgtgcagaacatggatgaaaccaattcccattgttaagactctgctttttcccatgagcagacttgtcacctttaggcacacttgtttatacatagataatatatgctttatatttgtggatataatacttccaaatctgattatgacatacagtattgaagaactaatattcaaaagagctaaatgcatgtatccttctgaacataaatgctaatgctaaatttaaattgatggataaacattgtgatacagacaggaggcagggaaatactaggtcgaagacggggtgggggtccctggcgagggctccaccctcaagcctggacctgcgaccctaaatgagatcatgaattcctgctttcctgcccgaatgttgccttttccaaaaccaccctggcccaccatatcccctaccctgtacctataaaaaccccaagctccactggcaaaggagcagagcaccatggcaaggaaggagagaagaagcatctgaatgtcgagaggagaagaggcagctggacatcagagactacggttggagaggagttcagctggggacggtcagagaggagttccgctagggatgaccaaactccaggggaagataatcttcccactccgtccgctttccacctccccatcccactgaaagccacttccatcgctcaataaaatcctctgcatacaccatccttcaattcattcacgtgacctgattctccctggacaccagacaagaatttgaaaacactgggcatgagctttttaacatttaagccatctgcaaatggcaaagctaaaaaagcattgtttgtaacacacaccttctggggctccacaggtcaccggcaacacctagacactgccgtgggctggtacagggtttgttcctgccggcatccggaaacactcatcctggctcctgcacctgctcacctgtgtgctcccctccagcaaagggtttgagcatggcagccaagtaaacaagccacccctgtctcaagtcctgtgaggggctcgagggaactctcccatctcaattgggcaacactgtattaaaatgcaggggttttggtcagtattttggggttttgttgttgttgttttaaaaaagcaccttatttttaaatttttaaaatatggtagatgtctagcccaaaaatgaattaaaagcatttctattttttatacaaaacctgagagccttttatgtataattattttgaagctaaccttttagggttcctactcaactgtaaggagaattgtgaaacacataggttttttttgcacaataaaattgttaacagaaaaaccacaaatttartgtcactccacatgtccttctatgtcccagatttattttatccaaaaaaagaaaatgtcaaacatcttttaattttctgttctttttattgtcaggaagagttttaagactagggcatagggaagttgtttattatgaaacgaaatgcctagaaataaaagccaatgtttaaatgaaaaagttgagtctcttaatgtttaatattttgcataaatcctgggcttcataagcaccttgataattcatataattttagatgttaagagagtgagaaggcaagttttagttcttcacttttttaatgcttgctttaccttgtatccttcttttctttcttttctttttctcttccttatccagaggtgataagtttctgtggtaattaaagtacagctgtttagtttcatctctcttttgaatccatgctcagttgtattaagatgcactgcactaagatagcaacacagratgcaacaggacctaattttgcacacgtggttttattttgttggattaagtctgatggcagctctttgaccacattttgtatttactcctcatgtagtcaattcatgttagaattctgatctctcttgggaaattggtagatttttgatttgtacctctgtgccttcagtggctaagtgttaagcctcaaatgaagatattatttcatagaatgtctgaatctggtaactttttttataagaacatgccaagaagacacacagcgtatagttatttcatgataaagcttgtaggcaagagtgacttgccagaataaatggaaaaaaataatgaatagaccaataaaaggatgtaagaaaggcattggcaacctttttctttttaagcgtggggttaaacatattttgtgtgtttataataggaatataattatttttccttttttattggacattttaaaagaataaatgcaactgaaaagagaaaaactaaaagtcagcttattttgacttttcagtaattatctgtatgtatggcttttattgttgtttcttctagttactggcttttgctacctctgttcattaaaaaagacagccacctcccaggaatttgggtggatttttctcacaatgactcatttcctttttaaatgtattagcaattagctcccagttatccctaattgcagctttgttagacttcccacctctctctgcttactgaactagaagagaagtacattaaaagtttatataaatgactgggttttctgctttaaggaaaattttaaagmaagcagacttttcattaatgggaaaggaaatagactatttccagcattgagtatgctgaatggataaatgtagggaggtacaataggaaaactggacacttcccaaagcctcccaagtttttgccctttaccatgtttctgtattattttagattgaagttgttcccagaatgtcaaatactcccatattcaaatgtaagtacaaaaacatatcctgaagccaagtttaaaaaaaagttatttgccactcttcattgcttcaaatagtgtgaaaattagttatacattttcaaatacagttattctatattttaaaatgtaatccatgtatgtgtttttttaaaggctctagtaggataattccctagttgatgtagaatggaaactaaaacattgacatctttacttatttccaatttaaattgcatttttaaaaaagggtatagagttctgctttagttggccttgttttaactgccatgggagtttactttcatctcagttcccatagatatgtgtgagaaattctttggggcctgaaacaagagtatcttcagggttatatgatctgacctaatcaaccatgaatgctctcatactcttaaaaaaaaaatctcttttaaaagctatttaatgaaggcctttctcaatcatcttctccttcttcccttgattagacattgatgagtgcagcatcattcctgggatatgtgaaactggtgaatgttccaacaccgtgggaagctatttttgtgtttgtccacgtggatatgtaacctcaacagatggctctcgatgcatcggtaagcctcgcattttgaaggctcaatacactgggtctttataatgacaaaacagcccaaacaggtatgaagatggcaacgattataaaatattgaagaaatggctgaatgagttgtttaatgtaaacggtaccagtattgagggattgatagaccaggtactctttgcaaagacttcagtttcagaatccaactgggtttgttttatgttgtcaaagtcattttgggaataaagaaagacacaaaggcacgagaaaaattttttaaaatctgctttgggagacmgaatgtagtaattaaagcttcttttgtgctatgaatcatgaatgttattaacatcttatttacttagaacttgtttattctattgaaaatagttactatacaaaaaagacacctttaattttgtgtttaaatatattcaaattaaaaccattgtatgctctcccttgtttatttagaaagatgcaatagtgctacagtcatggtgaaggtaatctgttattgagcaaggcttagacatctgtcttattgcgagcatagagattatgaagtgtcttttgatgcataatcacagcacagtgagctaccctcacatttcccttcctgagcttttaacctagtctattccaattttaagctgacaataggtaaaaagagaggaaaaaagagrcactgttatctttactggcactaaagattcatgtagtgcaggaattaggaaaattaatccaatacttaaagaatggtgttgtttggtccactagagggtggccgtttgggcagtgtctctctctccccaaaccaggcagttagtatgtcagcaaccaactgccaggatctctgtaggtcttgatgattccctgatgattctcatgtgcccaagagaactgagttgatgagatggaaatacagagtcaaggatgtaagctagaagtcgtaggccaccaataaaaggactgtggcctgaattcatttgattaaatgtactgatatatcaggtcatccagcagtgaacataagagatacaaatcctgccttcagaatgccatattgtcatcataaataacagtagaagcctactaatagcagtaatagaagaaacagtagtagtagtaaaaataatagctgtcatttaagatattacacataccgtgtgtaaggcactgggcttctccactacctcattatctcatagctgtgaggagtcaggcaagctaccatcttctctacacttcagtttcttctaataagtgtccaataaaatattcttcattattattmttattaagaggaggaggaggatatgcctgctctggacctatataaatatgtcatatggtccttctaatagccctgtgtgataagtatagttattccaaatttacaaataaaagaaatatggtttagagaggttaagtgacttgcccagtgttttgcagccaatgaatggagccaggattcaaatcctgacctctctgactccagcctcttgtgctactgtgacactgaactaccatttacccactttaaggctgtggagatcctgtggctagatgtcagggcctccagcatgactgatttcttcactgtcatgctaacagcctgctttgagaagtaagatgtctgttgggagcctcatgtcrtgtctttgaatgagaattgtttgtgttttacagatgaatcagagtttctatcttgcattaggtaaatcatttttcgtgaaatattaagtctgtataactgagcagataaactattttagggttactgttgccagttggctcactgtgtagtaagtttgattcatttaatactctaattcccccttatccacggtttcactttccatggttttgttttctgcagttcccactgtgattcaaaaatattagatggaacattccagaaataaacaattcataaattttaaattgtacatcattctgagtagcacagtgaactttcacaccagcccgtccagggtatgactcctctttttcccagcatatccatgctgtataggctccgcacccactagtcacttagtagccatctcagttatcagaccaactgacagtatcgcagtgcttatgtgcaagtgaccttattatacttcatcatggcccctgaacccaagagtattgatgctagcaattcagatatatataaaatgagaagccataaagtacttcttttaagtgaacaggtggaagttctctacttagcaaggaaaggaaagaaatcgtatgctgaggttgctaagatctatggtaagaacaagtctatccatgaaattgtgaatgaagaaaaagaatttcatgttagttttgttattgcacctcacactgcaaaagttacagccacaatgtgtgataagtgtagttaagatggaaaaggaattaaatttgtgggtggaagatatgaacagaaacgtgttcaaattgaaagcagttggattcagctccattcaaggtttcaggcatccactggagatcttaaaacgtatccccygcagataagggagaactactttataatttggctgtcagctttctatgagagttgaaaattagtgcaactacctacatctggcttgattttcttgaactctataggaaaataatatgtttatgcacacgtgcatatgcgaacacaaaataatcagcttggaataggtatagattcaactctttaggagaaacgtcgccgtgggagtcgtcattgaacactgttgtctgggtgctgtagaacctggcttccggaaacttgtctcctagaatattgctagaagaaatatgcctggagaaggaagtgaggttattattgtgaagttctggaaataccaaatacagcacatgtattttatttggtaatcaatgtggagtaattgaaggcttttgagamcaaattgtaatgcagggttgggggcttgagaatagagagaaatgaaactagttatgaggtagaattgccaaaacaagtttcagcgttttattccccatttctaaattacttctttttatttactcacttacatttcaaaatctttctctagtcaaacaaaacttgcattcatatttttgttctgcattggaaaagaagcatgaatcctcattttattcagataagaccaacgtacctaatgatttactaaggtgggttttcttagaggagagttttgatttaccaaaaaattatgayaaactctttttatctcttgcctccttatgttataaagtcctaagtctctacctgaacattcaaagccttacctaacctgtattccygagtcatctctaaccacttgccacctcacacttgtatttccctcattgttgtacaagaccacactgccatgcctttgccagcagtaccccctctgcccgaagcatcttgtttttccccttctatgctcattaaaatccagctcaccctttaagtcccaaaataggtatcacttttccttttttgttttttaaagatggagtctagctgtgtcacccaggctggaatgcagtgtcacccaggttggaatgcagtggcaccatctcagcttgctgcaacctctgcctccttggttcaagcaattgtcccacctcagcctcctgagtaactgggattacaggcacccaccactacgctggctaatgtttgtatttttagtagagacagggttttcctgtgtgggccaggctggtctcgaactcctgacctcaggtaatccacccgccttgacctcccaaagtgctggaattaaaggcatgagccatgacctctggccagtatcgcttttctttgtagccgtttcacctaaactacattttcttcttgggcaaaattaatcagccccaccattttgaaatgaaatgaaatatgttttcatttgcttcattttagggtttactgcattgtcacaggtacttctgcgttactcactggctagactgtgggctttgttaggccctgtcttatgcagcttcmtggaccctgggctttatgtaataggcatcttgcatagaagtttgtgctgagtaaatcttttctgaatgaacaggaaaaccagcaaatgaatgaatgagatgatattgaatgtaagaacttcatgttgattatagcggccttgcagcctttggcatctctttggacatgatgtcgtgccactgaattacggtcctggatgctcataaagcaagagctaacttgaggttcggaaagctaagtcctgcactaaccaggagtcccattcatttcactatcaacatcctgaacactaggaacaaaggaaggtctctagggaagggagaatggctctccagaattacaaaacyagtgttataattaagtaagcagcttaaaaatgttttgaataactatgttacatttggaataagtatgtgttttccatacatgagaaaaaattaatctaacatattaatgtgtacgagatctttgatttctaaaattctgagtctgtattttctcagattgaatttatttggttgaattatatatgttggagatatttgcacgctatttattttctaaccacatgtatgctaataaagagttggatgaacttaaagctctttttaatactaaactgcgtgttatctgcagctttattctgagagctcacatgtgctgaaagtgacatttgctgaattttgtcttaatttcttattctagttaacacagatattctgagtgtataccacatgacaaagcatcagtaaacttgatcctatttcttttgtgtgctggaaaacagtttcacatggtaggagagtttaaccaggcaatttaattataagacacgataattttccgctttcattgtatactaaatataaaagtcaaatttctgatttgtttatctatctagtgtgtttaatcatctttttatatatccaggaaagaactgttttttagcatagagcactaacatgtgccagttccaaaaaaaaaaggagttaaaacgtacctaataatatttctctaaaaagcgttttaaatagcactacttaataagccttaagtcattttggaagtaactgtcatggtcatgtccaaggaatgattaatacctaatttgcacattgttatataggcacagaagaatggctggcagccagcaataaataacgcgttggcaaagagcagtgagcaacttctgtgtgcaggataatgtgtctgctgctattgtgtacacagggtgagaaaggaccctaagcacagggacccaaaagggccagttaagttcagaaaatgggattaagcatttagaaattcttccagtaatatgatggtgccacagcatgctaaggcatttcctcaagctttccaaacgtgttagtgcacaatactgctgtggagtattcttgaaaaaacaaaacctgaaaacataatgtgaaaaaatataataccaatataaaagaaagtttgaggcagaagtgatgaccagtatatgggttttttttttcctttttcaagaaaagggcaaggtacagaattatttatgtattacacagcactctatgtaacgctggctgttgattccacatgcatgtgtgcatttgaaacaaaacacttggagaacccaaaattatttaactaaagagggaaccagaaatgaaagagtatgaggatatcagttttaattaagaaaggaagaagtgtgttagaaggagaagttttccttacagtgaggaagaagcccgtcattcactattttaaaggaagaaataaacctgggatccacagtggttccttttcattgctcctagttctatagttactcttaaacaatgtaaacatgaaagtattttaggaatagtaagaatccgcaaaatcaatcaaggggagcccaggctggaaccagaccatcaaagaggtgagtgcaggcatccagtctcaggagacaagcatgagacaatggctgctatttaccgaacacctactgtctatcactattgttctgacctgggctaatctcattggtgttttctggctgaacccttcatttcttaatgagcaaacctaattccacaggagacatttatttcaacatacaatccccaatttttgccaagttttcatcacattgtataattaaccattagttctcttaaatcaagtttacacaaaatgtcaagctatgaaacaaactctgataagtgtacctttattacgtttcaaaatagatttatattttaatcagaggagatgaattacttcctgtttctcggtgtgactgtaaatatgactccttgtaagccttgttcaggaaatgtagtaagggcgatagaaaatgattagaggaatagacttgttttcattacttaggacacattggttctacagttaaacatatagcaagcattagagggattttgtttttacaggctttcatctggctttgcccctaatgattccctgtttcaaggaatagtgtgcctggacaactcttgtttctaacaggtgcctcttttttatttcaaatatttttccacatgatacattttttaatacagtgctttctaagggccatgaaatttcatacaaaggaaagagaggtaattcccagcctctgatttgctttgaaatatgcctttttggagaccttaactgtgagatgctacaccagtgtatgtctcatcctggtaggttttggctcaagaaatgagaagtaggttgcctgcctcctttttgttactagaaaaagctaattgtagaatttatgaaaaaagttacaatttactttgcagtcctctgttgctgcctctctaccctctcacctatgacttagtttccttcagtacatgtattacaggactgaccagaggtttccaaactgtgtagaacaatggttattattagtattattttttctttgagacggaatcttgctttgtcaccaggctggagtgcagtggcgtgatatcggctcactgcaagctccacctcccgggttcaagtgattaccctgcctcagccttccaagtagctgggactacagcaacgtgccaccacgctgggctaattttttgtattttagtagagatggggtttcaccatgttggccaggatggtctctatctcctgaccttgtgatccacccacctcggcctcccaaagtgctgggattacaggtgtgagccactgtgcccagccagctattaatttttttaatttaaagacctctctttaacataaaaaatgtacttcagatcctcacattatgataatttaatattcgtgagagcatacataatgaaaatgttcttggatatttagtaataatgataaatgaatttggattttattagctatartggcatattcataaatgtgaatcatggtagtgccaataaactgttaagtgttacattgcagtgttcaatgaaaatatgcatttgtgaacccctctcaatatcattgcatactcccaaagtctggggattggtatagaatggattcctgataagtacttgcaacattttgattgacatttatattagtctgttttctcactgctgagaaagacataccagagacttggaagaaaaagaggtttaattggacttacagttccacatggctgggaaggcctcagaatcagggcaggaggtgaaaggcacttcttacatggcagcagcaggagaaaatgaggaagaagcaaaagcagaaaccaccgataaacccatcagatcttgtgagacttagtcactaccatgagaatagcatgggaaagaccggcccccattattcagttacctccctctgggtccctcccaccacatgtgggaattctgggagatacaattcaagttgagatttgggtggggacacaaccaaaccatatcagcatttttatacatattaccttatgtataaaatgtgttactgtatttggtccatgaattgtttagaagtataggatgttttcttgtttattttgttattgatttccaacttcatttcatacattgtggtccaagaatattaccagttgataccaattcttggaaatattctggtacagtatttgcttcatggtttaacaaatgatttatttttataaatcttccctatggacttgaaaaagatgggtgttctccaattgatgggtgccagattgtagatatatccattagatcaaacaactgtactattcaaattttctttgtacctacagaattttgtctactatatctattactgaaaaagtcatgtaaatattccactgtggaggtagatttctcagtttctccatgtagtctagtaattttttattttatatagtttgatcttatgctataagtgataaatgtttaaaagtatctgccatattttcctggtgaattgaaccgttttaaaattatgtattgactctatttttttttctttatttgtggtctatttctaaatattttcttttggtttattttgtatcacaaaatatcttagtatactctggtttgttttgtatcacaaaataaaccaaaaaataaagcttctggtagcagaagctttaagtatatacctactatgtattttccctctcaatctttcctcttccttatgttttaaatgcatttcttttaaacagcctatatctattttttgttttatttttacagtctgtaaatctttgtctcttcagttgagatttaaatccatgtgtatttattatattactgatayatttgtttttatttttaccatagtccttgtgcttcctacttatcttactttttttgtatttttttctcctttcttggtttcttttagatttgttcaggatccccccgacctgctgccgtgaactcgattctctttctcctatttgttaagaagttatgtactttatttctgttgcttcagtggctatcctagctgttttaagatgcatatttaaaattacctgtatgtttgcctatatataaataataaaagaatatttaagtggttaaactttgatcttcccctcacaactttttaaaatctagtatattgccattcctatgtgtgacaacttaatcattattgtttaatatgttagtacttatttagatttacccacttatttaatattttttgctcatcatttcttcctgcatctcaaaccttccattgggatctttttcttttgcctgaagtgcctctttcaacattttgtttatcaaaaaaactcttggtagaaaactctggttttgttttcttgaaaattaccttaatttgccctctgcaaacatgatttatcacagtacagaattttaagttgacagttattttatcagagtatactaagatattatttcattgtgttctggcatccattggtgctgccaaaaagtcagcaatttatttttttaaaataccgtttctcagcaggtgatctgtcttgtttttccacctatttttaagatctttacctttgtagttctgcagtttcacagtggtatggctaattgtgtatctctgtttatttttcctactttgaatgtattggacttcttatatctgaggtcttacaacattgctagaaagttctaagttagtatccattaaatactgcttctttcccattctgcttattactcttcctagtactcttattacatgttgtattagtctgttttcatgctgctgataaagacatacccgagactgggcaatttacagaagacagagatttattggacttacagttccatatggctggggaggcctcacattcatggtgcaaggtgaaaggcacgactcacgtggtggcagaccagagaagagcttgtgcagggaaactcctgtttttaaaactatcagatctcttgagacttattcactatcacaagaacagcacaggaaagtcctgcccccgtgattcagttacctcccaccagrtccctcccacaacatgtgggaattcacgatgagatttgggtggggacacagccaaaccatatcagatgtacacaggtgtacatctaattagcttttcattctcaccttcatatttcttaacctctttttaacgtttcagtgtctttgtctctatgtgctaattgaagataatatattcatatatatctgccaactcagtaattttctttatccatgtgcaatacacttgtgtaatgtatttgtcagatactttatttcatttcatttatagaagtttgatctcttttaagtctgttcctattcattgtttatgggccttttccccttgttcatgtcttcagacttgaattgctttaaatatattaaatataatttagttattaattaatatttaattattaataatttaaaataataattgtcagaattgatctgaccatttcaatatcaaaaatatactggttacttaactagtttttgttccttagtgtgttattaatgtattttcctgttagcagctcttttttctaggaactttatgagaattttttgagactttcattaatattaggtcctctaattgtgttggctcttgtgagttgcttggagtgtctctaacctgagaacctctttacgttatattcttcctttgaagttcttcagaccaaaaacctactatgaattgaggcatcaaagctattgatgtgaggaagaccttgtggttacagattcttaagagagatcttttttttttcctccacagagcatcaaggtagagacaggcaagtttcttagttgcctccattaccttatccatatactatatccataaactaagcatatggctctttggaaccctaccttacgagggagttttctgttatgtattgggggagagtggaatctgggctttttatgtcttatgccccgggcactgtgaaactatcagagttgaaattcacagtctccggagtttaatagtagcctaaaggtgaaattagttgttcaaatacctcctaagattctcatttcacctcatttagggactctgttttatccttcatttcatgcgagctggatgatgtgtttttaaatattttttcacattttatccaggatattttaattgagaggaacattcagggtagctaattcaccatgaaagctgcaagaaatagagcatatgttgttttatttcattctcccaccaaccatgttctgtacagaagaagagttaaatacggttgaaaatcgaacaattaatamtatttgaatgtaaaactaggtctcttgactcaaggctatggttttgttttttgttgtttcgttttcaaattctatattacaacctccttcttgtagaagccttgaagagataaatatattcatcctaacttgtagcactgattgtgttttataacgttagtgattattgttaagagtttggaactttcttattttaatttacatcctggccttgaggaggtagtatatgatacttcgggttcataaaatgaatattccaaaaattgtttcctgtgattattcttaggaatagaaacttagttgtgaaattattcctaatgacagcctgtccaaatccaactcaagtttttgaaatttctgcagtgcctttaattatgtgtgcatacatcacatttagtgctcggttttgggtcttactgggattttggggagaaatagaaggagttgttcgattcttatacagartatcttaaaggtaattcatttattttatgatagcttaaaagcaatctgaggcatgctatatatgggccattagaggacataatgtgcttactttaaactctgtatccagtgctaaaaattttaactttacctgttaatggaattataagcaattaacagtttcatcttcattattgatatgcagatcctgattrctgtgstacatctttcttcttgtgatcatagacaaaacaactttgaaagcatcttgatagggttgaataatatgttgttaatgaagctcacagttttttccattggttactataaaggcagtttcagttataacccataaagtttacagatgatattgataatttatccctrtgcaactttgcattttatgcagtcttttgcaatcatcataacctgtcttctagcctttatctgatcattttgatccattgtgtattctgctatcagattgacctctattacagtcatatttgatcatgtcacttccttacatcaaatcctactggataatgcacagactctttaccatagcactcctgccaaactgtgcttacctctgagtggtcaccttattttgcctctcaatatctagtttggcacagtcagttttccctagttcttgaaactgtctcatctggctctggcttagaatgacatatatacactgacaattcacagatatatatgttcagcctgactatgcttctgcattccaggctcatttattcaacattccaaatataacatgttttaaagaggagccttgtcttgtgttctctaatcccgtttcttccctcgccatccccatctcagctgtgtaagtcaaaaacttaggaaatgtctaagactctctttcttccataccccacacccaagcaagttcccattggctgtaccttcaaaacatgtctgccctctgctcagcctcatcatctccactgctgccaccctcatcaaagccaccatcatctctcacctgaatgtcttcagtgtcctcctcactggtctctgtgctctggctacagtcagttctcatcgcagccaaagagatcttcttaaaaatgtaaaccattgtcttctctcattgtaaccatccaggaaatctccaaaccctccactcgaaatccaagtgaaatcccaaggtcctttcctaatggcctataggaccatccatgatagcctctgctgtctctctgagctcatgctcctgcactttcccttccacatgctgttctctagtcatagtggcccatctttcttcacacacatgaagcacattctcttcttcctcagaagctgctctttcctcagatacttccatggctcatgccctcattttagtcagctgccttctcaaatgtcactgtttcaggttgcatctgatcaacttttataaaatcatcagtcagatgttgctgcattacagacaaccacaaaatcacagtgacatacaacagtgcgcatctccaggctgaggattgggactgggttgttgctttccttcmagcttcagaattgcctgactttagcttcttactgcagtctgtcctcctatctgctccacgtctttcattgttctgtccctggctcaatgaatgtctgagatattaagagagtgaagaaaggaatagataacagagattaagtggtatgagtcacttcacctacattcatctcatgtacagtgattgttgtaagaacctgaggtaattctgccatatcttctgtcttatttatacatgcacagatcagagaacaggcatgtgtttctcgggcctggtgaatggccgctgtgcacaagagctcccggggagaatgacgaaaatgcagtgctgctgtgagcctggccgctgctggggcatcggaaccattcctgaagcctgtcctgtcagaggttctggtacgtggctggctgttagtctcctcagcacagacastgttaggaaaattagtagcagtactgtattttgctctctgggagaccaaggcaggtggattgcttgagtccagaagttcaaaaccagcctgggcaacatggcgaaatcctgtctctacaaaaaatacaaaaattagccgggcatggtggtgcatgcctgtaatcccagatacttgtgggactgaggtgggagaatcacatgagcttgggctgtcgaggctacagccatccatgatcatgccactgcactccagcctgagtgacagagcgagaccctgtctcaaaaatatatgtatatattttgctcctgtccttgaagtcaagtcatatttgttttcctttgtgtgttttcagtatgacttgagtgtttttgtggggagtgtgatagcattgttatttaggatcagttttgataatatctaatttagtaacatcagacaaatacctgaaagctgtttgacttgtttttgtgcaagtgttgttttttaaattattttgaatgttagtatttcaattcagtttttaaacctcctgatctttcatccagagctcaaatatctatgaggaagaaaactctgtcttcatttatactttatttcaggaataccttcagcttataatgtctcagtccttgaagatatttcctctcttctcatgatcttgaaaattaatcatacaagagtatgatgatggctctcattaactacgctgtggtaactgccatataaatgatgctatattgggaaattagggttaatgagaagtagttcctcttgttacgtgtaatatgagtagtaaagtacaaattaatgtttctcacataaagatatattaatatattcaattctattatcattttctcattgaattaaaagcgtgtaaaataattaaagttttcaaatatacttacaaatatttatgccaatatgtactgttaacagaaaagatatcatgacacattaatcattcttacaaaatctctaagtcataaaataccaaaatctattagtaagacaaaaaggggcagaattaatgcctagtaaataattttggattctcccagttccactagtagtatataattaataattttttttccttctgatacagtgccttaagtctgcaaacagttaaggcaataaggcaattgctatcttcttgcttctctttactcaactttgtcacctggacaaaaaggagcagattttaaagcttacttgatattgtctaccgttaaaatccaagttagaaaaaaatatcattctggagcaatattaatacctaatctcctgaaaaaaaatggacaggaaaaatgtataggtataatgctgaagagaatgtaagtaaaaccatacagatagaatgaattagcataaagctttaacttttatctgtacaagtaaattttctgtatttataattatgtctggaattttatgagttgcacttaggtgcataaaataaaaatacacatgtaaatgattgtttatgcaactcagttaaaataatgtgacaatataggttttaaattttttctaaaacttctatatctttttcttgctactgccagcattaaaaacatgtattgagatagtaacctacttaatcatattgtgtagtataggtaacccaaagtgacttagtacagtgtaccaatggcttttgttatgcagaaagacattcacctgtgcttaatgccaactttcttttcttctagaggaatatcgcagactttgcatggatggacttccaatgggaggaattccagggagtgctggttccagacctggaggcactgggggaaatggctttgccccaagtggcaatggcaatggctatggcccaggagggacaggcttcatccccatccctggaggcaatggcttttctcctggcgttgggggagccggtgtgggggccgggggacagggacctatcatcactggactaagtaagtggtcagttttcctgtggactctttagtttcctgcctcaagtgacattrtaatatctaacataattttaatttttcaaaagggttgtatgaacacacttgcacatgtgtgtgtgtgtttgtgggtgcgagagagagagagacagagggaaaagtgtttcaaggtctgatacatagtaatactaaatttgggaaaatgtaataggaaaatattacttttatgttctgtaaactttctgttaaattagagaaaagaatgtgtgacccaggtcttcgcaaatacatatgagagcccagtaatactccaatccagttgacaccaccaaaaagcatgtttttggtttcaatgtatttcatttggctgtttaaagctgccctgttcatgcaccccttgaattattttccagaaccatttctccactgagataaactgaatatcttgctctgtgcagatccaaatattgtaacgtacatatctttcctttcctcacccttttttgttaaattgcttaagaaattgaaaaccgtgggcttcagaccagagttggcatttgtgtgcttgacatttaacttcattctttttaaaagccctctcttgctaataatatttaaagatgtcctacagtgttatgtttattctttttggcatattgccgatttactatatctgaatattcagcagagttacaaaggagaaacggaaagcactcaaacgtatggtagaacattcctgtaattttaaaaagacatgattaagggcagcattttcagatctgtaacttaacagatacaagttgcaaccatgtgtctcagtaatattttttagattctccacattaaagttttaataaaatataaaatatgagcttctgatatacatctaattaatttactattaaatgtcctttaaaaatcaattcagaaaagtaatgcatgttgtaatgattaaatataattgtgctttaattttcygtagcaattctgaaccagacaatagatatctgtaagcatcatgctaacctttgtttaaatggacgctgtataccaactgtctcaagctaccgatgtgaatgcaacatgggttataagcaggatgcaaatgsagattgtataggtaagtttgtgattctttaataatccttcttagtttttttagtagctattagattacaggatcaaattggaatgaatatgatttttttaagtcttttgaaatacagctaatttccaaactgtctcttctgtgtgtatgctattcagtgtgcccccttaacctatgctgagctagatcactttaagaatttcctaccctttcaagtcctaaatattgtgatttctgtctctgactctccctttccattctccttagaaatgcttactcttaatataaactaaaaataaaaaggaatctatgtaacaatgaatatattttaaaaacaattcgtcaagcatgaatccatctttaaaagatgacaagacaccaatggactaaaatctgatatgtcagggcagtagttttcaaatatgtcggtctcagactcatttcaactcttaaaatcattggttatctctactttgataattacctaattagaaattaaagatgaaaatattaagacatttattgatttattcaaaaataacaacaatgaatccattgcatgttgacataagtaacatttttatgaaaaactacatttttgaaaacaatgtgtggaaacaagtgtcgttgttttacatttttgcaaacctttttaatgtctgccttaatagaagccagctggattctcatagctgcttctctatttaaggtttggtgatgttttgttttgttttgttctgttttgttgaggaatgaaaatctatcctcaagcagatacatagatggaaaagaagaggaatattgcatagactttcagataattgaggttattctttgatattccaccaaaacttacaaggagtaattcttaaagtttagttaaccatgtagaatctgaaaccatattagtacactttttgtactctgttacataaagtccattggtttgtctaatgctttgagtggattttgtaacatgcattggtcatttgaaatatattgatgcactgtattatgcacatctttccaaagttgaaatattttactatgtactatcaaaaaatcatatttgagaatatcaccatcaaactcataaaaatgccttcaaattgctgagaaacaatcaagcatacagtgttaaataatctttctgaattctgtcatttttaagcttgaatgttaacattagcatcaaatatacagtctgttccttttcttaaagtgacaggctcactgcattattttcaagaaaatgtctgccagattaataactctgaataactataatttgtcagtcattcttcaagtaaaaatagtattctgcagaaaaagctgctaatggagtgcacaactcaaaacaactacgcagaaacttttccttgagacaggcactcgtggtgcttcagtcagcaacaatgtgtaatgtacattttgtcacagaagtattttaaaaatgtatattcaagggccaagattattattaattttgtggcttcaccaattatattcttaagtgaaaatgtctttttcaaataccctgtgagttcattgtattgactggtaggacagtttggtgccattgccttaacctgtgctaagcaactatcattgctcttgtgccatcagagaaaatgttaacatgattaaaaaaaaaaagtaaatagcatcttaatatgattgtgaaaatagttttgaatcaaactcactctgaaaggatctcaatggtctcccagaggccacaccttgagaacagctgctataaagagtccccaactttcttgtaggtcatatacaaaaagtttaacagtgagagagttagtagtggtagacttgaaagttttcattccttaaatgccatttaaattgatttgtgctcagtaactgtgatctgtatgctagcaacgtggtgaaagaagagaccatcaggaatatccaatctagcagcaggatctgcagtagttaggggttacattagtgtctgtgaaggataagggatttccgcatggagttaaaaaaaaaactccatagagaaaggccaagatggctcagtagacacagccaggaagagcatttcctactgaaagatcagaccatcaagaagactggcacactctgagaggatcttcagaaggaaggcattaagaatgtatggaaggagcacacagaccctggactgaagtaggaggaagctgggaagccttcatggggctgccaagtgccaggacttgttcctgaccctgagaagtgaattaartrgttgaggagtggcccactctttgcaggggtctctggaatcctacctgcagaagatcttacaacctccatggacatttgagacatgggagagctgcttggatagggggcagggacaggactccagcctgtgcagagcccagagggtttggcaccagagtggctacgatgcccataccccagggcttgacatcctcctttagggggctttggccttggttgactgttggacctggacagagcagagcagtcttgcccatgggacaaggccagtctgatctgagtgtcccccatctgccggcctctgccagtgtccctgcatggctgtgtccacttggagcacagcctcagatgcccatctggggctcttcccaggtgtcaccaccatagctcctttgccagcaaaccctgcctaaccattggagaacttcagcagatgggcctctgccagcattctcccacctgcagcctctccccacaactttgctggcatgcacttgcccacagccttcccccattgctctgctggcacacatgcacataggcctcatcaccccatcaccactggcatgttcttaagaagcaaactgatctgatagagctgaaaaactcactacaagaatttcataatacaatcagaaatattaacagcaaaatagttcaaggtgaggaaagaatctcagagctcaaagactgttctttaaatcaactcagtcagatgaaaataaaaaataattagaaagattgaacaaaacccctgagaaatatgagattatgtgaagaaaccaaacttacaactcattggcatccctgaaacagaggtagaaagagcaagcaacttggaaaacatatttgaagatattgcccacgaaaaattatccaaccttgctagagaaggcaatattcaaattcaggaagtcyggagtacccctgtgaaatactgtacaagatgacaaacttcaagacatacaatcatcagattctccaaggttaacaagaaataaaaaaattttaaaggcaactaaagagaaggagcaggtcacctacaaaaggaaccccatcaggataacagtggacctttcagcaggaaccctacaagccagaagagtttgggtgcctatattcagcattcttaaagaaaagaaatcccaaccaagaattttatattcagccaaacaagcttcatacgtgaaggggaaataaaatatttttcagacaagcaaatgctgaaggaatttgccaccagacctgccttaccaagaggtccttgagggagtgttaaacatagaaatgaaagactgttaccagccaccacaaaaacaaacttaagtacatagaccattgacactgtaaagcaactacacaattaaatctgtawaacaacctcctaaatgcaatggcaggatcaaatcagcacataccaatattatccttgaaaatgaacgggctaaatgccccactgaaaaggcacagggtggcaagatagataaagaaataagattcaactatatgctgtcttcaagagacccatctcacatgcagtgacatccatagactcaaagtaaatggatagataaaaagctaccaagcaaatggaaaacaaaaacagtgggagttgctattctaatttaagacaaaacagactttaaaccaacaatgatcaaaaaagacaaagaaggccattacataataataaaggttcagtgcaacaaaagatttccctatcctaaacatacatgcacccaacactggagcatccagattcataaaacaagtttttagagacctacaaagagttgtagataacaacacaataatagtgagaggctttaacaccccactgacagtattagacagatcatcaaggcaggaaactaacaaagatattcaagacttaaattcaacacttggccaaatggactcaacagatatctacagaacagtccacccaacaacaacaaaatatacattcttctcatctgtaacatagcacatactctagattaaccacacacttggcaataaacaattcttagtatattcaagaaaaatgaaattataccaaccacactctcagaccacagcataataaaattttaataactaataaaagcaaagatacaacataacagaatctgtaggacacagctaaagcagtgttaagagtaaagtttatagcactaaaatcccacatcaaaaagttagaaaggtctcaaattaacaacatcacacctggaggaactaaaaaaataagagcaaaccaaccccaaagctaacagaagaaaagaaataaccaaattcagagctgaaccgaatgaagttgagatgtgaaaaaacattcaaaacatcaacgaaacctaaagttgggtctttgagagaatacataagattgatagcctgctatctagactaataaagaataaaagagagaagacggaaataaacacaaactgaaatgataaaggagacattaccaacaaccccaaagaaatacagaaatcctgagacacctctatgcacacaaactagaaaaccttaaaaatacctctgtgcacacaaactagaaaacttagaagaaatcataaattcctggaaacataacatctcccaagattgagccaggaagaaattgaatycctgaacagaccaaaaatgagttmtgaaattgaatctgtaatgaaaagcctaccaaccagaaaaagcatgggaccagaaggattcacagacaaattccrccagatgtataaagaagagctggtttcattcctattgaaactattccaaaaatttgaagaggaggaactccttcctaactcattctatgaagcctgaattattcttataccaacacctggcagagatacaataaaaaaggagaaaactttaggccaatatccttgacgaacatagatgtaaaagtcctcaacaaaatgctagaaaactgaatccagcagcacatcaaaaagctaattcatcgcaatcaagtaagctttatccctaggatgcaaggtgagttcagcatatgcaaatcaataaatgtattttattagagattttatctctgatttctttcagagacaaagaaatcagagacaacacaaacaaatggaaaaacattccatgctcatagataggaagaatcgacattattaaaatgaccatagtgctcaaagcaatttacagattctagctattcctatcaaagtatcaacattatttacagaattagaaaaaaacctattttaaaattcatgtggaaccaaaaaaatggcctgaatagccaaagcaatcctaagcaaaaagaacgaagctrgaggcatcacactacctgactttaaactatactacaaggcaacagctaccaaaacagtacagtactggtacaaaaacagggatatagaccaatggaacaggttagagaacctagaaataaagccacacacctacaaccatttgatctctgacaaagtcaacaaaaacaagcaacaaagaaagggctccctattcgataaatgatgctgcaatagctggctagtcatatgcagaagattcaaactgaatcccttcttttcatcatatacaaaaattaactcaagattgattaaagacttaaatataaaacctaaaactataaaaactctagacgaaaacctaggaaatgccattttggacataggctctggcaaagattttatgacaatgattccaaaagcaattgcaacaaaaacaaaaattgacaaatgagacccaattaaactaaagagcttctgcacatcaaaagaaagtatcagagtaaacaacctacagagtaggagaaaatatttgcaaactacacctctgacagtggtctaatatccagaatctataagtaacttaacaagcaaaaaaaaaatctcattaaataatgggtaaaggacatragcagacacttctctaaagaagacatacatgcagacaaaaagcatatgaaaaaatgctcagcaccacctctcattagagaaatgtaaatgaaaaccacaatgagataccatattataccagtcaaaatggctgttattaaaaagtagatgctggtaaggttgtgaagaaaggaatgcttatccactgctggtgggggtgtaaattagctcagccactgtggaaagcagtttggagatttctcaaataatttaaaacagagctaccattcgacccagcaatactgggtatacacccaaaggaatataaaatgttctaccgtaaagacacatgtacacatattttcatcacagcactgttcacaatataaagaygtggaaacagcctaaatgcccatcagtggtggactgagtaaagaaaatgtggtacatagacaccatggaatactatgtagccataagaaaaagaatgagaccatgtgctttgcaacaacatggatggagctggaggccattgtcctaaatgaattaacacagacacagaaaaccaaataccatatgttctcatttgtaagtggtagctaaacattcagtacatgtgaacacaagggaacaagagacactagggcctacttgagagtggaaggtgggaggagggtgaggatcgaaaagctacctatcaggcactaggcttattacatgggtgatgaaataatctttacaacaaacccctgtgacatgcaattttcccatgtaataaacctgcacttgtactccctgaatgtaaaataaaagttggaaagaaaaatatatgtgtatatgtaaaacatatctttctccatgtctgagttctgagccaattgagggatagccaaagaacccatttcatatggagttctaaaaattttgagaattaaagttgtttgtactgtctaggctccctatttgtgcttgcttagttcaaagtcttaaagaagttggtcatgatcctaagatgtactccatgtttgcacatactagtcaaagctgggattaatactcccagctttgggcccatgtctgaaaaaatccaactataatttcatctagagccttggttttcccaagtagatttttggtccccaggtgccacttgaatattttctccagttttcccagcccatgtaccctgtgttgaagaatagaggcattctaagcacttatttctaaaagacaaggaggaaaatgaagctcttaaagatatgctgtaaaacagccacagagttcacaacaccttatatcatargtgttcatgactcctaaaagtctgtaagcccaagaagacaagaccatatctttttcttagttaatcatgatggaagtattgtgcagatttttaaactagctttattgtggtttaattgacatacaataagttgtatatatttgaagtatatagcttgataagttttgatatgtgtataccaataaactcatgacgacaatcagataatgaacatatccatcaccctcataaggcttacttttgtcccttgtaatctctccatcttgctcctcctttcatccatccccagcccccatcctgtccccaggcaatccctgattagtcactgtacattactttgcatcgtgtagaattttatataaatgaaatcatactgttacatatatgacttttgtctgatttcttttactcagcataattattctgtgattcttctgtgttgtggtgggaaaaatcatttatttctttttgttgtggaataatattttattgtatggatatagcacagtttatttatatattcccaagttgatgggcacttattttgtttccagtttctgtgtatcacaaataaagctcttatgaacattcatggacaagtgtttgtataagcattttagttttgagtatatacctaggcgtggagtggctggattgtgtgagaagaatatatttaattatttaagaaactgccaaaatgtgctattttacatttctagcagcagtgtatgagagtatcagttactccataaccaagccagcrcttcgtatagtcaggtttttacactttagccattgtaataggtaggcagggatttctcattgtggttttaatttacatttctctaatgattcacataaaaagatgttgaccatcttttcatgagtttatttgatctgacacttctttggtaaagggtcagttcaaatcttggtccattttaaaattattttcttattgagttttgagggttctttgtttactctggatataagtccttatcaaatatatgatttacacatgttttctcctagcctgtggcttgccttttcttcttgtaacatatcttttgaagtgctgtaatttttaattccgacgaagctttatttattaaatttgttgttttatggatcacgcttttgatgttgtgtctaggaaatctttgccaaatgtaaggtcacaagggttttcttcagtttttgcttctagaagttatctagctttaggcctatgatccattttgaattcattttttttaatattgtatgaagtttattttttgtagtatattaataaccatcaccctttgttgaaaagagtgtcttctctctattgaattgcctttgcaccttgttgaaaatcatttgctcgtatatattgggtctgtttctggactctcagctctgactcacctacttaggggcttgctgcatcctgccagtgttccccctgtctgcatcgtggtctgaaaaccctcttaaagcaataagctgaaatagttatgatattcactgtgtttgttttccttctcttagggatctatattctttgttgcctgatgtcaagtttcttgaaaaccatgatttcttatactttgtccatttgtttgtgttttgaggaaggagggtaaatctgtcttggctgggaacagaagtgtcccctattttcttagtgcaaagattgtggaatgaaaaaaatgggaacaaaaacgccagctagtaaatttttatataagtctaggcaagaaattatgacaatagtgatgtaggactgcagaaaaacttaatgattcaacaagtgcttgggaggttaatcgatagaatctgatgacagattagttgtggggagtcaaagagtagaaaactacaatgatacacaagtttctggctgagcaaaactggacatatagtggtggtgttaacatgtataagaaggtgcagattgggaggaaatagttgttgagtctttcttggacatgctgagttttaggtgtctagggtatttaattatagagctctaatgctaagaggaatgtccggggtagagttacagatttaggagtcaacaacacacaggtggctcttagaaccatgaggatgaatactgtgtcccaagctgaacaacaggacaagtgaaaagataacaggaatactacagctggaatcttatggaacagacacatcgaaggcccttagtctagctcaactcagacgcacctcgttctagctcatagtgttagagagatagcaaaataatatggagaattatgttcctgaagttagggaagggcacactttcaagagaaaagtagtgttaggtgttaaatgcagtagaaaaatcaaaggcagtgaggaaaaacatctgttggatttggtaattggggggttttattaactttgaagagtggttttaggatggtaattgagtcattttgaggttattttatttattcataatattaacacacatrtgtttcattaactagcttaaccctaaataacagatttgagttcaggtcttccattaaacagtatagatgagaggccaggtatagagagagttagcatcataattttgccaaaaatgtcttaggtccactatgattataaaagaaaatgtgggccaaatatgatgttttggaaaaaacaatcattctaaactaggtacagggctacaagatcagagttattaaattaggcttagctcaaattttgtctgtacaaacctaaagggtatcattcaaagagtctatataagtggtatgccctagggttgtacactatataaccatatgcagcctacctagcttagctgataccacctggtgcttctttaagtgatagatatacctcatcatttagccctgcaaagttaaagccccagcagcaggcttgtctttctgactactgtaattcatagagacttagcttagtaatggagcacattttcagaaaatgagttttaatatttttaatcctatactctaattcaatttttgatcactttgaatttataaacaacaaattgaatttataaacaacacatcagaaaaagtgaagaggatattaattaactagtgctttaaattataagagcccaagataacactagtaactatgtcagctgcgctaatgttttgaggaataacaaactgccattgctgtttgggaacttttatgagatacctaatgaagcagtataacttgaaaggcaatagatttattaaaggatcagtgacaaagaaaatagaattgggtctattttgctattatgagaattgctcctgatgcctgaaaacagttatatttacccattatatttttctctttttcttgagaattctactctaaaattaaaatttgtaactctcctagtgtctgtataagtcaaactgctgttagcaatgtttttaattcaagtcactctattttggagtagtaaaaaataatttaaatttctattgggctacaggtaatcctcgagcccttgcaaacaaaaaacaaagccttttctaagttggcatataaagtatttttcaagggaaaatatttcttagctatatagtagtatttgagaaattaacaattttgataatcaacattctccataattttaaaatttattttaggaggttaaatcccatgaattttgcttaaaaatacccatccccccaatgaaaacatactaagaagtcaaaatgtacagaacgtagtatttaagtactttctgttcctgtaaacaagacaaaacgaacatggtctcttggaggtccaggactgtgagmctcagaataaagaggagacagaagtgttcatgtagaagttggcagtggtcgtttgtgaytagtctaaaactgaaaatcccagaaaacaaacgaaaaacaacaaatgggttttaaagtcatatggaattgtaaagtcactaattgcttttttggtgattgttttgaccaaaattaagtgaacgattacatcttctctgtgtactagacccttgatgagtccctgaggggctcaggagacagaagtgaattrtggttgtagtggcaaaatagctgacagagctgccatagtaacaaggagccttaggagcagactctccaggggagaaaacagtcctgcagaagtggctttcctgaaactttacctaaagagaggggagtggatgcgtggtttctcatgttcttcaaacagagctttatgttgaggctgctgtaaagataacagctacaacacatttttaattgttgcatttcaattatgtaacacaaaattgaagtgatcttcaacactgcgaactgaaggtsgtatttcrtattggaaagtctatttattatactttatatgcttgctaatgctctctctcttttctcattttgcttcgttcctttggctcagtagaattgatggtatcaactaaaactttaaatgtaagtgagtctttatgggctgaaggggtccttggatggatggaaaaggatttagtcctgttattctttgttgtttttattttatttgctatgaagtttatttcctttaccagaaggggcttaattgcattcagtctgagtgtttacataaatgaagttggtgggtttgatacagtacagttcctcttttaagaacatctgtgaaagtaggaatctgcttattaaaatggtaaacctgtgaactgattttattgttatgttctccaatttagctgaaatggtatatgttaatggcttctacacatatatgaaatggcaaatcattatgccctctaccaactagccaggtttttaatttgcaaggattgaaaataatatttagtgggcattgctgagagaagatgaattaaacttcttatactggcacacgtgatttctctgggatttaactagtccagactgttcagtctgtcatttggtttttcagcccctgaatcctgcaatgggtttgcatttaattaggctttaggagaccttgaatggaaagcatgactttctcactttttggtcacgactagtatttgcataaaacttcattttatgcaacaaatcactgtgccaattttaagatcctaaagaaacttgaaactgctgaaaaaaataggctttgtttaaatgttttcattttctactccctcatgtttttttacttcaaaatattatccaagctttagtgtatatatagttgtatacatagatgagttcaccaaaaaaaagttataccaaagacattccataatccatcaatctctttctttaaaactaatagcagtgacaacatgtaacataaatatatatcttcagaatcctttcattgttcttctggcactttactaagccttagagaggttattaacttgcccacattggtgtaagcaataagcattatagcctatttctcttttcagggcacatgcttttaatcattggccattattccaactgaaaaatctttaattcttgattaaagcaaattcccatggtactctctaaaaggtgatatttttgtaaatcctcaaactggcctctgagtgtatttgaagagaggaattttcattcatttataaatacttcgctatttagactattaccactgactggccttctctcaaactttagaggactaaatgtactttaaacaaacatttctacaaatggagtgaagtctataatggtttcttttgctgctcacagatgttgatgaatgcacatcaaatccctgcactaatggagattgtgttaacacacctggttcctattattgtaaatgtcatgctggattccagaggactcctaccaagcaagcatgcattggtaaggcagtttgctttcacatatgaaaatgttccatgaaatatagtgaccaargctgttgaggttaaaagtaaatttattaaaacatggaataaaataagtgttacattattacagatttatttgtaataccctcagagattctcctttaaacataaacaatgtttgcatatataacccaggcaacatggtatctgttttcacaaaaattcagtttatcttccttccttagatcagagcttcctttctccagataacatcagtaaccttctctgattaactgagtttaagatttatagtcattttaaactactgttttctttgaatcccacacatagtccaacaccaagtcatgcctggtctttattcacagcttcagtgctacacccaccaccctggtccaaacgcgctacctcattgctgattcatctcagaattcttttascagatgactgcctgtcttctttttcatttcctattcatccacaggtagttgcttgaatcaactttccagcagttttcattgtgttactcttaatctagaaattctgtagttactttacacttatccaacatcttgttctgacttttaaggccttcatccactatgtgaaaaacagctgcaaccagtaattccagctgtcttgcccaccctttcttaggtttactggataccctctttttttttttcctttcccacttcagctactataagagctgtaaaattgcttgcacctacctatccaaaaaaaaaaaaaaaaactgctgagagacagaaattttgctaaagaagtaacatgattttgaatatttaaaattccatttcttatcttactgtgtttatctataagtattgtaaaagaatgatgtttggccattctcaatcttcctagatattgatgagtgcatccagaatggggttctttgtaaaaacggtcgatgcgtgaacacagatggaagtttccagtgcatttgcaatgccggctttgaattaactacagatggaaaaaactgtgttggtatggaaattgcctgctcccttgcaaaagattttaaaaggatatacatttttatttagaaccatgtactatttccatgaaagctcacacaccacgtatgtgagatcttcaggtaacttaggtaaaatgcaaatgcatttaatataagactgttaaagcaaaaggacaggttttttgtttgttttttggttttttttttttggtggtggaggggaggagatgttataacagtgaataatttactgcttctaaaaatttcctgtgtgttacaagttaaattgtaagtcgcagttattcttcataagtttaaacaattactgaccgctactgtatttcaggtgttggggttacaacactgacaaaatagaaaaggtcttcccttcctccacaaactggaggaatataaaaatgtttgacatatgcagtacacaaatctctaaaactgtggcttgtgatatctagcagtgcaatggataccaacacaccacagaaatattgtttacaargtaacacatcatattcatctactaatgaaagtccagatcatttcatttgcagtgaggtctgccattgccttattttcttataaaataaacactcattgaaattatattatctttttggtacacaaagtaacactactcatggtttatgtggttttaacaggagctaagcacaaaatttgattattttcctttatatccatatactgaaggtcctttccactctccgcactattttttctcattcagttggcrttctttttttaaaaaaaactaaaagccatgagcacatggctcatttaggtagtggaatttgactgggggttgtttatggaagaagaaggaattggttccctcaaggccagtgttcaaagtcactcaatcctcttctgcagatcatgatgaatgtacaactaccaacatgtgtttgaatggaatgtgcatcaatgaagatggcagcttcaagtgcatctgcaaaccaggatttgtcttggctccaaatgggcgttactgtactggtatgtgtggctttcagataggaaagtgaccatgattgaaaccaccttttttatttgaatgaaccatggaagaattacttcagcttccccatgtggctttcatattattcacatttcttgctaattcactaaggcaggtgtctaaagctttctagaaaaacacacattgtggtctagggaacagtcatatcttaacaaaaataataatggtataggaaaaattaaggaactgacagattggttttagcaagtcttgtggaaaacaacgtagaaataatttctctcaactgcttggctgaataaaaaagaagaagaaaaaatcttgaaaggtttttgttttttatgcattctcagaactagattttccrctgtcattcattatgggtttagcattacatcttttccataaagctaatatacagaccatttgtaactgtgtcattatctaaaaaccttacattgatttagtgaagacataattttaatatttcaattaattattttgtttacaaagccattttgaagaccaagctctaatgataaccttaataagctaaagttatacctcttggaaataaatgagaccttattatgtttgtactcacaattggaatttaataaagtggaataatacattttgcagcttctacttagaagcacatttttccttttcttttttaaatttatttatttttgagataggtttttgctctgtcacctaggctggagtgtagtggcacaatctcagctcactgcacccttgactcctgggctcaagcatcctcccacatcagcctcccaagtagctgggagtacatgcatgtgcccccatgcccagctaattttgttttattttttgtggaaatgaggtctcactatgttgctcaggctggtctcaaactcatgggctcaagcaatcctcctgcctcagcctcccaaagttctgggattacaggcatgagccatcgcacctggccaaatttttgtttttctttgtttccttccttaagacaaaattaactccatcaatgatgttctgccttcaattgcacaaacttaatctaagtaccagataaggatcatgctcaattcttataatttcaatgaattacaatgaaattctagggacagtagagrttaaaaaattgagactgaattcttatgtttctgagtaagaaacaaatttttgactctccaagaaggaggagtactgtagttttgctggttgaactcatgactgggatgtcatctcagggttagctgatttagatttaacacaggataggaaattgtcattatgcttcagtgtgtagaattatgttacagtatgtgactttatttcagcctttttaaagaaacttcaatatacatctaaagatgacttcgacctcaccagtttctgctttctggaaattagttcttattaattatttaattacaaatgttgtgaagattttaagtattcctgagtcggcagctctgtgtttgaagtctctttcatcttttggggaagtcatttaatgctgggttacgtttgataaattcaagtggattgaaaattagaagacatacctcaagttattttgttattatcaaatgaccaaatgaatatcagcatagcatctacttctagttaaagtgtctttgtgtgaaaaaaattacagaaatttaccttaatttttaaagaatttgttttacttaactaatttgaattatttagcgttaaatgggattgtcaaataaataatgaaaaagaagattgtgaggcttttttttcctcagtaggtaaagtaaagcattctgaaatgtgttgaaaggattgcatttgtatatgatacctgttaccacacttatttgttcttcacaaattataaagttataaacaaaaggttagtagtatagagcagtggctgcaagtaaaccctgtaataacrttaaatttacccagtaactgcttggcttctgtcacccactgcacagatgttgatgaatgccagaccccaggaatctgcatgaatgggcactgcatcaacagtgaagggtccttccgctgtgactgtcccccaggcctggctgtgggcatggatggacgtgtgtgtgttggtaagtgaaacattttataatggccccactgtgcaaaatgatctttgaaaaactgacagagatatttctatacagtggagtaatattcaccataagaagagtacatgctaaaacatggataaaccttggaaagattatgctaagtgaaagaagccagtcacaaaacaccatacagtgtatgattccatccatatgaaatctccagaatcggcaagtccgttgtgacaaagtagattcgtgttaggacagagaggatgggggtggtgggagaatggggtgggagctaaaagatatttttgaggtgattaaaatgttctaaaatcatctgtagtgatggatgaacacatctgtaaatatgctaaaaactataaaattgtacactttaaagtgatggattctatggtatgtaaattgtatattaacaaagctattttttaatggacaggaacccccagatagcccccttcagaacctacagaaggctctgatgacatgctggagaagaaaaaatatatttttaaactagcatacttgataatattagataactgaatcctaaacacagtgcatttcagttttataattaataacaaataagatatgtaatggggattatagttataggtaagtaaacttggtttcaccctaacaaaacttaaaatataaatattggacttgcatcaaaagctcaaaatgttactcctcatcaccatgcaactagctgcagaagcaagagtataaagaagtatgagcaagaatatatattttattctaagccattcagattcctctaggttatttttgtcaaattgatcccatgaaaatcaatcagaagtaccaggcccagctttgaagaggcaggcaaaacagaagcgtcactggcgtttgggaaccccagcaatatattccagtgataaggatagcagaatgagtggtaaaaatacatttaatgcagttttctctccaaaaatgttttcatgaggcttctagggtgaattagccattgtataccctctatttttcatgttgtacagtaaaacacagaaataggatttcaaagtatatttgagagataccatattcttagacatagttaatactttactcctacctatgagaatcaaaacatatggatcccaaaggtggaggagaagaagtagagaatttgcagatggaaataatctgttcactcaaatttatccactctatccagtcaaagatttatttcaccctacaaagttgtcagcactttgttcagggatatttcaaatacagcagctagaagaatataacttcttcctgcttacagagctaaaatattttcagttgctttaatatatttacttgcttttttcctttacctaaatgattctgttgaaatctaccatgagcacaaagccagttttggagggagaaattatttttctcttaagtaaccaacatgcgagttgttgctaggaattcagtaaaacataaaatttcattatcttgttcacaatccaggaaacacattggaaattttcagaaagcctccttcagtttttcatcattgtggtcatttaaactttttaaaataaaaacattatttctcatgtgtataaaattatatattactgtttctataacatgctagatgttttcttcatgtcttttgacttgatgtcactttttagacccattgattctttaagtttgagatgaggcctggcgcagtggctcatgcctgtaatcccaacactttgggattccatgttgggcggatcactggagcccaggagttcaagaccagtctggccatcatggtaaaaccctatctctgcaaaaagtacaaaaattagccaagtgtagtggtgcatgcctataatcccagcactttgggattccgagtagggcagattgcttgagctcaggagttcaaaaccagtctgggctccatggtgaaatcctgtgtctgcaaaaaatacaaaaattagccaggcatggtggcatgtgcctataattccagctacttgggaggctgaggcaggaggattgcctgagccctggaggtggaggttacagtgagctatgattgcaccactgcactccagcctaggtgacagagtgagaccctgtctcaaaaaaaatagaaaaaataaatgaatcactgttatgaaaaactattaggataagcattttaattttagatctattttttgtttgttcatttttcttctgtagatattaagatgtgtttttgttttttgttttagtctcaggtaattaagctatgattttaagtagtatattgaaatacaactcacaagcaaggttgtaaacaaaaggcaatcatatctttatctttcccattcattcaaaatttatttttaagtttattcagtgatgcagtttagtaagtaaggaagaaaagtcaggcaacatgataactactgaatattcttaagtgacaaaaaattataagatgacagcaagatacaggacctctctgttcctcctttcctcttttgttgttttgagaattaaataaagctttgaatggtgtctagcacatagcaaatgcgcaataagttaactactactgatattattgttattaaattagaatagtggtatcatatctaggtcatagtcttaagagttgctgctttaagttataaataaaagttgattttaaagaaagaagaataaaataaagttagcattttgcatacatacatattttactcatggtatgtagaatctgctaattacctgaagaaatttttaaatcttttcattttttaagaaagaaaaggggacaggcatggtggctcacacctgtaatcccaacactttgggaggccaaggcaggtggatcacctgaagtcagcagtttgagaccagcctggtcaacatggttaaaccccatctctactaaaaatacaaaattagccggttgtagtggtgtgcacctgtaatcccagctactcaggaggctgaggcaggagaatcacttgaacccaggagctggaggttgtagtgagtcaagatcatgccacgccattgcactccagcctgggcgacagagcgagactccatctcaaaaaaaaacagaaggaaggaaggaaggaaggaaggatggagggagggagggagggaagaaaggaaggaaaggaaggaaggaaggaaggagaaaaagagaaagaaaagaaagaaaaagagagagaaagaaggagagaaaaggcatgcagaagtctgctaacatayggaaaagatgcatttaggtccagtctgtcaccagatcattcatgtgagcatattctcatggtgctaccggtattgttccttttatcctatcctgtatacagtggttctgttatatttgaatagtataatatgagctaggttgccaatttggggtctttgaacaggaaaaggtcagtagggaaatagtgagttatctcaactgatagttcacagtatcagttacagatagaactccttgttctacttttcctcccttctcactgctgcastttactagtcttagaaaaaaaaatagaagagggaaataaggtggtcaccattttttttagtatttcaggtgtgtcctaggcagtgtgcttagtgcttaacaaatatactttcatttactatacaaactgtatccttatttaatgaataaggaagatgttaagtaatttatgtaagatcatcttgtggggatctgaactttgggaagtttatgtccgtaaaacctacacataagttatgctactttctttttcatgaaacttctggtgttgggtactctaaagagattggttcacctgtaatgcaaactaccatataacatgtctcactcttccagtgagctccataggccttttatctgcttgcttttaaaaattctgcatggcatatgctctaaacccaaaagcagaaataactttggctgttcatagatgccttccaagatcatcagtaatgtccaaagaactcacaaaaatcatattggaaatgatgaaccatgttatatttgtgcaaatttgccttcaagtcaaatctgtgtttgtgtaactcagaagatacactgccaaactcagccacagcagaggcagcacaagtttctctgagttgactcctcagggatggggttggtgaattccatggcctccttccatttaagcacacacgtatctcatttttaatgcagccataaatcactgttttaatcagaaatgcccccaggtcataagaaattattggatggccattttgcataacaagcagatraaattttttccaacaagttgtgaatagttacagatatttataatagaggttatctctggaggtatactggagtataccaggtcagtatactgcttaaaaattgcatgggttctctgccctttatgatctgagttttttatagttcaccatttactgtcttataaagttgtagggtattttatgagaattaagagtgagagaactaagcagaatatgcttctttggggtatagcattacttactagaaagaggaagagttttagaagtcacataaaccttgtctgaaccccaactcaggcactggatattcaaggacttcaaactacataggtagctgtgaacctcatcttcctcatctataaaatgcacgtaatgaccactcctatagagctgttgacctgactgttcaatgagataatgtctgtaaagcaacgagcacaatgccaagagcacatatggtagttaactatttttataactggatttactgagtttctgaggttaaaacagtcacaagcagtatcctgggggttgaaaagaaaggcctcctaactcggaaagtgggagtaagaaatctcacgcccaagccagtatcacctcaaggtagtttaacttgattgcacttcattgttcatgagaacttccaaaattgaaataagaagtgtcattttgaatatagcatagccagtgattagagctccaagtattctttataactgtggaaatatcctaggtttcacaaaaggtttgtaagaatacatcggacaatggatactgtgtagctcataaaacttrttaaagaaaacagagtcggtgatatgcatccattcttttcctcactcagaaaacatttgttgatttcctaacactattagatgctaaagatgcaaaataaaagtctcagatgcccttgaaaagcttccagtctagtggccacttaggttaaaagaagccttctgtttcgaaatctctttgtctctatcactgcctcaagtcattgtttttgtatctcctttagatactcacatgcgcagtacctgctatggaggaatcaagaaaggagtgtgtgtgcgtcctttccccggtgcagtgaccaagtccgaatgctgctgtgccaatccagactatggttttggagaaccctgccagccatgccctgcaaaaaattcaggtagtcacatgtgccattttcacagttgataaagaatcaagaaatacaaccttagatgtttggccaaagagaacatcagctcttaagtgtttcatcattaattttaactgaagaagagaaatccaatcctgtattgatatgtgaggcatataataaggagatttggcttgtgtttatatacgatttctaggccaacagaacacacagtgaataaaaaaatctatttgctggctgattgtggtggctcacacctgtaatcccagcactttgggaggctcaggcaggaggatcacttgaagccagggtgagaccctgtcttggtaaaaaaaaaaaaaaaatcttaattagctgggtgtggtggcacacacctgtagtcccagctactaggggggctgaggtgcaagggatcacttgagcccaagggttcgaggctgcagtgagccatcactgtgccactccactccagcctgagyaacagagcgagatgctgactctttaaaaaacaatcaaaaatctattttcttatacagttatgattattataagagggtttttttacatgaacatgatagcctcagtttccttgatctgtgctgtcatggtgaagacaaatagcataaaatttacttaccactttcaaggttataaacacaacaagaactcaatttgattatatatatatgtatatatatgtgtatatatatgtatatatatgtatatatatgtgtatatatatgtatatatgtrtatatatatatatacacacacacacacatatatatgaagatctctctctatatatatatcttgacaccaagtggtctcaagtcacagtctcaggcaatagttccaaactcttaggtcaataacattgactcttgtctgttcatagtttaactaaacctgtattgaatatatattgaatatacgtaagtacagtagggattctaacataaacacaatctgtgtttttccttaaagttaacagtagttgagaatacaggcaggcaaatgtataaattacaatttagtgtgattagtgccttaaaaggttcaagtatggagagagcacagaggaaggagcaatttgtagcccagggaagctgggaaggacctcaaagaaggggcacgtttagtttggtcttgaaaaaaatgagtaagaactttccatatggaggatacaggaaagcattcctgtaaaggaaatgtcttgttattcccttaaaaatcctgaatggagtcttcaaacgtggaaataatgatttgaagcatccagaagaattactgagtgtgactttttttaaaaaaaaaagaaaaataatgaggagaacgtagttctaaaatgtaccaaactgaattatgcatattatcaaataagttcaaaaattggcataagactagacaaaaacctaagtgaactaataaaatgaatctagaaacctgaatatgaataggaattaggatataacaaagcattttggagcagcaaggaaaaagattaaataataattattgttgataactttcagaaaaaaatatgaagttaggtccctacactaaacattaaaacataattttcatatagaatataaattcttttttattttgtaatggtaaaagactttcaaagcaggcctaaatagtaaaatacacaagtaatctggaaaaatatttttatttatcatttcttaatctttatggaatttacattaatcaataaggagagttgaaatcctctrtagaaaaaacagcagtgtacataaacaggatttcagaaagtagaaatgcaaatggaagaataccatgtaaaaagatgcccactctccgtataattaaaaataaggtgccatttttgtttagcagattggtataaacgattgattcttcccggtgataatgagggtattaaaaaaatgaatactgtcttataccgctgatggaggggtaatttgggggcgttttaggaggggaagaactatctaaaaccttaaaaggggcataaactttgagagttttacttgtaagagactatcctagtgatataattaaacttcatattatttatgatagttgctaaaagttggacaaacctaatttcaccagtaagagattgactgaataaatgtgatacctctatgtaactgagaaaacaatattaaatggcctattaaatgggacattgacatgacatgcctgtgatagagtacccaggagccaagtcggcttctccacttacaacctctgtgactttggtcaagttactgcacttctctgtttcccccttttcctcagttgtaaaaaggaaaatacaatagtatttagtttgtggtattgggaagattaactaaattgatagatgaaaaatgtagaacaataccaggcacttggtaagtactataacctatattttggctgttattattttattagtgaggaaaaaaagttaaatatcaagctctttaagaccatttatatttttcttaaagtttccttatgtagaaaatattagtaacatttatatgtattaataatattcaggatgatgattacaagtgatttttactcttttatgcttatttataagttcagaattttataataattgtttgctagaaaatggtaatttttttcactttaaaaactaatgcacaaataattcttcctaatggtagttttggagttatgaaatgacttgtatatggaataggtatagttaagtttttaattcttctatttctttttgtcatacagctgaattccacggcctttgtagtagtggagtaggtatcactgtggatggaagaggtaactctagttaatctcaactttataataatcacgtgacataatcgtatagctttataattctaatattaatatgagtatatttaatatgaaaatgtagtattataaaataataagattaattatctcctagagcagtggttataagctagatgatattaagtgatatgtagatacacattttcatcttggataaatatttatctgttaaatatgcattgttaaaaatgtcactaacaaactactctcctgatttcagkcagtcattgcttaagaaaagaataatgtgacatttaagttaaaaaaagaagaataagtcaattttatgataaaacattaagtaatggtgcagatagggttagaaaaataaacagtattaaagagatatttgatatggatcaagtttgggatatactggctgaaataatttgttaagactatttacacctaagaataataaaacatttctctccaagtaaagaagtaagattcactaaaatttttcttgctttcaattttgtattatggttaacaaaattccaatatagaatcttgaacatttaagtacatatgtgtttgtaattttcagattcttttatattttaatatacatatagattcatttatacataaataaaacttgggtgttattaatcttcactatatatatgaatatgtatatatgaagagtatatataaatatatatacggttatatatatatatttatgtatattcttctacccttgtgtttgagaaagctttagtcaaattatagatggtaggcagtaatgttgaatctttataataaatatccaaaccagagtgaaaagtaaacttttaaaaggatgtttttcccaagtataaaatgaaagacatttccaaaatatttaaggtctcccaaattattgaaaacaatagcatcaaaatttgagcatagtgaccaaaatttgactttgggcttactctttcattatattccctgtcagtacagcctttccagcagagccagcctctattggaaactacttgatcattcatacaagcacatcagtgcacaagttccactgcccctcggtgatatagtagtagtagtcatgttcacggctcgttataaaacgtcatgttctgaagcatccatgtttaaagtgtcctctccagtaatttcaagtatcagcaatgagaaacacttattaaatattagtaactggacctcaaaaatgtaataaaatagaaatatcctgtacctttggggaccataaaattatatgggccaccctaataaatctgtcttttagttagatgattacaatatctatcaactcgagttttcctttggatttggagccaacagcctataaattgtctttattaatktcatcataaatgctggcatatttcgtgatttaactctttgaatttctgccagcgtctttcatttttcttttgatttaccagtgaagtgtcctatatctttcagttttattttcttactccttgttttcagttctttttcctttctgaaaggcaggcwaattgtgagtttgcagagttaaacacttcatatgttgaatggtctttactagacctgcatttatcaacaaacaataacatgtttgttgatagcactaaactttcaatatttaatgcagatatcaatgaatgtgctttggatcctgatatatgtgccaatgggatttgtgaaaacttacgtggtagttaccgttgtaattgcaacagtggctatgaaccagatgcctctggaagaaactgtattggtaagttatttgttatatttatgcaagaacatttcatatagtttaatcccatggattatattagaattaaaaacacaaatgactaaaactaaaaattgtacagtttttmttgttttcttcatattacacattgacaggaaaatatcagaatcaaacaaattttgttacacagtaacagacttcttggtggtaccaattcgtttttaaaatattattttccggaattaacatcctcaattatttgcctattgttttcctgcatataccttaatcctgtaattttttacgaagaatttgatttcaaaaattaacaggtcagtatggataaaagtaagtcaagaaaataaagtgttacaggttgagagaattttaacttcataaagaaacaaccagttgccacaatatacctaaacatgacaactaagacaaaggtatttccttttttaattataagagaatgattgaaaaaactgaagtatgtaatttatgtttaacaaatgcaagaggaggaggatgaaaaggtttgacagtcttatttcctattagtgcaagattttcccataaagcacttgagtggacttttataaaataaatgttattcaatccatcattgtgcatgatagttttacaactaatcacttatggcttttacaaccaagtgttaatgattatgattagaaaaggaacagatttttctgtgtttctggtagtggcttttactattgaacatattcgtttgatttggagttgaagacatacatacagatggatgtaaaagctatatttatattacgtgctataatagattttgataactacagggaagagtaccaggcaaagattattgaacatttctaacaacatgcaaaccatgctagtttttattctccagaagtgaaatccagatttccccttttyacatggacaccggtcatgttgactcacaacctaccctaacaacctcattataacttgattacttctataaaaatcctatttccaaataaagtcacattctgagatactgggttttaagatttcaacatatcttttttaagggacacaattcaatccatagcttagaaaaatgggttaaaaaattgtgatgcaagctggatgcagtggctcactcctgtaatcctagtactttgggaggctgaggtgggtggatcacctgaggttaggagtttgagaccagcctggccaacatggtgaaacccccctctactaaaaaatacaaaaattagctgggcatggtggcacgtgcctgtaatcccagcacccaggaggctgaagcaggagaatcgctggaacccgggatgcggaggctgcagtgagcggagacctcgccactgcactccagccgtggtgacagaccgagactccatctcagaaaaaagaaaagagaaaaggaagggaagggagggaaggggagtggagaaagaaagagagaaagaaaattgtratgcagtcacaatttgtacacatattacactattatgggaaaagctatggtagtctagtccttaaaatataatgttaatttttaaagtatcaagattaagagttggagcaaaaacaagatcaagaaaggaaagggtcagataatacacaaaagaatattatcagtgatgatggaattgcagatgtttttctgatctgttttcaaaatctccacagtatcagtatattatttaataagggaaaattgttatttgcaatactagaaatgtaactttaagtgaaagagctcttcactctaaactacagggtttatttctttttgtcactaactacacttgcaaaaatggaagaatatgaagattaaaatgtgaggccaggtgcggtagcttatgcctataatcccagcactttgggagaccaagctgcgagaatcacctgaggccagaagttccagaacagcctgggcaacatagtgagatcccatctctaaaaaaaattgttttaagttggccaggcrtggtggcacatgcctgtattcttagctacttttggaaggctgtggcaggaggattgcttgagccaagaagttcaaagcttcagtgagctgtgatckcaccagtgcactataaccagggcaacagagtgagatcctgtctcaaaaacaaacaaaaaactcattgtgggctttttaaactggagttttagatgatattctctaggctgttctggactgctaaaagagtatgcaaaatacatcattttcattaataactgtttctgagataaaaacatagtgggaaaagattaatgaatgtcttttaactgctgtttaatgcattttttaaccatctgggacatgaagacataaggcattctttttaaaaattttaatcataaaaaatgccttctgttacttttattatacataagcaagtatacaggcaaatgaatttaaccttttgatatcttttatgaatgctttaaaaatatatctaacataatatcattacaggactaaaagcaagtgaagtagagatgtgcctttccaagctagtgcatactttccagggatttaaaagcatcttaaaattagccactagcataagaatatcccatttgaataaaactaaatatattttgcttaggatgaagagtgcgctgtgatacagagactatgtcacagagaagaaagagggaaataaaacaaataacaaaattaaacattgctgcccactgtaatagatgcttaaatatgtgtatctcctatctttcaatcgttgctttcagacattgatgaatgtttagtaaacagactgctttgtgataacggattgtgccgaaacacgccaggaagttacagctgtacgtgcccaccagggtatgtgttcaggactgagacagagacctgtgaaggtaagagctgtcttcatcgccttatttgtgcatagtgagtacctggagttgtataaacatcaattacagtgatgaagcaatgtagtgaaaagaatattgtttgaatattttattttataatctcatttagctaatctgccagtttttgaaatagtaaggacctaatacagtttacaaacaccatcaattttgttccactcagacaaaatatcaacacacatttggaacaaacattttaaagcggataaaaaagaaaccaactggaaggagccatattgttttacttgctgaaatacaatgtcaaatatttgtttactgtgttttcctcttttcagaaccactatgatccattaatgtaggaacctgaatcgtaatggaaaagttaactcttaggcattttatttatgaaatgattgatatacccaagaagtcagcccacaaaatatttgagaactaagtaaaaaygataactttaataggtttttagtccaagagaattgtcctttccatttgataatttaaaagttgtcatttgagtttatagaccataactagtgtttaaaagcttctttgttttcttctaatcacatatttttgcagtggaagttacttaaatgagttaaatggttagagaagtcctcattttcagtgagatactggctgagcagtgagtacactgaattatgtttttgtatcttgatcaaagtactgtatatttcagaataatctgtggtatgaatactagtcattgttcctgtttaaatctcactgtgtgggcctacagaagggtcccataacattctcaaatccaattactactttgtaatagaaacttttaagaaaagatttcatctttgatgactgtggaatagcccttttttttwatctgttaaagtatttggtttttttttttgtgatgccacagccaagaaaactgcagtagtaatagtatgcaaaaagatgtaacattctctcttcatcttactgtttaacttcaaagcattcttgtgaacagaaaccagttaggactatagaacaagatgccaaaacatgaatgactctgctgaagtcaatgaaatgcaattacaaagtgcagtgctaactttgaattgaatcagaggggccactaaaaaacagtaattagcctaaagaaaaaaaaaagaaaacttcagcataaaatcccctttttctaaacttacttctggtgacagtttcccctatkgtccaacatcttttcaggaactcctcaaagaggagtgctcattccattcccactgaaagtacttgaagatttatcttttcagtaggtgagaaggggacacacttaagagtttgaaatatctttcaataggttatgagagtcctctttttaagccagctctggcttctcaaakgtattcaactacagagtctctattttctagatcctgctcccatctctaacaccaattcttcagaaatgctctgagaaatgtactttatgaaaaagtatcctagccatatttcctccatgatttccttggacagatggaagaagggatttcaaaggtttttgtttttcctgattttctacacttccttcccgtagtcttttttcagttttgtctgttgtctgttggaggataagcttccgttaaatctcaggaaacttagaaagcaagagcagggtaggacgtcatcttgatttaactaggaaactgatgatttttagaactggtttctctgtctaggaaaatactttctggtgctattgtgagagacacgtaatgcggaactaaatggatagtgtctggttctatttgctatgtacactgaattatcaatgattatttatagacaagtaacatagagtacaaaggttctgagagttgaaataccaaagaaggtaaaatcagagactcacctgcttacatgaacagttaagagtaggagctggtggtgtttaatagtgtaacatttggtgattatgtaaatattaaggcactttcataccaaatcaggcaacagtgagggttagaaacagtgatcttcacttattacaagcatacttaatctgagagatttatttaatgtaaaaacaattttatgtctgtcattcataggaaagaagttcatgttatgtaaataaagaagaaatgatagacaactcttttggctccagccttatgacattggaggaaataaaaatgatttatcatgggaaacctaaccaaataactgttatttctacactttcttcccactgttatttgcattttattaagagttttgcaaagaatagacttgaaggctactaatctctttttcccttgggtcgctttcttatttcctctgttgcattcaaacagtaagtgtttctgtctgaagcagttctcttcattctcttctttctgaattaatttccmaagactagacagggaattattagcagattcattgcaaatcttagctttttcttgtatatttgtcttgtgcactaattttgtttgtcaatcatgttttcagagtattttaaatatataacaaatarcactaataataaagagagtaaagttcttctatatttcagattgaagttacagaaactttattttactttttttgtttgagctmtgagagtctgtgaaagttaaaatttttacagcaagcactgtggtttagattgtgtttccagtgacataactagttaaatgtaaaccagatgtgctttgaagtttatttccaggaatgtacagtgaactgtttcaattcctggttccatgacatttataacataacaacatattatttaaaggaaaactaaatagttgatatttgtagttgtcagcgcatatgtttatagtttctgaattcataattgcttaatttaaaatagaaattttaaaaacacacaatattgaaattcttcttttttcaggcttcttacaaatgaaattaataggagaattatatgtggtctgtycttagatttgttatctgctkcttttatggttagctagtttcttttttacattgtgtttttatgaaaaagtttctctactcggattgatgttttcattagaaatctgtgctatatttacaaaatctcttcttgtatttttaagaggttttctcagtataaacaatctgaaaagcaaaatacattcatatttcttcaaacaatttctatttcaagaattaaattagcacctggatattccgctgcgagccttgctctttcaggattagtttagtttaaagtcctctagttatttgtttatgtgctttcctcagtatagtaaagtgctttataataaattcaaagaaatatttagagaaagaaaaagtattcttgtgaacctagaaaccccagtgttcaatataaaatgccttgaggactattgacctctttcagataatttagtagagaaggaaaactgtgtgccacttctttaaagtgtaccactttaaaagtggttgaatttatactgaaaatgtctttgattttttttatagtactttacctgaagcttgtatttctttttcattaactcatgtgttaaactatttcacattacaggcttgacattttctgtaatcaccatttgagaacataggcatagtgcagttctgcttacttctgaccatcaacaggaattgtttagattatggtatatgatttcatttaggactcaaatcaaataaatggtagagtcccatttaaagcaattatttctacttgatcaagtatttctaatttttattttaccaaaattagttgtattaaaaaaaaactaagcaaactaaacatgtaaatgtgaacagctaaagacagagaaggtggatagggactagaggagagttatgtacccaccatgaatgtttcagtccttatttcctgattcatacccamgagcttggaattaaagcagcattgtgatattttgcatctaagatagactttttaagtttttcagagcctcatgaaatcatcaaagcaatcaacctttgtttgtgcacaggatgttgcacctggaattgcatcttattatgtgggaaaaaawaatccaatttatgtaaagttgtgatgatgtattgaaggagcatgtaactgaactctttcccaataggctgatcactgtggtcctactgagttcccagtcctakagatgtgtatccacgatgtaaaatgcatgtctccattccccattcactttatgcttcatagatccatattaaaattaccagagccaagtttaccagacattctggcattgcatggcttgttggaataatattttccagaaacacatggcagttctaacagaatcttttccttctggattgtagatataaatgaatgtgaaagcaacccatgtgtcaatggggcctgcagaaacaaccttggatctttcaattgtgaatgttcgcccggcagcaaactcagctccacaggattgatctgtattggtaagattcatacacaatactgatgcttcaatttcactgccaagataagcacagatctcaggccttactacggataaaaacagaatatgattccaaaaagcaaagaattacacattatgttagttgtttttactcaatatcaatayrgaggtaaaacataatagcattaattaggcagcctattcaatttttgttagattctagaaatcttccttttatataagtagatatattatgctataacttataatcatttccataccacacacatatgtatatccgttaccctaaaaatgccttgggcagcaatataatcaaatctctactccatacttttttataaacaaacttcaatggcaaacaaaaaatgtgatgaaatttggattcagttaacaggacaagaatttgaagcttttaaacacatagagggaatttattattttttcttttttccatcaatcataaattttggggctctaaggaagagaagataactgttctcttgcttttggaaatctctaggggaaattattctaaaacatctaaactaacatctttcaatatgtctcaaaacatttaaagtcagttcttgataatgacatgggatgtatattaagggagattgatctgttactgcaaggaaaaatccagcacgtaaaagggaacaaaactgtcccagtaatttttccctacttctagcctctgtggttccattcactaggcctacacagttcacatcattagctagtatccacctttaaagtgaactaaatatatattccaaataggaagatatttcagttttacatagtgccaaattaactggcagtttttattatctagccaaaatgaatctttagtttcatatttgtcraagacaatagctttttcagtattatgtctgacattaaccatatttagctggatgctagagtacctgtttgttacataaagacaaatgaccaagtccaaaattatcaatgaaaaccttctctttggaaacaccaactcctcgtttcccagtgaggtacagctggtgaaatctgagccttgttcagctcttcatattaggaaatagactgccatctgcctggggcattactttttttcttatagaattccgggctgggttgggggggcggtggggtgtgtgggttggagccactaaagcagaaatatttttgctaagccacaatttccaattgagatggagtcattttattatgcaaaggaaatgaattcagcattaatcaattaatgtctcagaaaactaaatctgcatgccacttgagcatcaaagatagtttttgcctcatcatgtagacttccattattttggccttttgcccttatatttattaactaaacaagaacaaagacttttttacccccaagtctttatgtcattcttccaattgccarcaactaaccaccaccatatttttctcagccagtgtattgtgtgctttcatttattgtgattaaatttgaatatcccagtgtagagcagctcaaaatgagatttccctaatatttttaaagtttagacattatttcatgtacttttttattaaaaagagaatctagttgaaaaagaaaataacaaatagtaaaatatacacaggacaagtcatgaatgtataataggactgtcagtggctctcatcagtggttagcctgcaactttctcttccayaggtccaggtcattacattttgaaatttcatgatgtgaytactaatttaaaattacattagattatatatgaattagttggatactatgaatatttaaagatttagaatctatttttcaagctttctaaatataaattaatcttcaactattctgcaaactgcttaaaaagactatggtgttctggttgaatatggttaaatgtaatagaacaatgcatttgattaatatttcctgcattatactgctgtggtttgatggttctatataatccagaccagtttccctcatctttggcttgggtctgcgctctgtcttcaacttgcatggatatatggctgtgaccactctgctgtcaaatccaatggtctattctcattcctcaccttagattattagcagtatttgtcacagttcattaatcattctttctcaagaaattttgcatttttggctttccaggcacaactatcttcttcttctttcacttttatggcacattttctctttcctttactgagtcctccctatcctcctaacctttaacctgaagtgttccaccagtccgtctttggacctctgtttctctttctacactcatcctcgagagcctctgtgttgactctcacatttgtcactctagttgataatgaaattctaggcctcaaccttgccaccaattccagatttgtgtttccaactgtctgtacagtgtctccacttggatggctcatcgatatctcaaattcccatgtctaaaaccaaattcctgtgtactggcttgaacctgagtctcccaggaacatttccatctcagcaaatggcaaattcattcttctagctgccaccccttaaaaccttggcagcatccttgatgtctttttctcaagctgtatatgaaagtcatcagcaaacctattgattgcacttgaagtttatccatatttcaaccccttctcacgatcaccacaccaacccccaatccaagtcaccatcatttctcttcgtaattactactgtagcctctaccttaccttcttttcctcatactacactcagttctccacatagccactaggcagcccttttaaaacataaatcagagcatatcattctttgtccaggaactgtgtctaggaaatcctaggcttctcatttcattcagtaaaagctcaagtcctaaccgaagcctgtgctcccctcatgatcttgctcctgctgtgaccttgtttccctgtgcctcccaccccctcagcctgagccagactggcctacttcctgctcctgcgtcagacacatgcccacctgaagtccactgatctatctggcaggaatgtttttctctcgggtttgcagggttctctttatgtctgtattcaggtgccacattgtaagtcacgatttctctgaccatcctacataaaataacagtctttctcctgtttctcccctcaagctaattaccctgctttattttttgagagttcttaactaattcctgactatctacatctgtatctcagttgtgtgtgtgtctgggggccgggatgggcatacacacacaacagtgggtcagtggggagacagggagggaggatggaggaaaggaatcggagagagagaaggatgagcctgtaggggggtgcrgggtgctatcaatggatttgtagcttttcaagtgttgatacagcaccagcctaaagaatcacagtgctacagagtgagggctttggagtcagactgcatgggcttgaatcttgatgctgacactgtactagctgggtgaccttgggtaaattggttgacctctgtgtgcctaaattttctcatctgcaaattgtacataattcacagggttgttttaatgagtaaataaattaatacatagaaagccttccagttcctgtcactatcttgataaatcttagcaataactgttgtttatcttacttaaaatgatgacaaggtgataaatcagaactagtccaggtcattaaaagatcatttaaatacacagtagctttacacaaacatctctgtttcctctgtgctatggaatttacagatgtaaatctataacaagcctgcagtttgagacctgacacaaatgcttctctacagttttatccaaactgaacattccagccagagtgaaaaagcaaagtgactgtccagctctttttcacacctttgccctgtaactttttattcagtacaggagagaattgttttgtttcaacctctgtcttggtgtttgggttgttggtaacttcttgtgtttcctagggaatcagaaattactatttctgccatcataggcccatggtttaattgtaattccctttctgtgtttgggggcaggggggtatttttgttgttgaatttagaagtaaaaacttttttttttttttggaagacagggtctcactgtgtcacccaggctagaatacagtgacacgatctcactgcagcctctgcctacggggctcaggcaatcctcccacctcagcttcctgagtagctgggactacaggcatgtgccatcactcccagctaatttttgtgttttttgtagagacggggtttcaccatgttgtccaggctggtcttgaactcctgggctccagcgatccgactgcctcagcctcccaaagtgctgggattatagtcatgagccactgtgtctggccagaagtaaattttatctgtacatattattaaaatgaattttcaaataaatactataggaatacacttattctttgttttcttccaagtcttaatgccacaatatgctgttgaggttttggtaaagtgttttccacatcactcacatcagaatcacctgaggagtttgtcaaaattcagattcctgggctgcataccgggaaacttatgaatcggcattttaacaagygtcttggtaatattatgcacrcttaactgagagccactgctctacaaggaaaacatgacatatgatttgttttagccaattagtatttgctatatcagctttgactggattccttatcactgcttcaaaatcagttaacagtcatttattatttgttcatttgaaaaacttttcattatgccaccaaaaatatactaaccattcgttattccctttaatccacataaaataaaaattttaaagtgcataatatttcactgggtactctaccattcaaaaggaagaacaaatttgatgtggagtcagtctaaaacgttaggaatggttatctctagagggttacaggtgatttttacatcttcctcatacttctctatttcttcaaattgtttaccataagtatgatttactttttgaactagagataaatctacacacacacatacacacattttttaagtgcctgaaagaaaatacatcagatattagccctgggaatgcattagtgagggttttataagtgatgtttattccttcttcgttttatagggctttttcttttaaattattcatcaaataattatcttcagctggagaaatattggcctttgcataacagaacatacattgtgtgtgatttatttagtagggacttaaggtagaaggaaaaggattttatacgataaaatcttaaatatcaaagcatttgtcattaaggatatatcttatgaatacttttcacacaagtgatggtcttatcatgttgttatagtatgttaaaagaaaaaaaaaaagaagggcggggcgcactggctcatgcctgtaatcctaacactttgggaggctgaagtggaaggattgcttgaggcctggagttccaaaccagaccaacctgggcaacatggcaatgcactgtgtttctgagtaccagcataaaatcttggacaactcctcttagaatatcaatagatataattatattaattaccatattatgtgagagagatacatagtataatattttatttacatatatgtaatataccatatttgaatgcaggtacatgaaagtattttcaaagtatatgctattaaaattttttcttttttttttttgagacgaagyttcactcttgttgcctaggctggagtgcaatggcacaatcttggctcactgcaacctctgcctcctgsgttcaagcgattctcctgcctcagcctcccgagtagctgggattacagacacctgccaccaagcctggctaatttttgtatatttagtagagacggggtttcaccatgttgaccaggctggtcttgaacttctgacctcaggtgatccacctgcctcggcctcccaaagtgctgggattacaggcgtgagccactgcacccagccccactattaaaacttttaaagtattcttttttttttttttcctctggtggagatggggttttgctattttcccaggctggtatcgaactcctgggctcaaatgatccttcctcctcagcctcccaaagtgctgggattacaggcgtgagccagtaatctttcttttttagaatactgtaacaaatgccttttgtgtacacagctgaattctattttcttcagaggtaagagctccccaacctttcctgttccttttcagacagcctgaaggggacctgttggctcaacatccaggacagccgctgtgaggtgaatattaatggagccactctgaaatctgaatgctgtgccaccctcggagcygcctgggggagcccctgtgagcggtgtgaactaggtaggagccttattgggagcttctgggcttctccttggaaacttctcctgccactaggacacctctttcactacgcagttcctkmgtgaagaaggtcagagatcatttacttttgctaaaatgttatctttcctggctaatgttttttacctcttaaaatgtgtatttgttttatcctggtrcataagcaggccttctaaatattttaacatggaagggaatcagctagaatctatctgctagatgactgtatcctctggtatccttgtttgcgtggtggctgttttcctcaaatcttttgtttacttttatttttttgagacggagtctcgctctgtcaccaggctggagtgcagtggcgtgacctcagctcattgcaacctccacctcccgggttcaagcgattctcctgcctcagcttcccgagtagctgggactagaggtgcccgccaccatgcccagctaatttttgtatttttagtagagacggggtttcaccatgttggtcagatgggtctccaactcctgacytcaagtaatccaccctcccaaagtgctgggattacaggcgtgagccaccgcgcctgacctgtttacttttaactcagttgtcaatgtgacagcaaaaagaaattgtaggaaaaattatgagaatctcaatacaggtcaataccaatggagttaccacagaaagtcatgtgccctactgaatgaagaggggacaatgatgtccttggaccctaagaccctgccttgcattttttatttagttccatttagatttcattatacttcttcttgagcataccatggttgtattttattmtataatgaagtaaaatttgtcctgttgttgttacagatacagcttgcccaagagggcttgccaggattaaaggtgttacgtgtgaaggtgagtgtatccttccttggaakatactatacatcttttgagcagtaagtaaaattaacattcactctcaaactttggagatatttatcattttcaaaaaccttgacatttcaataaaaatactcgatgtaatcaacaaatgctttagcataattctcttaggaaagagcttagagtttcccgtttctcctctttatggagttgtgtaaatttcatgaagacatcgctagcctttaaggcccagaacagctgggaaaggcacatgtctgggccatgttttatggacaggcaaggctgtggtaattttcacagctggtacctaggaaagcgggtggctcggttgtggaatatttctgtttaactcaagtaataatccacattgtattgaatgtggattgaaaatgctatacaggaagtaggaccacacctgctttttctatttgtaacatctttgctcctctgcttgctgcatttccctgcagatgttaatgagtgtgaggtgttccctggcrtttgtccaaatggacgctgtgtcaacagtaagggatcttttcattgcgagtgccctgaaggccttacgttggatgggactggccgtgtatgtttgggtaagattcacaccctcatgtattctatgtataaaacaagccrtgaatttccttgtttaagcagtggctagtccaaaaccacaagagtttgtacttgagaaaacttgctttaaatgagatatttagggggaaatcactagaggctgttttaaaagtgaatgtatttatgcgaaattgtttctgtttcatgccaaaagttgggactgctcaaaaatctatctcaaaatcttccatttctttaaccagataatttagacaggttcagtctttcacactgagttaatagagtaagaatatgttgaacacagcaggaaagttggagactaggattttaaaagtttacatttgtcagctcattgcagctacaccctgaagacagtggggaaagtcaagagcaaagatatgttgcttctgcttgaaatcattcactgatcctggtccttcctttattgctattagagtttaagttttcttaatagtttmttttttaaagatctgtagtgatgaatctctttctttcaacagcatattataggaatagtgatttgacctttttctttattagtgtcatgtttgaacttgaatttcatgattgaaaaagaaatttctattaattttcattgtatgyaacaataatttttcatttacctacagagattttttttcccccaataagctatggaacagtaaatttttagtttataaaagaactttacatagatttgtatttgaaatttagacatgtagacaaagcataaataatagtggtggtgtatgcaatcacctttaaagtatttacatatcagtgatttttaaaatttactgtaagaaaaaagtttgcaataccatacagttattataattaaaacagatttcatttttaactcagtttttgatagcacatttaaatctggattggaagcatkactgtaaaatcatacaaaattatttagaaaacataatatccaaagtacaaaaataaagaaaatgtctttcagatttttaaatattttaaaaattatctttaagtgatctacaatgtttagaaataagtatcatttgaaaatgacaaaatattcccccaaaactatcgaaattttaaaaaaagaaaatgtcaaaaataataatatcagtatggccaaatgactaatgaaatcaagttaccttctataatgaaatgctataatatatgaagatatatcattgattgtaaattattactcagcaaaataaattttcaataacattattcaaaattatggctgggagtggtggcttacgcctgtaatcccagcactttgggaggctgagacaggtggatcacctgaggtcaggagttcaagaccagcctgggcaacatggggaacccccccctccccgtctctactaaaaatataaaaattagctgggcatggtgatgcatgcctgtaatcccagctactcgagggactgaagcaggagaatcgcttgaacctgggaagtggagattgcagtgagccgaggtcgcaccactataccctagccttggcaacagagtgaggctmtgtctcaaaaaaaaaaagcattttttaatattctaagatgatatattggattcttcatccttgtactttgcttaaatgcttttgtcaccacttgaattatgctatattaattaattctgtctggggatgtgagaaagtttcaagaagcaactggcacatgaaaatgtaaagtattctgagaactaaagttttggtaaatgctctgatagaacctcatctgaatcagggatcccaaactcagatgcttgcaggagccaagcatgtaacatataaatgagtgaygcgacaacagggagcagtggggactgcagcaaacttcagagaacatggaccatccaaaggtttccaaattcatattttaatttccatgcaaggacaatcgcagcattgataggccttatgtggccagtgtactgacgtttaattcctgatataaatatagagttctcagtagtgtgctgacttttaattgccgatataaacatccatagaggtctcagtattaaagacaggattgctcttcctggctgttataactttttacatgcatagttcagatgcctttcccctctcaccctagtttattccaataagctatgaaatggtacatttttagtttgtcttgagcttcttgagcaggtttcttcagtaacctcacagtatgactcaggccagagttcttaggccacctgtacttatataagactttcacatcttgagaagattcttacttagctgctgacatatgggacggaaccagctataaggagactagcccctcagagccctgtgataatgagacgctggattactatcacacttcacactggcaaagcatgtggctttttggtttgtgttaatgtagatatataagacagaatcaccttctgtagatatctacattcagtctgctgaatcaaaataaacatttaccacagttattttttccttaaaaataggactttttctcaggtagctgggattacaggtacccagcaccatgcccagctaatttttgtatttttagtagagatgggttttcgccatgttggccaggctggtckcgaactcctgacctcaggtgatccagctgcctcagtctcccaaagtgctgaaattataagcatgagccaccacgccacacctggtctgggcaacagagtgagactccatctcaaaagaaagaaagaaagaaaaaaaatagaactttttaattccagtactcagaaatgtaactcattaccttttagaacttgaaagaatcaatattgacagtaactaaagtagtaaacattaatttttatgtgtayatttccatcagggatctcattccctccgttagacagttttcagcttctggaaaggatttaatgtcttaaaatgttcttatcaaagaaatcatgctatttgattaaggaaccgtttccaaactcattatccatatttgtaattaaacagccaagtgctttagtatgatttgaaaataaatctatttgctaacagatgaacatgttatttatagaccattctggtctactctatttttagatgtaggcgactgtttatagatattctaaggtcctggctagcacaggctaagcactgaaatgttggtctgttttgaagttggagggaaaatgtgacatttaaacaaataattggtcccttaaaacggaaaattcacataatccagggaaaaaccatgatgcaaaaggtaaagttggcaggagaaaaaaaaaaactttaaatgtaataatattataacactttctttkgtagtgatcttaatagttgtaacaaatkggcaaatagattatagccgatcatttactgtttatgaatgggatctgacagggctgcttaaaaggcacttgaagcaattctctgaacaggaagaattatcattaaaattatcttacyttttctaaagtgaacaatacaaaaaaggagtaatagacatgaagcagtcatctcatgagaggaccttttcttcctgagggtttcttgtgagaattaagactgaagaggatctcacctttgttctccttaaatgactgtcattatggagtccattccaggaggtcagggactgcatcttgcccaccagtacaccgcaagggtcctgcatgatgcctggtgctgagcagacgcttgacatgtgactgttcaatggatgtttcaactcattctcaccctgtgatttcgttctcggtgtagatattcgcatggagcagtgttacttraagtgggatgaagatgaatgcatccaccccgttcctggaaagttccgcatggatgcctgctgctgtgctgtcggggcggcttggggcaccgagtgtgaggagtgccccaaacctggcaccaaggaataygagacgctgtgcccccgcgggkctgrctttgctaaccgaggggatgttcttactgggcggccattttacaaaggtaactgcctgcrgccagcgccttggtccttcttcaccaacaggaagccttccacattctctgagaattggttttgctttaaatgtttgacttcccactttattttctcagttaaacttaggttttgtgaccaatgttctgtcccaagagtataaatcccctataagatggcattgaagtaaagagataaaacagattgcttatctttctcttctactctttgttcctctrcaaccggagatgtcgccctgatagctacatctgtagcaaaaagttacctattcccacttatctttataaaacaagtagtgagaaataaaggaatcagaactctttcttaagcatatagaatctttggccgggcgtggtggctcacgcctataatcctagcactttgggaggctgaggtgggtggatcacctgaggtcaggagttcaagaccagcctgaccaacatggtgaaaccccgtctctactaaaaatacaaaaattagccgggcgtggtggctcgcgcctgtaatctcagctactcgggaggctgaggcaggagaatcgcttgaacctgggaggtggaggttgcagtgagccaagattgtgccattgcactccagcctgggcaacaacagtgaaactctgtctcaaaaaaaaaaaaaaaaagaatataagatctttttcaccatattgaaacttcctgtgtgatatcagtgtgatcactgaaacatttagtagccctgttttttacttggatgcattactgttgtccatcatgatagatttttaacttaaagtgatggacctaatcgtttatatcaaccrgctctacattctggcttcattctgcttttagacatcaatgaatgcaaagcatttcctgggatgtgcacttatgggaagtgcagaaatacaaycggaagcttcaaatgccgttgcaatagtggctttgctctagacatggaggaaagaaactgcacgggtaagatggttctgctgttttatttgataaactctggctgtctttcctttactctgtttgaaaggactgccctaaaaagctaatcctctcattgagaacatgaaaatttttatttatttattaatttctttttagagaaaaggtctcacttagtcgcccaggctggagtgcagagacatgatcatggctcactgtaacttcaaacttctgttctcaagtagtccctccacctcagcctcccaagtaactgggagcacaggtgtgcgccaccatgcacagctaattaaaaagttaattatttatttatttatttattttaagagatggggtctcactttgcttcccaggctggcctcaaactcctggcttcaagtggtcctcctgcattggcctccccaagtgctgggattacaggcttgagccacggcatccagctctgtaaattttttaaatttcttttctctacacttaaaccagttctccaaataaactcgttgtgagagaactgcaaaacatcatgaaaatgctgtttgttttatatttaggaacagcatacaaatatgattttcaaaatatatgactactaaagaaatacagtcattaaatccacaagaattatataaacttgagtagtgttctcttaaagattttaaggtttgtgatatagaagttattacttcttttcctcatctgtgaacaggaatcttaatattagttttcagtcaccatccatacccataacattctctttgaacaagatgtgaagttctaactttttctattagtataccatgttgttccagacccttgagctgtgtcttcaggatctcgttctcagcactctctttgttcgtattctccatgggatttccccttatcgcactccctcctgcctgctccttcttcctgacctcacggccacatctttcttggctctttcctgtgcctcctcagccaaggctatctctgagcttttcacagctgtccatctggctttctgaagtcctgctgccttgaagtctgctcaagccctgtgccagtctccagagcttcatcccctcacctgttttctccactctggctgytgcacttggctgggagagtctgaggagtgctgcctgagattactgcattcacctccaagtccttgaagctgcttgacaacactcatattcacctccattcatcactttctgaattcctctcagcactgcttctaaacctcttccctgacttacatgccctctcctctaccctccacccccatctattaccgttctccttcattgagaataaatctgattgcctgcatccttctcacacagcctcctctctagtgataacatctcctttatcccgctgggcatggtggctcatgcctgtaaccccagcactttgggaggccgagacgggcagatcacctggggtcaggagtttgagaccagcctgaccaacatggagaaaccccgtctctactaagaatacaaaattagccgggcatggtggtacatgcctgtaatcccagctactcgggaggctgaggcaggaggatcgcttaaacccaggaagcggaggttttggtgagccgagatcgtgctattgcactccagcctgggcaatgagagcaaaactccatctcaaaaaaaaaaaaaatctcctttatcccccactccctctcctccggtgacagagaatgaggtgtgatgctctacctggatttggggttaactcctcttttccctccttcccagctcctgctctgggttgtctcagcaggttcgctcctctctcctctctctagcatctcctcttccctgcttcctgttcctcaacttatacacaggttcaaaatatctcctcagcccttcttttctctcaagctaccatcccgttttcctgctggtaagtctcacccctctctttcaaccagccatttgtcctgtaattttgacttttgccctctgtcactcaggcacatacatgtatactcatctactcttgcaaaacatctttgtggtgttaaaacatctctcctggacctctgcttgccaaatctctccttgagattttcttttctcttagtttctgtggtattttccggtcttgatcatccttctatgcagatgatgtttcttctctaacctctacagattcttcttgcctttcccatttcttgggtgttgccagagtcctctactcagcgtcttgcctctcagagtttcatctaccatcatgacttcagagatggcctctgctgagctgactcccagaccctgtctctaactctctctgttcttcctgagtttcactcccacatttataacttcccatctggaaagtttgtctttgttttgatctttctttgctcttccccctaccctgtactttatcctactagggacttccctgtatgcattaggagtataattttgaacaggattgaagcctccaattgaattttgaygtctctctctcccaaagtgaaaaagttatgcraattctttcattaaactggctatttcaattacctgtgatatttcttcagacagaggcaggttaagctcctcaggaaacagactccaaggcagagaagagcattcaggaagtttatcggggcttgctcctgggatgaacaatgaggaagggaagggaggaaagcagaagtgggcagagaaagaaatggggctatgatgcagtcccactgaagtcctcagcccatgccactgggagttctggaactgggatggcccatcagagttgccttgagtagggcatggaagccatgcagttaggtacctgcaggaccaatcttgggatacagctgcccagggaatgggggaagaggtcctcttagaatagtgggcatctgagggctttctgccagcgacrctaccaatagctgacggggagggggagtaagtccttctttcctgaagagggacctgggtgacatgtcacagtatctactgtatcacagactcctccaggatctcccaacctgttaagttcccacggtcaaatccttcactgccacaacccaggttaaccatccaagcagggctggattgtgtaacttcccactgaacaacttccactggtataggcaatcctggtgctggataaagaagctcagggttcttccagttctgaccccacctcttcctttgttgtgaaattagccaaagttgcttaatgtctctaacacattsacagggctgcattgctctggatatactgtgaagttctgtggaaaattgttggctctcatcttcacagcaggaagggccggtctcctcccatgctgggggcttttagtaatcctaccggtccgtcctgtacccacactcattgtcagcctctccagtccagccaatctgtggcttactgctccctgaaatgcttcctttctcttcaccggtgcgcttcatctcttgcctctctattctgtatctttaaagctagcatttctgtacaaccttcaagaaccaattcaaaagccacaccctccaaattacccattcttagcagagaagtttgcatatatatatakagagagagagagagagggagagagagagaaagagagagcactttctatgagacaggcactgttctcagcacttaacaaatagtcatttaactctatgaggtggattctatgacaaataaggaaattgaggcacagagagactaaatgattttcccaaggccctgttctcagtagatgacagactgggatttgtagccaggtatctggttctagaatccacactgtttatactatgaaactcccaccacatcacattagccaaagattgtccctgctccaccctagaacacattcctcatatgactcttaacaccagtcctagatactgatagatagaaagaaaattaatatacatattgttagctacttaattgaatcaataaattctgttaatatgtttgtttaaaagaaagtatttacatttttttcrcatggccagtaatgagggaaataaataaagactcctgtaattggagaaataaatacagaaaaactaagtaaaagctggcagaaagcagagactgagacccccctctcaagagaacatgcacaaattatgcactaaatcctgtgattttaaaacttcaaaattaagttcatcaaaataaagagatcgtagtggggcatttttccccactgacagatttttagattaaaaacttttgatttttggactaaaacatttgtaaataggtcatgttttcktaaacatattttatatagacatgacttctctattaaaaatcttagttataagcataggagatttctcagagaaccctgtgtttgagaatatagttgctgaagattatttactgtaatatataaaaagaggaaacaaactcacccacacagtcctcaggtgttggtgacagctcrtgtcaccaaagggcttactaaatcaataagctctttacatctgaatatgacacaaaaacacaaattggggcacacaccatggccctgccctatgtgtgctctctggctcagggttggtccgtcgtggctgcctgtctctctggggtttgccagtccctcctgcacagagacaggggccctgccttcacatgctgcgacctggggtggcatgggctagtgtagtagaccagcactgtcttccagtcacacatgaggtttcattccatgggggcctggctgcctcatttaccacstgcctcattcagcccataccacagttgcagggttcatccttctgttaacatttctttctttttctttttcttttcttttttgagacaggttgtccctctgtcacccaggctggagtacagtggtgccatcatacatcgtaactccgtgcagccttgacctcttgggctcaagcaatcctcccacctcagcctccccaataattttttttttgtagagatggggtctccctacattgcccaggctggttgcaaactcctggtctcaagcagtcctgcctgggcttccccaagtgctgagattacaggcatgagtcaccatgccccccttttctgttacgatttctaagccacaaaaacaaatacacaattcagaatttttaaaggtgaaaaggcaccacttgcctgttggcatggcagttttggcagttggggaaaggaatgtgcctcaggtcccaggcccttctatctgggtctactgaaaacatacccttgtactgttagccagcaatttccccaacttttcaagcatgcagcaccttcgcttggaaggccaagtctatctcattcaatttttaaatttcttttaaaccctgtgaattagacatcgacgagtgcaggatttctcctgacctctgtggcagtggaatctgcgtcaatacaccgggcagctttgagtgcgagtkcttcgaaggctatgaaagtggcttcatgatgatgaagaactgcatgggtaagcaccgtgagctcttcctcgccagcttgaaaccatactagcacagactcattcgtgcgcatgacctttgcttatctctgggctgtgaacggcatgtgtggccagcatctgtggtgagagagagaagagatttaaatgtcagacaggaaatgcgctcctggatagctctcggggagccccaacctcttggcgccttcatggcaatgagatactcagattggatcctgtttattcatagaatctaaaatcacacagactgtttatttaggtgggactactttaaaatgcatggcatcgtgtggtggccccaagatttgtattcagtcatgccaatcccatgttattgctcttatttgtgtactattacaaactcttttggtattcccaaccttttagcccactgtttaattttcagtaygatataagacctacctcataggatatagtaggttataagtytaagattctccttcaccctgattagcgttayagacaccaggataactgacaacaatatatcatgagtccgtggtgatataaagcaaatattatgtatttctaccccttgtgagcctgctgatttcatgcaattaaatttcttgaaagcttactacctttaagagtagaaattttagtttttctgttggtcgtaggaaaagtgaggaaagcgttatcccatctcctatgaagcatctctcttccactaactcacactctcacatcagataatattctttctcccacgctgtatgtgtgaatatttttccctcagagttctttaatggatctcacgtttttacctttcagacattgacgaatgtgaacgtaaccctctcctttgtaggggtggcacctgtgtgaacactgagkgcagctttcagtgtgactgcccactgggacacgagctgtcaccatcccgtgaggactgkgtgggtgagtttatctcctcagcacataaacctgcccagcacaactggtaaagaccagggatcagttctgacaaacctgttgtttgaggagcacatgaaatctagcttattaaaaggtggaaattgagattccctacatctggatgcaggctgtgtctttagtggatgcttgggtgacacactcgaataagctggcattcttctggttggcctctttttttataacaagccacgtgattggtccctgtgtgaggagccctgtggaagtccttgtggtctcatcctccattaggaaaaaatgggaaagctactgtgtgcgttgtgcacctttgcccagcgtcttcccatccactcggcagactccgctctacgcccctgtgcctgctcacgatcggcttgcacatgtgtgaacatggcgctcccttaacccacttctcatggaaacactgggtttcctcatttgccctgagctctgtagggctgccagaaaggatatgagaagactaatgactggtctttgggcgttgcaacctattgcttttcacaatacatgaagatctctggacttactrtgttcctagtatactggctttaaaactttgttttagccagaaagcatgttcttcataggaactctttcttaaaaccgtaagcaaataagacagcctaaaatagaacagattgcacaccaaatttcaaaacataatttgagcacacctttccaatacacatatatttatttataagccttatgtattgctttgctagtatatgaggtgaattttgtcatagataaatagatattttaaaatgataaatgaaaaggtttttatgttcttatttcattttaatagckgtacaaaaggctttttcacactaataattgcagaatatttattcatggttgaacatattgaggtataatgagtcacagatctaagtttactttgttatttagttttcgtggatcttacagcttaaaaacgtatcccccaaaggaacaatgcagaatataaaatatatatttctgtataatatacacttagtgatcataagcataaacccatgccatataatcttcttggttattttgagaatttggaataaatttcttgttatatctgattatactgtactgttttttaccttaccttatacctgacaagtagtttacataaggaagtgtatcaccctgccattttcttctgttatcttgtgattacattattggtactagtttatttttaaggcacctgcccatattataggggttagtttatttttaaacaggcagtgtgatttgtagattactatcccgacacacaaaacataacacagtgtaaacaattaaatacatgagggccctattgtcatgcctctstcttgtggaaccatcagtcttccatcagtatacttcaaatcatgtaggcaacacttcaccatctaatatagaccaggtgagcgtgccagtgtaagttcatatattaagtagtatttagcttcagttctggcatatgtgaaatctgtgtggtctaacatgatagtcactagccatatgtggctatgtaaattcagttaaaattaaataacattaaatattccttagttatactgtccatatttccagtactcagtagcacatgcagctgtgtattagaccgcatagatttgggagcagttgcatcattgtagaaagctttactcaacagtattgttgtagatggaaatagagaatccagcattttctttcaatcccccaggagaacatyttacttcctcgtgaagtacacaaacccctttggagaccactgctctggtgaagcacctttctgatggctttagtgagtggacattgtgtaaagcattacttctgtgtatcttttatagatattaatgaatgctccctgagtgacaatctctgcagaaatggaaaatgtgtgaacatgattggaacctatcagtgctcttgcaatcctggatatcaggctacgccagaccgccagggcygtacaggtaaggggagaccaagcaggcctgaaactcatatgtctcaaatcagcctaggaaaayttttggcgctgaattataatgaaggctatgcaaatcctttgtcccaaaaatgaatgtaagactaggggcagatctcagttattgtgtgatcttgcagcagactcactcatcttaatgtagaaaatgctctaatccccatagttcttctatttctgagttaatcttagggtactgcacttaaacatggaatgctgcctaaaatgaaggtgaaagaactaagaaagataatgttcaatcaacacacatagtggggagaaaaattcaaagccacattagcattatctgtttaaaaagaagaaaactccttttaaggaagcagacctgacaatgtggttgcaatgctgttttcacagatattgatgaatgtatgataatgaacggaggctgtgayacccagtgsacaaattcagagggaagctacgaatgcagcygcagtgagggttatgccctgatgccagatgggagatcgtgtgcaggtatagaaaggaaaacacacrggttttgtacatctaactaattttttcttgaaaatatggctccagatattaccaagtggaaccagatagaaaacaaaaacatttgagattgatgaacgacatttttattttcatttgatgctaattttktatcatcagacattgatgaatgtgaaaacaatcctgatatctgtgatggcggccagtgtaccaacattcctggagagtatcgctgcctctgctatgatggcttcatggcttccatggacatgaaaacatgcattggtgggtatcataagaaaggataaacatttatacacacacatgcacacacacscacatgcacacacaagcgtgataaaaggaaggctttttctgttgttattttaaaaattcaaatcattttactagaactgtaaaatctcaggaagaattacttttaaaaatgtctaaaggcaggttgtatatttatctataacacgatgatttgcggatggattatattttagatcttgcctgtgtatttcagtattatgctattcagtgtagaagatagcttttaaattactgtgatgagcacatactaagatattgaaaataaattttctagatgtcaatgaatgtgacctaaattcaaatatctgcatgtttggggaatgtgagaacacaaagggatccttcatttgccactgtcagctgggttactcagtgaagaaggggaccacaggatgtacmggtaggtttcaagcttgtgttctctgtatttcaacttctcagatgtcaaaggccaactttcaacatcatttgttctctggcatctcttagagcggttacctgccaccagactgtgactgtgtgtgtgatgagtgtgtgacctataggatgtgtgatggatttggctggtctctgtggtagcacgctgtctgagccacccaccgtggggctggctgtgggctgtgacagagtgagtgagtaggagtacagtctggttcccatggccctgaccacttatggtcgttcatgcagcatcagtcactttctgagtatgactgctgcccgcttggaagacattcatgtacaaagagcaccaaaagacccgaggatcccggttgccatttacctctgcacttcttttaaactagtaaaaattaatcaagtttcattgagactctttccctttcttcctttctcccatcttttcctttcttgtttgctcttctgtttgcttttgtcttctcttctctgtgcccaaattgcctttctctttttcctctcttcactttccttctttgctcactttgctcactttgtcttttgttccctttctctactactactactaactagttttagccttttgcatgcaggtggggctaggatgtgccggggtcaaggttttggatcacgtattcctcagtgcacaatttaagacttatgtgtgatattttttcaaggcaggtggtggaagacttaagagtccaacccagcccttaagctgacccctccagtaaggggcagattataaaagaaggtgttctttgcatgttcaccactgacagggttgatgtgaagccagtagtgtgtgtgtgtgtgtgtgtgtgtgtgtgtgtgtgtgatttcagcatctataatatgtaatcgttgaactagatagaacacattactatttatagtcaagaaagctttggagaaccaaatctacataggttatacatacatatatagggatatgtgtgtgtgtatacagacacacaaatacacacacacacacacgcacacacacacactggcgaaagcatctggctactttccagataacattcccagtgaatatttttctataatctcaaataagtagaagaaataaaaatatacacctaaatgaatagttttttttaaattctgtaaaatatttatattgattttttaaatgacaaatgatcatgtaattttaaagagaataaactattactttttttaaaaagttagattcttatcttcatgaaaaatatgtaataaatatcaataggaaggaatagcaccatctattattggaaataagatttctcttgatctgtaatcgaatgtcctctttatggtgttgtgtctgaatctgggcagggaagaaggccccaggataatacacatacctgccrgggagcaacactgctgtgtctctctctcttctactggaaagtggctgavagttgtttctagggaagaacttgttttattaggatcatgaattttccaagtcctcttggagcctacaaaaattaaaaataaaagttagttaggctactcttttctccatacggttgcatctttactttaaaatgttacctatacaaaaatatacttggaagtagaattaattagtttgtattttgattttcttcttatgaattatgktttatcagatgtggatgagtgtgaaattggtgctcataactgcgacatgcatgcctcatgtctgaatatcccaggaagcttcaagtgtagctgcagagaaggctggattggaaayggcatcaagtgtattggtgagtttgcaaatgtaaatatcctttgctaaggcacaaatttttaaaggctcttttttgcatggttgtagaatcatgctcttcacttttattaattcctttataaaaaggttatcttagttgcaagataattcctgcctaagggtgtcctttacccttaatataaattatcaaaatttcaacagtatgccttggcacctgttttttaatgtgtttttgttcagtaaaaattgatatgcagctggtgatccaaacacagctgtatgatgaaaaatgactagtatgttcttccaatcttttcaaagaagtaatcagtgagatttaaaatccagtggaataaatggagagcaatgaaaaggttttttcagataacctaattttttagtaagtcatcaataccaccatcttattagaaaatagaattcttcttacaggaaattgtaaatgctttcttgcattccaagaggtcttatttgaagaaaaaaaataggcaaattctccaagttttatggttcttgagccagagtctaagaagtcttttatatctgagagggaagggactagaatataccctgagtgtcattcacagttttgtgtaatatgcttagtgtttcacatgccttacaataaagcatttttccaactagtaagaatttctaggtcaatttaaaacagaaaagaaagcaagctaaactcacttccccctgataacttacaaaaaatatataggccctcagtaaggattaaagaatagctttaagatctcttaccaaaactataagttaatttgaatatatacttttttatccattcaaatatttcatacttatcaaaagtttatgtactgactatagaatttgaagtatcagagcttccaaataactgctaaataacatcctgcaatggcttagtgaagtgccagcctctagtccagccatctttccagggttactatcataacttttcaaccataccctcattcccattttcrtagccccatgtgcctactctttttctctttttggcctcccatttttatgcttcttgtccatctgtcattttggccaactattgcaaaacagcctgcctctgatacaagacattcagctgtgtccagcctcctgtgctccaggatgtcacccaaattcatcctctcctttacatcttctttcccctactctagtcccaaccagagagagtttctgtctctctcacatgccctcgctcttcgtgtytgctgaatgctaaaagaatcccctctggtatgttggcttgttccctctctggccctcctgcratccattctccacgtagcagcaggaggaagcttttaaaccatggattcgatctcttcatagtcttcactataacccattgaattcgggataaaattcagcttccctcccttggctgcgggtttccactgtctctctagcttcattgtccatcaccctctgtctggtgcattctgctttgccactctaacctcctttcattttttcagtcacactgagctcttttcctccttggtgtcttaccatgcactcgtccctctgcaaggaatatccttccccacctctgttcagcaagttaattgtttctcatcctcaggtctgaccttaactaaaaactacttcctcaatgggggcatctttgttcctgcagcccaaatcagatgccttttttattctctcatggcaccttgtaacttttcttcatggcacatatagcaagatttagtttttttctgtgtttaacatctgtcttttctgctcaactaagggattccatgaggtcaagaatcatatctctgtttcctcatctattaaataaacttaaaaactctttgttaattttcctgctctgaaattcagtatcaccttcagaattgattcttctactgataaggaaaccactaataaaattcaccctcagtagaagtcagaatgagatctaacactaatttgctttaagctgttaaaaaattcacgttgactagatatctcacaaattgcttgaattcataattttggcccacrtttatagcctggacattggacattgggtctgagagcttagcgaattagaactgtgatcctgcaaactaaaatgcctgtcatttatccagtttatatgtaaattaagacaaacgataatctttccaggtgcttaaatgttccattttcatttctgaactttattgctgtgttctgcagatctggacgaatgttctaatggaacccaccagtgtagcatcaatgctcagtgtgtaaataccccgggctcatamcgctstgcctgctccgaaggtttcactggtgatggctttacctgctcaggtgggtgacagtcctgaggtgtgctctgacgggatggtcatagaacactctatatgcttccttatttgaagaaaattataattaaaggagacaaaagtaactacctctttttttatacttgacttgcaggtgactatgtatctttctcttacattaaacacaaaaacctgaaygactttccaratatattgttggaagttttcaaataacggcatttgtaacaatcatgtactgttaatgactcgccattttatcttactcatttgtaacacagtggttaaaaaaacacaggctttgtctggatcagactacctggattcaaatcttgyctatgccattttttgcctgtaactgtaagtgaattacttaacttgtctgtcctgatttaaaatgcaatagtaataatacaattttcttttcttctttktkattcctaaatgaatggcatgggaaaactgttcagctttttaagataggatatatgacctatccaatcactgctatttaatgtgtttatcaaagtctcagtagtttatcacctggcattgaaaggattaaatggaataatacaaataaaggacttagaagaacacatcacaaaatttcagtaaataatagcttctgtttggcttctattcattcatactctttgaggataaagcatcctctcattatatgcatgtataagactagataatcttgctggacgtaaagttgaatactcttcagtttataaaataagggtttctcaattgattttcagtacacactttaaacccataattaacggatagcctaaatttttttcaaattgtggacatcaaaaatgcagcctcatcattttcaaatgcctgtttaaggaaacatgtttattcagttttaaagcttcataacttgtagccttagagtttgcatctttcctggcatttctccgcactgtggtgtcaaggaaagagcatggctttcatgtcagacacatctgcaatcagatcctggctcagtcaacatgcattattagctcagtgtggctgtgtcagcttacttggctgctcttagccacaggttcttcctcttctaaacctcaggagattggtgaattcagtgaaaaaatgcatgtcaggccaccagcacagcatatggcaaatgacaccctcactaaacagtgatttttccttccctcttattctgcttgatagaattaaattatctttaaggtctgtgagtaatgtctgtttgtgtaattaagataggagtatttttataagattgtaatgacatgaaagaaactttccccattcccatagtgtctttaatttgctttaaaacacttgaattagtgaaaaagccagttatttattcgaatactataattttctcaaagaatgatcaccattttaagattaattccaatgttctttttcatatctaaataatgttggcatactactgacaagagaaacaagacaaatgtgagagatgtctgcgtttctcctattaataatattacaattggatgttagggtgcaggttaaatagcttttctttaattatattacaattgaatgttagggggcaagataaatagattttctctcaggttgataccctcctttaagtgaatgtgattaactgttgtttcatgttaatgagcattaagtcaagccagtaaawctgatctatttatagagcaaggagaaaatgtgtcatgaaatttggaacttaacagagatgtaatttgcttttttgcacagatgttgatgagtgtgcagaaaacataaacctctgtgagaacggacagtgccttaatgtcccgggtgcatatcgctgcgagtgtgagatgggcttcactccagcctcagacagcagatcctgccaaggtgggtcaccaggattccaactcattttcaagttggatcaaccacagtaaatgaaaccacaacaagggctggaacaagctccacctggaagcagaatacatagcacatgctgcactataaaagtcattcgtttaagcgtggattattttgccgaatgaataatgatgatggcggctttcatctcttatgaagttttccyggccaagagccagtagttggaagtttggatcattcttttttcttttttaaccatttcttctcttctttctcttttttatcactaaatkaatgacatgtggagaaactattcagcttttaaagtatgctccattacttgtctcaactaccactatttattgtgtttatcaaaatcataaaaagctcatttttggcatttaccttcgtggttgagactgctgtctgtatgtctgggaatggaagtcctcttcagggattcagcaagggctgtacttttgcttaatactagtggttccttattctaagtgatgacatcatccacctttcctagaaatgggtctttgtgcctrgtatgatatctttccaagaaaaagaatttggattttctattaaattagaaactcaattcacattatatatagtttgagccatcattgtgttatgaatagggactatatgaaaatataaatgaagaaaggagagattgaaaataatttatacaccatagggcttcagtagaatttatgattcacagaaaacctttaaaaaaactcagtttgggccaggcgtggtggctcacgcctatattcccagctctttgggaggccgargcaggtggatcacctgaggttgggagttcaagaccagcctgaacaacatggagaaactccatctctactaaaaatacaaaattagctgggtatggtggctcatgcctgtaatcccagctactcaggaggcagaggcaggaaaattgcttgaaccctggaggcggaggttgcggtgagccaagattgygccattgcactacagacyggacaacaagagcgaaactcagtctaaaaaaaaaaacaaaaacaaaaacaaacaaaccaacaaaagaactcagttttccagtcatgcagcctcatgaaaaaaaaaaaaatacctaactgctgagcaaaaatgataaaatgaaacatattaaaaacttccccctacatcagtatctaaccagaatgaacagaattggcaagtactggcacacgtgcacacacacatatacacacacaaacacacaattcatcagcatcaaccaaacaaaaccaaattatacaacctgcggtggttcagagtggagcccaactctgctccaccatcagaagtggcactgaagaaagaaagtgtgccaaaagttcatgaaattctccagaaatagcaaccaatttggagagactcagaaaaaggggatgaacagtkggccgtagggaagatgaagtkggaaactgaaagcgttcgtgcttctacgtkgacccacaagattgggcagaatctratccattttatataaggcaactgtagggtgagttcctttttttcccaatcctggtttcttctaagcactgaagcttagtagtagaattagtagaaaatgtgaatcaatgtaaatgtggaatgacatgatttattatctacattagcttgacaagagttagtgggagaargaacaggtcagcagtagccactttcaacaacataaattctttatacccagacaggatttttccttcctaattgtgtattactttatgggtggcataggccctttcagaacttccctctcccccaagatggtgctaaatagttactgtttactgtacttccytcacatctagttttctcatatgtcattaccacagagagaaactcctaactgacagggaagctgagggttggcacacctgtagttcaccctcagttggaccctctgctccattcagctgaacaccagcttttgagatccaaaaaatgtaattccatggttctggccattctccttgtttttctctcctctccacaaggtctgggtcatctggacagtttctcctgaatttactattttaatcccttgttgtctacccatcttattataaatacatgatcctccgatgaatattttccactaagcatccacttctcaccaaagtctcagaatttctatagaattcaaaaaattattgaagttggccatttcccagtaaattccaccaaaatgggggaatataaaacctggaggagcccctgcaggaacatgagagaggactccattaaatggaacagacctacatacagaccattttctataatttctgaggagagagcaaaggctaagttcatcaacatagagcccagaggagctctccccattctcaatcttctctccctccaccttaygaaactttgggcgactgaatacagctttaatgaaaccgaaaccagctatcttccacataaagctctgataaagaaggaaagatatcaaragatgttatttaaactgtactaaagtagatagaagctcttgaaagagcagacaaagtagtgtctatacaagctgaaaaacagtagcaactatgcaggcattctgtgaaaacgaaaggaagaaaaacacaaaatcagctaaagaaccaacccacgatggaagaaaacaactcaagaaataaaacaaattttccataggtactttatgccatatatgatcttaataaaatcataaatgtagttgaagaagtttgtagagattataagagctatagagtaaaagggagattgtagaatcaagggaagtaagaaatggggaccaatacagcaaaataagaggactattaaataaaaacagcaaaaaacagaggacatacagatgaaaatgtaattgctagcatagagaaagggcctgagataataacagtggaaagaggaaagagaaattaacactattagagaaaagacaaaaactataaacatcagtataattggtgttgctgaagagagcccaaaaaatcaactagaaaaaaggtactaaacaaccaaacattttcctgcaataaaacaaagaactgaatatacaaagcctaaattgtaagacaaagacttagatttgctacatttgtcaactttaatcatagaggaggattgaagacttcagatagaaaaggcaacgcatctcacgtgcaaagacacacataggcttaaaataaagggatggaggaatatttaccaagcaaatggaaagcaaaataaaaagcagagattgcaatcttagtctctgataagacagactttaagccaacagagatcaaaagagacaaagaagggcattacataatggtaaagggatcaatgcaacaagaaaagctaactgtcctaaatatatatgcacccaatacaggagtacccagattcataaagcaagttcttagagacctacaaagagacttagactcccacacaataatagtgggagactttaacaccccactgtcaatattagacagatcaacgagacagaaaataaaggatattcaggatctgaactcagctcaggaccaagtggacctaatagagatctacagaactctccaccccaaatcaacaaaatatacattcttctcagcaccacatagcacttattctaaaattgaccacatgattgaaagtaaaacactcctcagcaaatgcaaaagaatggaaataataacaaacagtctctccgaccacagtgcaaccaaattagaactcagggttaagaaactcactcatggccgagcgcagtggctcatgcctgtaatcctaacactttgggaggccaaggccggtggatcatgaggtcaggtgatcaagatcatactggctaacatggcaaaaccccatctctactaaaaatacaaaaaaagttagccgggcatgatgccgggcacctgtagtcgtagctactcaggaggctgaagcaggagaatggcgtgaacccgggaggcagagcttgcagtgagccgagatcacgccactgcactccagsctgggtcaacagagcgagactccatctcaaaaaaaaaaaaaaagaaaaagaaaacaaactcactcaaaactgcacaactatatggaaactgaacaacctgttcctgaatgactactgggtaaataacaaaattaaggcaggaatacagaagttctttgaaaccaatgagaacaaagtcacaacatgccagaatctctgggacacagctaaagcagtgtttagacagaaatttatagcagtaaatgcccacaggagaaagcaagaaagatctaaaatcaacacgctaacatcacaattaaaagaactcgagaagcaagaacaaacaaattcagtagctagcagaagacaagaaataactaagagcagaactgaaggagacagggacacaataaaccctttaaagaaaatcaatgaatccaggagctggttttctgaaaagattaacaaaacagatagactgctagtgagacaaataagaagacagagaagaatcaaatagacacaataaaaaatgataaagggggggatatcaccactgatcacacagaaatataaactaccatcagagaatactataaacacctctctgcaaataaactagaagatctagaagaaatggataaattcctggacacatacaccctaccaagactaaaccaggaagaagttgaatcccttaatagaccaataacaagttctgaaattgagccagtaattaatagcctaccaaacaaaataagtccaggaacaggtagattgacagccatattcatccagaggtacaaataggagctggtaccattccttctgaaactattccaaacaacagaaagagggactcctccctaactcattttatgaggccagcatcatcctgataccgaaacttggaagagacacaacaaaaaaataaaatttcaagccaatatccccgatgaacattgatgcaaagattctcaataaaatactggcaaaccgaatccagcagcacatcaaagagcttatccaccacgatcaagtcggctttatccctgggatgcaaggccggttcaacatatgcaaatcagtaaatgtaatccatcacataaacagaascaatgacaaaaactgcatgattatctcaaaagatgcagtaaggccttcgataaaactaggcctttgataaaataggcccttcaataaaattcaacaccccttcatgctaaaaactctcaataaacttgatatagatggaatgtatctcaaaataataggagctatttatgacaaacccacagccaatatcatactgaatgggcaaaggctggaagcattccctttgaaaactggcacaagacaaggatgccctctctcaccactcctattcaacatagtattgaaagttctggccagggcaatcaggcaagagaaagaaataaagggtattcaaataggaaaagaggaagtcaaattgtatctgtttgcagatgacatgattgtatatttagaaaaccgcatcatctcggcccaaaatctcctaaagctgataagcaatttcagcagtctcaggatacaaaatcggtgtgcaaaaatcacaagcattcctatacaccaataatagccaaatcatgagtgaactcccattcacaattgctacaaagagaataaaatacataggaatacaacttacaagggatgtgaagggcctcttaaaggagaaccactaaccactgctcaaggaaataagagaggacgcaaacaaatggaaaaacattccatgctcatggataggaaaaatcagtatcatgaaaatggcccaactgcccaaagtaatttatagattcaatggtatccccatcaagctaccattgactttcttcacagaattaggaaaaactaccttaaattatggaaccaaaaaagagccagataatcctaagcaaaaagaacaaagctggaggcatcacaccacctgacttcaaactatcctacaaggccacagtaaccataacagcatggtactggtaccaaaacagagatacagaccaatggaacagaacagagccctcagaaataataccacacatctacaaccatctgatctttgacaaacctgaaaaaaacaagcaatggggagaggattccctatttaataaatggtgctgggaaaactggctagccatatgcagaaaactgaaactgcacccctttctttccccttatacgaaagttaactcaagtggattaaagacttaaacataagacctaaaaccataaaaaacgccagaagaaaacctaggcaataccactgaagacataggcatgggcaaagacttcatgactgaaacaccaaaagcaatggcaacaaaagccaaaattgacaagtgggatctaattaaactaaagagcttgtgcacagcaaaagaaactatcatcagagtgaacaggcaacctacagaatggaagaaaatttttgtaatctatctatcggacaaagggctaatatccagaatctgcaaggaacttaaatttacaagaaaaaaaacaaccccataaaaaagtgagcaatggatatgaacagacaattttcaaaagaaaacatttatgaggccaacaaacgtgaaaaaaagcacatcctcactggtcattagagaaatgcaaatcaaaaccacaatgagatatcatctcatgccagttagaatgacgatcattaaaaagtcaggaaacaacagatgctggagagcatgtggagaaatgggaacacttttacactattggtgggagtataaattagttcaaccattgtggaggacagtgtggcgattcctccaggatccagaaccagaaataccatttgacccagcaatcccattactgaggatatacccaaaggattataaatcattctgctataaagacacatgcacacatatgtttattgcagcactgttcataatagcaaagacctggaaccaacccaaatgaccatcaatgatagactggataaagaaaatgtggcacatatacaccatggaatactatgcaaccataaaaaaggatgagttcatgtcctttgcagggacgtggatgaagctggaaaccatcatyctcagcaaactaagacaggaacagaaaaccgaacactgcatgttctcactcataggtgggagttgaacagtgagaacacgtggacagggagggaaacatcacacactggggcctgtcggagggtgaggggctaggggagggatagcattaggagaaatacctaatgtagatgacaggttgatggatgcagcaaaccaccatggcacacatayacctatgtaacaaacctgcacattctgtacatgtatcccagaacttaagtataatttttaaaaaatgcaattcatgagctaaacagaaatattcaatatcaaaagacattagatccatgcccacagaattctgaggaaatgtgaaaaatattatacttaatattaattgtaaagataataagcattttcttacacatgaaataagtcaggtagaaaacacctgtgatttcataaaagtcccacccttcttggagaaagaacaatcagcaatgaaacacagccaatcaagaaacaaatggagaagttgtcataaaaccattattgatccctttaagtaaataattagtactaaacactgtggaaattatggtaaactgccatagacattaaaaaagtgaacataattaaataaaaataaggagttggaaggatacatgagtgctaattttcttataatttattgtatagaattcattaatactgtctaammattacatttcaactttagcataaagccmaamaatttttagcgttttttattcttaacattagaaaagtattttaaaactgttgagatgatggtaaatttatctgatgcatacaaattgttttagcttcactgtctaaatatgtatataaaaatgtctcatcatcttaaatgattctttctagatagaaacatttttgagtaattgttttgctgttttgttttctgtattatttgaatttttgaatatttatcacttttataaaggaaagacagtaatcttttaaaatgcgttcttttatacaacaattacattatttaggtggaagaaatttctaataaagttcatttaaaagtaaaatggatcgggcatggtggcccgcacctattaatacagtgctttggaaggccaaggagggaggatcccatgagcccaggagttcaagaccaacctaggccacatagggagaccctgtctctgcaaacctttttaaattagctaggtgtgatggtgtttgcccatagtcccagctacctggaaggctgaagggggaggattgcttgagcccaggagattgtggctgcagtgagccatgatcgtgctactactccagcctgtgtgacagagcaagaacctgtctgaaaaaaaaaaaaatgcatagtcagaaggataataatacaattccctttttgagtataaattaacacaattcaattgtaatctagcttaaagagtttttactcatttatataaagagaataactttcttacccccaacacaataaaagacacctttgcacatgttaaactttaaacatgattggaaccataccttaaatctaaaatagttgaaaccaatattttaactgggaagaatgaccaaagaagtcttgtttagacttaagatataactgtctgaggacagcagtttagaatgatttgtctagtctagcctaaaatgacgtgcctggtctgcattctcagagtgttaggcaatttatatacataaatatccatcctctttttgagagtagaaattcagattatttccacagctatacatacacattgattttcacctgagtgaggagtgataacttcatatttactaactttgagttaaagcctcatggaagactctcataaacttttcataaatgaatttttagtccaattcagtagagatattttaatgaaatttactagaatgtggggtcaatggatcatcttattaacatgaaattagggaagaaattagttctctgtttaaaactgctttataataacagataagattacaaaataaaaaggaagtaaaaamtaaaaagttaatatttatttaattaactaaatttatttaattaactaaattaactaaatttatttaattaactaaattaactaaaaagttaattttaatatctccaatatttaaaatgattatgtatttgttttttcataatataaaacatttattaactataaaatgtctgctgtttgcactaattagttagaatctttgaatttgcttttatctttttttcacaatttcatttctttgacatgtttatatttaatttttgtattttgtgtgccttgagccaactcttctttaagtatatcataatccaagtcattcaaaatactagacactcattttacgaagaaaacagtattcttgtatatcttagttccataggtgaacattagttgcttgccctttacacttatctacctagccaaaaaagagaaaaaaaaagccttactgaataaaaacatctgagggggcagaaaaatgcgctaatgttagacattacattaaaattttaaaatgtcttcttaaataagagattacttttttttaaaatcttcagatattgatgaatgctccttccawaacatttgtgtctttggaacatgtaataacctgcctggaatgtttcattgcatctgcgatgatggttatgaattggacagaacaggagggaactgtacaggtatggtcagttaccagctaagttgtgttctgattcattgaaatgagtattctgtgctaagcataaaaattcctgagatttctgcttagctaatctatgcattaggttacacatttttcagaaaaagaaaattatattcagatgcatttatttgtaactatggaattgatgcatttttatgtaaataatattaaattgttatctgtatgattgttaaatatctgacatgaaactagtaaagtgtctctttatatatawgttcatgtatatgtatatatagtacatgtatatatatatatacatgtatatatgtgatttttgttaagcaaatagtgacataattttttcgtcctcagagttgcaaattttaattaattacaatgtatttgttaaggatgttaaacgctgtcataaatactctgtccttgatgtatggaacctgttttaggtatataccaaaatttaagatatttattttattgtgttgagtctttcctagtgatctttaatctactcacttgcaaaaattccaccaaattctttggaacagcagtatgcacagaaaaagtaaaaatggtaacctgggcattttaaatgcttctcctagatattgatgagtgtgcagatcctataaactgtgtcaatggcctatgtgtcaacacgcctggtcgctatgagtgtaactgcccacccgattttcagttgaacccaactggtgtgggttgtgttggtaagtaaagctatatgaaacaaacaaatagaattatcaagttgaatattcagactctcttgataatgaaccgtgatgagtgtttgctacagttaacttaaaaacaaaacattatgtggtcgcctttattgtgtttctcttccaaatcatctgctccaccttcctcctctcacggacttgagaaccaaggcacagagaagtgcagtaatttgttcaaggtctcagagcttgaaagtggcagagctaaggcagtggcccaggttgccacctggctccttgtccagygtttggccaggataacccagagtggtggtatagctgttagaatatctatttctcctgcctactggaagggtcatatagcaaagtaaatgaagtgatgagaagcaaggaattagagagatggatttatgagccaaaccattggagcagaagaagttggaaggtgacagggaggaggaggaggccgtaatgaaggttcagaatctgtggtcagcacctctgatcttaaaaaaacaattgtccagcttttactatctgcactgttactgtattttcctagagaaggaaatggcctggagaattttctggaagtatacaaaaaaagggaggggtggagaattccttgcttgagtagaaatctgcctactgtcctcagtgtcagtttttkggcctgcagcaaatggaaggaatatttgctgcyrtgatttatacacaacttatatactgttttcaagttttggagaatacttttaattatcatttacacaaactccaagtctgtgttttccattcaaaataattcatttggtaaagtttgagtgccttctgtctaagggctggagttgcaacagtgaacagaacaagcacattctctgcttttgtgtttacattctagaggcagggagataaataaaagcaagaacaaacagaattggcactggaggtggttggaggagaagcgctatgttatattagggatgggggagtcacagcctttaaggaggggacagaccaactggaccactgagggaagcctccagttacaaggagaagccagtgcaaggggcatgtggcaggagaaggctggcgttagagacacagcacaaggctgcttgtagcaagagaggagtgagtggaggggacagggatgaggagaggaatcagaggagcagtcgcccagttcgcaaagtgattctcaacccaggctgcatagtaaactccatttagaacctggaaaagatattgatgcctgttacaccctcagaaattctgactcactggggcctcaatatttcttaaaaacctccttggaacaaaggctgtgaacaggcagctcataaaagagaatagtctaaacattaaaaaatgtaagcaaacaaatgcccaaaatcattaggaataagaaatccatttgaaacaattatatgaatgccactttacacttcatatactggcaaaaattaggaaacctggataatgtgaagtattggtggggacatgagccttgaggagcattctgttctgctggtagaagtgtagaccagggcagcactgcagataatatgtttgcacaatggtacaccgattaactgtcartgtataatcaattttagtttatgagtttctttttgaagcaattcgatttgtatggattgacactttattgcgttcactcattcttagtgccaaaaaaacaaggacttattctatctcaaaagtgccataggaatctattggaacctttcgtaggtctgaaacattataaaatattaagagatcttgtttttcctttgtcttgaaacattttgacgttttatcatcctagctgttatttttgtcaatgttcaacattatgtccaatggatacaacagagtaaaataacgagaagtggaaaattatggcatcacctagaagtaacatgcattagtgaaataaaatgtcactgttttatcatccttcagttttcttattatattgtcctaaggattgcatcatttttcaagaaagtgcaagagaagactggagacaccttacttgaaatcttcttttagcatttattgaacacagttgagaatttagaagtttttacttactggccataatttttggcaaagagaaaaaaatgaagttgagtcaggtaactacaaagagacagagagcagctcttttgtctagattctaaaggtgatggtgaagtgaatcatctaagcacaatcccagactacgtgtcttcagagaccaatatcctakgtgaatgttttcaaacttcagaatcagcaagtgaaaggacagtgtatttccgtagacaaaggaaatacagtattctcatccacttagtcaatagaaagaacttcaacccgcaatatttggtaacaagaacctgaaccatcccaggtttgtggattctttcatattttcatgacgtttctgtaccaaaatttaattgatatgattcataagcagacagagataaaggcaggtatgtataaaaggttactggaaggaaatatgtgatgtagaaatacagtcattagattgattgttctaattggtgttgataaatctaaaaatgaaaacattttctatttgtggagactttaaagaagacggctgtcctctcatcaacaaaatcatgaactgttaatgttttcaaacattcctttgggtattgcatttttatgaagcaagaacaagaagaaccagaaataatgataagctagaacctattagagatgtgtttgaaacctggaatcggtttttacaaactggatatattccaagttcatgaatgacagttgataagcaattagttgcattcagaagatcattttgagtagaatatcttcaaaaccaagaaaatatagattaaaaaattgagttagctatcattaaattgttattaatattgctaataaagttgttttcaacttttttcttctgtatattagttttataatatacctttcttctgtaaattattttttaaaatgacttaaaaatattaaaaattaaagggttccttggatgtagttggtaaatgatgactatttttcctgactgaaggctaagtataggcaaatcctgtgaatcaacaattccttttgtggctgtatatgccaatggaattaactcacaggcccatacagagacacatatatgatgttcatcacggcattctttgtggtggcaggattttagaaaccatttttggagaggagggtttttttttaaaagcaattatacaccacggagttgacagactggaggtttacagaacaagcatgactagaaaagttataaaaatgaaatgagatgtatgacaaaagacatttgtgtacatttaaaatgaacacattaaaacaaaaatatttattttgcaagagcacatgtaaaaagtaatagcattaaatacatttggatgatctggtagggaaggagaataggaatgaagaataggaataaaagagaaagggagggggaagagagagaaagaacaggtgaataaatgaggaataaataaacctaattaggctgggcgtggtggctcacgcctgttactccagcactttgggaggctgaggtgggtggatcacaaggtcaaaagatcaagaccatcctggccaacatggtgaaaccccgtctctactaaaaatacaaaaattaactgcgcgtggtggcaggcacctgtagtcccagctactcgggaggctgaggcaggagaatcacttgaggcagaggttgcagtgggccgagatagtgccactgtactccagcttggcaacagaggaagactccgtccccaaaaaataaataaacaaataaatataaataaacctaattagaagggggaccatgagaatcttgcagcctctgagatctgagattcagcaacaaaaacwaaatgcaaaatctgagacaaaaataaagtaaaataagtttttttaaaaagcccaaatgattctaatatgcagccagggatgaaaattactttgtagactgctaagaactctagattttattctgattgagaagagaagccattggaggttgcctgacctaaggtaatgctattgaagggtcactctggcttacagaaggtaaagtagaccatagtttagtcaaggatggaagttgagaaaagagttagaaaactattacattagactaggtaaagggataatgatggtggctggaactcagttggtagtgattaaaaaaaaaagatagtaatgatagaggcagtggtaagtagacagattccagatatgttttttttttttttttttttttttgagacagagtctcgctctgttgcccaggctggagtgcagtggcgtgatctcggctcactgcaagccctgcctcccaggttcatgccattctcctgcctcagccaccctagtagctgggactacaggtgcccgccaccatgctcagctaattttctgtatttttagtagagacgggttttcaccatgttagccaggatggtcgattccagatatgttttgaaggttgagtagacagcccttattactggattgaataaggaatcatagtaaggagtcaaaaatgatgtcaaagcttagggcctgtgcaactgaaaaaaaaagtgaatttccttttattgaaaatgcagaagactgggagagaagacggcagattttgtacatggaggaaagagcattgacagtttgattttagatgtgttaactttgaaataattattagatgttkaagagaagaaatgaaataggcaattggtagaagggtctagagttcacgggagagatgagatacagaaccataaatttgagagttctcagcaawaaagtagtatttaaacccatagactcaatggagtgatctggatgataactgtagagataaagaaaagccttagattagttgatcccttaartatcttctctaagtttgttgcaggctatcttttccaaaacctgcaaagttagctatgcaagttgaaactaaaccattggataaactcgtgatatagattaattatacaaaaaatgtattgtattcctattattggaggtccagtatgtcccaaatgagaaatttcttactaycttgtccattccatgagtataggaaaatatggtctatgtggatttctaaatataggaaagtctgccatgattggcttcctctgactcaatctcgaaaaagctgaaaagcaggagattgcttggtacttaaggattaaaaggaacctttcatgttaacgtacaaaatttgaatttcatcctttgagtgacttttccctaaaatggagtccttactatgtaagcaagggcaactgtaagctccttygttgctctgcagacaaccgtgtgggcaactgctacctgaagtttggacctcgaggagatgggagtctgtcttgcaacaccgagatcggggtgggcgtcagtcgctcttcatgctgctgctctctgggaaaggcctggggaaacccctgtgagacatgcccccctgtcaatagcagtaagtacaaagctgaagaagaggaagaaaaccaactggtatctaaagatttgttgccattttattcctgagctgggagtgaggagtgtttagtgaggacaaaacaaaaaaactgaatttgaactactttcagtgatyactctgaaaccagccaagaatgttaaaggatttgaattcctctcttcctatgttttatcatgatatgttaaaaaaataatttttaactgtaatcatgtatgaatagtactaatatcagttcttcatgatgtcacagataaagtgcattcctgattcttctcaaaggttatttagttcagcttcataggtgtgttgtattcttgaagtcaattatagaatgccttaaattgaaacatctgatatgaacatgaaccaaagcctgttttctctagtcttaatttactagctaaaagagctgcaagggaattttttctttaattaaaaacaaatggttcgtgttattctactgtgtatgtgattaataaagtatgatcttttatgtaaaatatgtaactttaaatgtatttgaaagggcactaagaaaaatttggatacaccccttaggatgagtatattgagcctgtcatttgctgaatgcttgctcattgtctcagccacttggacacaggtatcaaacctcttatttttctattgttttgtagctgaatattacaccctgtgtcccggaggtgaaggcttcagacctaaccccatcacaatcattttagaaggtgagctaatcccattgtcacccagattcaaacaaggtaaagagttaattatagagaaaagctggcagaaaacctagggcagagcagccccgacaagataatttagtaaaattacagatggactttaattactaaaatgttaaactactacttttatcaagcagtaatgatccattgcagtgatttgacgtctgactgttctgcagagaaactctttcccattgtcctctaccttgaataatctccaacttaactttattcattttctcagataatggtaaaagttctgtgacaaagccragaagatatttgagyagaataaacttgccatctaagtgtgcgttcatttggatgcatagaaatctgattcttacaagatcacacttttgaaagctctaatattaactcttatccttagtgaaggtgtttgttttaagtgcactgtctccctttttgtagacattgacgaatgccaggagttaccaggtctctgccagggtggaaactgcatcaacacttttgggagcttccagtgtgagtgcccacaaggctactacctcagcgaggatacccgcatctgtgaaggtgagatgaatttgatgcctaaaatgctcagtgctgtttaaaacaaaatggctgctgaggcctgagggaaaggcccatcctcacattctacaaaaggctcaattaagattggttcatagcttttttttttttcatatcaatgtagctaagttgtatgatgatagacaaattaatttatggctcgttgccataattcactgtatttttccaggagggttgattaaatataaattgggaaaatggggtagtgtgaaaacctaaaatattaagtaagttattagtgaaaatattgataagwattacattttacataggaaaaattggtaagctaaaatgtgaccattaacttaatattgatcagtaatttttaaatgttggactatatggtatgaagaagttcaaaggttatgcagctgccattcttgcttccatccccccacttkatcacatggtatttcaattcttttaggggcctgtctcaccactaaactgggggcttctggagacaaggtccacatcttactcatcattacagccataagttctagcttacagtagaatctcartattttaattgtgaaatgagtgaatgcttctaactgaacattaaacatgtagcgtaattatttccattataacttttcttttggaacatgtttgataaatgtatctggaagaaataggatgtaatgaggagaacaaccagcagctgcactgctttaagaatctctgaatagttactaatttgaaagaagctacaaagacaaaggctttcccaacctgcattcactttaaagttggcattaaaacttagcctaagtgacataggacaaaagcaggctttaaagaaattccaattgaagaatgcgaattgcaataaaaaaaaaaaaaatatatatatatatatatatatrtgccaaggaaattattttttgccactttagaataatttcttttgatgctttatattttttaatatggggatttttttcttttgaagaaagatgtatctgtgttatataaatgcatattwgggatattttctttatttctaagttttgcataaatggggatttagagaatcacctatgctttgttcagtcatctaagtaatataaattcattgaaaaaatagatttattaattaatagatattcttgcctactctagatattgatgagtgttttgcacatcctggtgtgtgtgggcctgggacctgctataacaccctgggaaattacacctgcatttgcccacctgagtacatgcaggtcaatggaggccacaactgcatgggtaggtaaagaactctgagattaattagagcacagttgttgacttcacacataaagcacttacgtctcagaattattgtttggaagtttggaagttcagtcttcgtgaattgagatatttcagagtcttgcaagctgctggcttagtatcaagtttttgacctttgggtatacatttaaatttttaaaagcatgagtctaatgtagaaaatttcctcaaatgttatatattcttaaatttttcatctccattcatatagtgtgaacattaatttacaaataaaagaacatttaaattttaatgctttatttttttaattaaataaatgattttgagagaaaaacamatatgtattaacattgtctcccaagaaaattataagtgaaawcctttaaggataaaggagagatgttaatctaaaaatgatttatgtttaaggagttattttaagatagcttcaaatgactaaaaagggtttccgagttgtgttcatcaggaaagcttgatgtctacagctgtgtgggcttcattataaactactcgtggatacaaatggctagtttctttgtttttctttatatagacatgagaaaaagcttttgctaccgaagctataatggaaccacttgtgagaatgagttgcctttcaatgtgacaaaaaggatgtgctgctgcacatataatgtgggcaaagcctggaacaaaccttgtgaaccatgcccaactccaggaacaggtaagcacacggctcgtgcatctgctgactgccacatcagtgatacacgcatatatctaacagtatagtcaaagtcactgcatgctaaaactagagatgctcagttccaaaaattcccaagagcatcatatggttctgtttcccaagtgatcctctttgggattcaaacactaacttctgagacattatgttggataggcttgtgaatcctgaaaataagatccattgctgaagagttagagttgatagcattagtccatttaaactcattatcttaaactgtgcttgtcaattattgatttattcatcaaacaaatatttcttgagtaactactgtatgtcactgtgctagacatggaaagtataatatttggagaaaaactaaattcaataaggatttttttttagttcagccgtggaaaatatgcaaaaagtgttttttatgagcgaattttacataaaagcaacccattgtcataatgtgccttttacatcttcttcctcagacatcagtgaaatttttaggcaaaaaatagagcttgtcttcacttggtcatgtttttttcacaagacagtttcttttgaaagaaaaaatgaaagataatagagataagagcaaaaatgcttgtcttaaaattgctgtccatcaggctctcttttatgacctggagaatggcaacttttaataactatagatactaagagttgaaccagtaggccaaataagaaacartgattatgcatttgttaccaaatattacttagggtatatgtatttaaatgttccatttaatgtattgatgaaattaaggagagaaatgatgaaaagcaacacataggcctttttcagtggctccaattcactggtcaaatggattttcttagccttatcttgccattattatgttccataaaattaaatagaaacattcctacaattctcaactttaaaactccatagttacaaatttaagatcattgatttggggaattaaaatggcactttctttgtgagaagaagcgaaaggcttggagttgagagacgtgtctgtatttaaatcaaaactcttaagatacttattgtggaacctcctgcagagtatgtatcctttctgaaactaatttctcatgtataaaataggaataataaataattacagtgactaattcatatgggtgcaatgacaattagggagattatacatataaattataatttgmagatttccagacaattagaaaccattaagttgarcatctgtggtctttctatctgttctcaatactcggtatatattgatggatgaaatatacaatatccctgacctgatagcacttggaatatagtatgcagtttaagttttatataatactgttttcaggagttttactcacttgtatagcagtgagcgtcagaagcatttttcatcttgcaaattagaattcttttaaatttccattgatttggttaattatgtgtaagaatacytcttatagtccctattttatttcataatgcattgtttttgatgactcaaatttcacattccaatagacacagtaaaaaaaaaaaagacaaaattcgcatctcattcattatacattgtttacctatttcccctctacaacattatttttgcatgtctatacctttgtgcaatctgtaattcctttttcaatttgtacttctctttttttttaatctttatgtattggatgttttttaaagctctgcatattaaaagaaaaagtatttaaatatctaaatggacattttgaatcttataatgatttacttgccttctgatatcagagcagtaaaaagttaatgagagtaatagaaataacaatgataataatggtaaagaatgcctagatccactcctagcagaagctggcattgctatcaaataaatataattgaaatcaaaatgtctggttgtgaataatgtaaaatatatttgtttgtgaaagtaatacaaaatgttattttgaaggaatttgagaaatttaagagtgcattgctttgtttatattttaaagctgactttaaaaccatatgtggaaatattcctggattcacctttgacattcacacaggaaaagctgttggtgagtttttccagattatgtttgttttaatacatatgtgtagcattctgtaaaaatctattctatgtttttaaaattcaagagtaccacaaaatataataatctgggatccaatctaatatagttagataagagagaaataacaggcttacaractctaaccaagtattaataatgatactccatcagcrtagtctggtgattgggttatggtagttatgtgactctctcgatatttgtcacatccaccaagctaaagcttcagttgtccttgtcatgcacattgtattacatgactctaaataatctaccttattttaacctttagttgctattttcttaagtacattttttaatttttggtgtatttttgcagtatccctttttactggtctaaatatgaatgtgcagacttatttttcatattaattaattccttctaaatgtacattgtgttgctcactctagcttccttcctcaaagatttgataagcaatataatttttttttttgagatggagttttgctcttgttgcccaggctggagtgcaatggcgcgatctcagctcactgtaacctctgtctcctaggttcaagtgattctcctgcctcagcctcctgagtagctgggattacaggcacccaccaccacacccggctaattttttgtatttttagtagagatggaagtttcaccatgttggtcaggctggtctagaactcctgacctcaggtgatccaccctcctcagcctcccaaagtgctgggattacaggcgtgagccaccacacctggcctaagcaatataattttaagtctccattatgaatatatgataaaataaaatacatacaatgatgaaaacatagctttttaaacaaatgaatagcagcacttagggtaacctgaakaaggggtttgattgcctagaaagttcatttgctatattgactctgaaattacttggtatattttatcagctacttagattttttccatcactgtttctattttctggtatatatgtttttataaaccaaaaaaattagctatactagtatataatagatttttgtgacactgaatatttgtactcatcccagggtacatgtagcattattcaaagttatatggtaagtatattaaacagaacaacatatatttgaccaaatctgttccatttcagacattgatgaatgtaaagagattccaggcatttgtgcaaatggtgtgtgcattaaccagattggcagtttccgytgtgaatgccctacaggattcagttacaatgacctgctgttggtttgtgaaggtaatctgaataaagtatgtcctttatccagtataatttggtatacatatatagcatttagatggtttctgatttttactatttcttctacaatttttcaagagttgatcatcaaagtgtgacgtgaatgtaatgctaatacaatactaaaaaggactctttaaaatggaattgttgctctttcagatatagatgagtgcagcaatggtgataatctctgccagcggaatgcagactgcatcaatagtcctggtagttaccgctgtgaatgtgccgcgggtttcaaactttcacccaatggggcctgtgtaggtaagaaagaggctgactcattctttggcactgagcacaagattccttagatttcctatcaaaaaatacttcaagaataatttgggaaagattttctcacttaacctgttcatttatagtgaacctatttcaccatatcttttagatgattttgttaagaaaatagatctcttcaatggatttccccaggattggacctaaaataaaataatatccttcagataccaataaacataaaaaaatttgcatgattaaaaaaagagggttggatactttgaagtcctgctcattttgattcagctgttgttatggttcattttcagcctgcctataataattaayagcagattagagaaacacaactgtgaaaaatgaagaaatcttaataaaaatcagatacatgtaacatttatttttttytgttttagatcgcaatgaatgtttagaaattcctaacgtttgcagtcatggcttgtgtgttgatctgcaaggaagttaccagtgcatctgccacaatggctttaaggcttctcaggaccagaccatgtgcatgggtaagaagggcatgtggctccagggagtgaagtggggctggggttccagaacagatcacagttccatcaagtgccatgagtaactactatgtctctgtcagaaacaatcttgcaaaaaattaactaggtcaaactatttaagtcttgattcaatrtaaaatttgcaagcagggacatactgcaatatataaaatttgcaagcagggacatactgcgatatgttcgtcagttcagtgattcacagctttttctccagaagatgttcacatggcttgacaagaaaaaaccctctgagccacttgggcttgtgtggaacttaccatagcacccgctgccctttactttcatgtttctactcaagacaccattttggaatgcaagagagtagtaagagtgacagcattaaacttaataaatttatacacatatgcacatacttttttaaaacaaattgttgaatagtgggatttatgtacatattttgtgttttatcccttaaaaatagctttaggagcaaatatagccaaactctttaaaaattcccagtagctaatgtaatgggtagccaagtgrtaatagagcttartgagtacttgctgagctgatgattaataggttttcaaagacagatgggctggatgccatgaagctgggactgagtataaccccttaagtctgatgtcagcagttggctctgcctctgctgaagagttttctttctgtgctttgcacttgaaaggggaaaattaaatttaaaacttggctacttgtaattagcattttctcagtgtagaaaaggctagggctgttcagctactcttgatattcaagatattatctatgtgaatattaaaatcagatttcagtactgcaggactggtttccttcatgacacatccatacaacagggaatacctggagtatgtctccaggttcatccattgcctcctaaagccctccctttggacttctcctataatggcagggaaaattctctaggtgatgtttatacaaaggaatatacaggatctggtcttatttgcatgaactccctaagaatgcttgtttatacatgcttcttcttgctgtactcccagagagagtatgatttaccaaaaaaaaatatgagatttatgattcagaatttcgtatggggaaaatctgtccactcataacaattcttccatgataaaagctagtcagattcttcagtaagacctcccttatacagagcttccttcctaaagaacaataccagcccccaccctttttttggtgtggtagagtttcagcagcctggaattcatagttggggagtctgctgtctcatatgatgaatgacctttctaaatattttcttaattcagtttttttgaaggctaatagtgaattctaataaacctcmatttggatttcattacttcatacaattaagtaaactaaagtttgtctttgtttttctgctcaaattaagggatttaaatttctgggtaagtgtttataatgccttttattatgaaagaaattgtttcagtattttagaagatcagttttatttacgattattaagcagacctgctcattaatacatctctactagggggatgctctcttaggctatgtctgagtattgtctgagtacagtcagtacctgttaaactgtactattttcttagaattttacaattttgatycttgtaattttgatttttccgtatctcttactcattttcctcaagtagatatgagtttctagtactgaatgaggaaaatctaagtaattccataagttaaacrtataaaacggttaatagcccatttttttctagttaaaaattgaattttttgagcctatatttctttatagatgttgatgagtgcgagcggcayccatgtggaaatggaacttgtaaaaacaccgttggatcctataactgtctgtgctacccagggtttgaactcactcataataatgattgcctgggtaagtacttcattcagtcctttattgcttctatttcatttccacacaatgtgctgaaataaaaaacaaaactaaagaacaaaaaaaaattatattactaaaattgcaaatatgtgccaaaagatatataatttcattgactggtttctagttaactgaaaccatagtattggcctaaattgtcacaagacaatatactcktgaatccttttgtcaatcagccaatcatttcaggaaaaaaaggtcattcagatcacagtaaacatatttggactgatttatggtttagggtatttgtatttccttaatgagatcaaaaatagacccttcattgtctcaatgttattacaagtatttcatttaaatccattctggattatttacattcaagtaccagtagcctcctgcttacacctgtcatgacatttcattttccatcagcttttgaagccagaatgcctttccccacaaaaataatgaatggtgactaggtttctagataagccctcagaaatatctcctatgcgccatacaggactttagtctttggcccacagcaacacacaaatgtgaaatggaaacatagtgagtgggagagggtcctgaagtagttggaggagagaataagagaaatgacagcaaacgtttattccttgtttactgcatgccaggaactgcatgggtaatttacagcataatgtgttgtaattcgcatggccctgcaaggtatgtgaaagaacttaggttttctaccattgtgggactacatcagagctcatccccacgtcctcatttaacccaacataagttcctctctgttttctttatttttcaaaattccacaattgtgaaaaaaagtagagctaattggacattttattcaactgctgccttcttgactagtttcttagagcctttgtacagtcagggagaactaaaacttaaatgaaaacttaatacttaatgtcttttttctttcaattatgtttgatatcagcaattccagtgtttttaatatcattgattttccwgtaataaataagctcatttmtttgttctctgaatatgctcagcttagctccaggtaaagtatatgcaaattaggcaatcagattaaatcccacatatcctcctgcctgtgggaaaataaatatttttcagttagaaagaatggaaagcttcaccgtaaaccttgatttttatctggttctaaattcatgagttatattaatatcaaaaatgaaaaaaatgtatctttatggttgaaaaatagtaggactctatgggatcctattaattataygatccttatgatatgtgccatttttctctgttgatgaggagttgtaatatgggatttcttataaatgcatgccaataagtatgtttttaagtagcgtcttgtgaaacaatatacatgttaagagctctttctgaaaaacatactcctgtttgcttacagacatagatgagtgcagttccttttttggtcaggtgtgcagaaatggacgttgttttaatgaaattggttctttcaagtgtctatgtaacgaaggttatgaacttaccccagatggcaaaaactgtataggtaagtatttaaataataagcagtctttgtggtgttatgttttgtaaaatgatgatatgtgcctccctcctttcacttaagaactcattaatatttcatttaatcatcagagcacatgaccaagataagctatgatggaaaattttagtataaggtatcaacaatgggaatgtctcataggcagtgtttttactggggacagagcttgaggctgtccatgtcttaagaaaagtaagcaaagacaacaaataaagaaaattagccacttgccaaataagaaatatccaagatgtcagaagagtatctttggtaatatttgttcatggtgacccagtagatcagaggacccgagttgaattcatgttaatatcatttggcagacagataaatctatgtaacaattatctcatgcttaaattattttttctcttctttttctctaaagacactaatgagtgtgtcgcccttcccggctcttgctctcctggtacctgtcagaatttggagggatccttcagatgcatctgtcccccagggtatgaagtaaaaagcgagaactgcattggtaagagtaacatttattctgagrcccactagtagttcagtatagtaagacatggtaaagactctggaaacatactaagtgccaaccactgcaagcatgctgacctaaggaattaaamatatagctgcctacatctgttttactgaaccatcagaaatgatggtgagaataaaaaacttagggatgtaggattttttcattaccagaaatctaatgctagtcaaagaattttcagcatatgctaattaatcttttttccaaatgtcagcagcgactttcagtgaatttaaagagtgtctacaaaaattgtaatctttggcacccagttttaaaacagctattaaaggtgtctagggtcttagaaatgtgaagcagaaaaatctcgacaatgctgttgagacattctttttcttgggaaggcctcatgtcaaagcagcaaatattaatccatttgtcataacagatgtttttctgttgaaacccttccagcacacacgaacactgtaaccacatcaaaagtgtgtcccagaattgcctagtggacatgatgaagtccgaccttttttacagttcactttatttcacttttatacaaattattttttacagccttgttgaaattcagaagcaccagcattttaktgtggtttttctaacgtgaaaagatgctaaggatattttctgcctttgaattatccaattctatcgcccttggcaagattctacctaaagatatgtcattctactgttcatatttaagggagttaaatagggcagaaggaagtagtttacttcatagaatttaattattcttcagaccacataattagataccatgggtatcccctagtcattctgattttctgatttgtatagttcattataagactatctagtgtttttaatacttaaaaaataataaacaataatactagaatcatctcagtgagaagtttcttgaaaagtttaaggggggaggagccaagatggccaaatagsaacagctccggtctacagctcccagcatgagtgacggagaagacgggtgatttctgcatttccatctgaggtgctgggttcatcttactagggagtgccagacagtgggcgcaggtcagtgggtgcatgcactgtgcacragccaaagcagggcgaggcattgcctcactcgggaagcgcaaggggtcagggagttccctttcctagtcaaagaaagtggtgacagacggcacctggagaatcgggtcacttccacccgaatactgcggttttccgacgggcttaaaaaacggcgcaccaggagattatatcccgcacatggctcggagggtcctatgcccatggagtctcactgattgctagcacagcagtctgagatcaaactgcaaggcrgcagcgaggctgggggaggggcgcccaccattgcccaggcttgcttaggtaaacaaagcagcccggaagctcgaactgtttggagcccaccacagctcaaggaggcctgcctgcctctgtaggctccacctctgggggcagggcacagacaaacaaaaagacagcagtaacctctgcagacttaaatgtccctgtctgacagctttgaagagagcagyggttctcccagcacgcagctggagatctgagaacgggcagactgcctcctcaagtgggtccctgacccctgacccccgagcagcctaactgggaggcaccccccagcaggggcagactgacacctcacacggcccagtactccaacagacctgcagctgagggtcctgtctgttagaaggaaaactaacagaaaggacatccacaccaaaagcccatctgtacatcaccatcatcaaagaccaaaagtagataaaaccacaaagatggggaaaaaacagagcagaaaaactagaaactctaaaaagcagagcgcctctcctcctccaaaggaacgcagttcctcaccagcaacagaacaaaactggacggagaataactttgacgagctgagagaagaaggcttcagacgatcaaattactccgagctatgggaggacactcaaaccaaaggcaaagaacttgaaaactttgaaaaaaatttagatgaatgtataactagaataaccaatasagagaagtgcttaaaggagctgatggagctgaaaaccaaggctcgagaactacgtgaagaatgcagaagcctcaggagctgacgcgatcaactggaagaaagggtatcagcgatggaagatgaaatgaatgaaatgaagtgagaagggaagtttagagaaaaaagaataaaaagaaatgagcaaagcctccaagaaatatgggactatgtgaaaagaccaaatctacgtctgattggtgtacctgaaagtgacggggagaatggaaccaagttggaaaacactctgcaggatgttatccaggagaacttccccaatctagcaaggcaggccaacattcagattcaggaaatacagagaacgccacaaagatactcctcgagaagagcaacaccaagacacataattgtcagattcaccaaagttgaaatgaaggaaaaaatgttaagggcagccagagagaaaggtcaggttaccctcaaagggaagcccatcagactaacagcggatctctcggcagaaactctacaagccagaagagagtggcggccaatattcaacattcttaaagaaaagaattttcaacccagaatttcatatccagccaaactaagcttcataagtgaaggagaaataaaatactttacagacaagcaaatgctgagagattttgtcaccaccaggcctgccctaaaagagctcctgaaggaagtgctaaacatggaaaggaacaaccggtaccagccgctgcaaaatcatgccaaaatgtaaagaccatcgagactaggaagaaactgcatcaactaacgagcaaaataaccagctaacgtcataatgacaggatcaaattcacacataacaatattaactttaaatgtaaatagactaaatgctccaattaaaagacacagactggcaaattggataaagactcaagacccatcagtgtgctgtattcaggaaacccatctcacgggcagagacacacataggctcaaaataaaaggatggaggaagatctaccgagcaaatggaaaacaaaaaaaggcaggggttgcaatcctagtctctgataaaacagcctttaaaccaacaaagatcaaaagagacaaagaaggccattacttaatggtaagggatcaattcaacaagaagagtgaactgtcctaaatatatatgcacccaatacaggagcacccagattcataaagcaagtcctgagtgacctacaaagagacttagactcccacacattaataatgggagactttaacaccccactgtcaacattagacagatcaacgagacagaaggtcaacaagcatacccaggaattgaactcagctctgcaccaagcggacctaatagacatctacagaactctccaccccaaatcaacagaatacacatttttttcagcaccacaccacacctattccaaaattgaccacatacttggaagtaaagctctcctcagaaatgtaaaagaacagaaattataacaaactatctctcagaccacagtgcaatcaaactagaactcaggattaagaatctcactcaaaaccgctcaactacatggaaactgaacaacctgctcctgaatgactactgggtacataacgaaatgaaggcagaaataaagatgttatttgaaaccagcgagaacaaagacacaacataccagaatctctgggacacattcaaagcagtgtgtagagggaaatttacagcactaaatgctcacaagagaaagcaggaaagttccaaaattgacaccctaacatcacaattaaaagaactagaaaagcaagagcaaacacattcaaaagctagcagaaggcaagaaataactaaaatcagagcagaactgaaggaaatagagacacaaaaaacccttcaaaaaattaacgaatccaggagctggtttttkgaaaggatcaacaaaattgatagaccactagcaagactaataaagaataaaagagagaagaatcaaatagatgcaataaaaaatgataaaggggatatcaccatcgatcccacagaaatacaaactaccatcagagaatactacaaacacctctacacaaataaactagaaaatctagaagaaatggataaattccttgacacatacactctcccaagactaaaccaggaagaagttgaatctctgaatagaccaataacaggttctgaaattgtggcaataatcaatagcttaccaaccaaaaagagtccaggaccagatggattcacagccgaattctaccagaggtacaaggaggaactggtaccattccttctgaaactattccaatcaatagaaaaagagggaatcctccctaactcatgttatgaggccagcatcatcctgataccaaagccgggcagagacacaaccaaaaaagagaattttagaccaatatccttgatgaacattgatgcaaaaatcctcaataaaatactggcaaaccaaatccagcagcacatcaaaaagcttatccaccatgatcaagtgggcttcatccctgggatgcaaggctggttcaatatatgcaaatcaacaaatgtaatccagcatataaacagaaccaaaaacaaaaaccacatgattatctcaaaagatgcagaaaaggcctttgacaaaattcaacagtgcttcatgctaaaaactctcaataaattaggtattgatgggacgtatctcaaaatagtaagagctatctatgacaaacccacagccaatatcatactgaatgggcaaaaactggaagcattccctttgaaaactggcacaagacagggatgccctctctcaccactcctattcaacatagtgttggaagttctggccagggcaatcaggcaggagaaggaaataaagggtattcaattaggaaaagaggaagtcaaattgtccctgtttgcagacgacatgattgtatatctagaaaaccccattgtctcagcccaaaatctccttaagctgataagcaacttcagcaaagtctcaggatacaaaatcaatgtacaaaaatcacaagcattcttatacaccaacaacagacaaacagagagccaaatcatgagtgaactcccattcacaattgcttcaaagagaataaaatacctaggaatccaacttacaagggatgtgaaggacctcttcaaggagaactacaaaccactactcaaggaaataaaagaggatacaaacaagtggaagaacattccatgctcatgggtaggaagaatcaatattgtgaaaatggccatactgcccaaggtaatttacagattcaatgccatccccatgaagctaccaatgcctttcttcacagaattggaaaaaactactttaaagttcatatggaaccaaaaaagagcccgcatcaccaaggcaatcctgagccaaaagaacaaagctggaggcatcacactacctgacttcaaactatactacaaggctacagtaaccaaaacagcatggtactggtaccaaaacagagatatagatcaatggaacagaacagagccctcagaaataacgccgcatatctacaactatctgatctttgacaaacctgagaaaaacaagcaatggggaaaggattccctatttaataaatggtgctgggaaaactggctagccatatgtagaaagctgaaactagatcccttccttacaccttatacaaaaatcaatccaagatggattaaagacttaaacgttagacctaaaaccataaaaaccctagaagaaaacctaggcattaccattcaggacataggcatgggcaaggacttcatgtccaaaacaccaaaagcaatggcaacaaaagacaaaattgacaaatgggatctaattaaactaaagagcttctgcacagcaaaagaaactaccatcagagtgaacaggcaacctacaaaatgggagaaaattttcgcaacctactctgacaaagggctaatatccagaatctacaatgaactcaaacaaatttacaagaaaaaaacaaacaaccccatcaaaaagtgggcaaaggacatgaacagacacttctcaaaagaagacatttatgcagccaaaaaacasatgaaaaaatgctcaccatcactggccatcagagaaatgcaaatcaaaaccacaatgagataccatctcacaccagttagaatggcaatcattaaaaagtcaggaaacaacaggtgctggggaggatgtggagaaataggaacacttttacactgttggtgggactgtaaactagttcaaccgttgtggaagtcagtgtggcgattcctcagggatctagaactagaagtaccatttgacccagccatcccattactgggtwtatacccaaaggactataaatcatgctgctgtaaagacacatgcacacgtatgtttattgcggcattattcacaatagcaaagacttggaaccaacccaaatgtccaacaatgatagactggattaagaaaatgtggcacatatacaccatggaatactctgcagccataaaaaatgatgagttcatgtcctttgtaaggacatggatgaaattggaaatcatcattctcagtaaactatcgcaagaacaaaaaaccaaacaccgcatattctcactcataggtgggaattgaacaatgagaacacatggacacaggaaggggaacatcacactctggggactgtggtggggtcggggraggagggagggatagcattgggagatatacctaatgctagatgacgagttagtgggtgcagcrcaccagcatggcacatgtatacatatgtaactaacctgcacattgtgcacatgtaccctaaaacttaaagtataataattaattaattaattaaaaaaaagaaaagtttaagatcctgttgttcttccattttctttgctcatgctcaatcttgattcttctttgtctctgtgatccttctctttatggaatgctaataaaagtagtgtgtcagccactaggagggaaatagaaatacatatgcctccttgtattaggcagtcttggctacctttcctcttaatgaaagtatggatagcttttatttcattaagatatcatatattattatttattaagtttcagaaatatttcgttttccttcatctatcgttagcaatgacactagtttgcatctctgaaaaaatggttttaatttattactttttttttttgagacggagtctcgctctgtcactcaggctggagtgcagtggcattatcttggctcactgcaacccccacctcctgggttcaagtgattctcctgcctcagcctcccaagtagctggtattacaggtgcccaccaccacgcctggctaatttttgtacttatagtagagacggtgtttcaccatgttggccaggctggtctcgaactcctgacctcaagtgatccactggcctcggcctcccaaagtgtgaaaaaatggtttttaattaacttacttcactgtaagattttcttcagactagtatcttttctaccaacttttcccagatgacattctaacatgaccacacacacacatacacagacatagatatgtgtacacataccctgcacagatataaattcattcctacattcagtgggtatgacagtgaacatttggcacctttctaggtgctagaaatacaggaacatcatctttgctttggggtaacttactacctaaggggagagacctattttgtaaataaacctgttttgtgaagacatccttataatacaatgtgacagacattgtactggaggtctgttcaggagatgggagcaccgcaggaggttagggatcattatggtagttgtgagagggtggcagttcaagaaagcctgtcacagaggattgatgattgtctaggtcactcttaaatgttggataggattttactgatcaaccaaagaaagagaacagaagaggctatttggaaacataggcagcatgagcacgacaaggagcatagaatggctggctcagaagattgaactcaggcctgcggtcagcgtggagccattgcaggagttgttgtgtttgttttttttgttgttggtggtggtggcggtggtgttggtttctgcagttttttgttgttttatagaagggatgtgatgactcttttgttaaacttctaccaacataaattgagaacttgtgtgtgccagataccgtgctaggagctaaaggtgcaacagcgagccagacagacatgtcatgtcctcatggagcttacgttctaatgtgcctgaaaagtagtattttttcatgtgattaaaacattccattaaataagtacttcccacaaaaaaaacgacgaaaaatcactagtcaggcaggcatgcttatttattttaaggaagcgttctggggaaagggggaaatgataacactgtcaaaatatgtctcagccctccatttccataggcacagattttcaaatgtaatcagatggacgttttagaaaggcagccctggtggcaatgtgacaagaagaagacattcaggagatgtagacatcagttgagagactggtggcaaatgatgatggctgtggaagtactgaggaggtagaaatggctgccacattctgcttgcatgtggagtgaaaaaaggagagaaataggggtgacatggggatcacaatttggattactgagagagagttatcagggagaaggggaccagttcatagaacatttggccacatggagcctgcaatgcccatgagacatggagttgttcatgtcaggtaggcaggtagacatacatacacccctaaagatcaaagacaggaagrtggacatggacttgggactctctggcacatggttggttgaaattacaacttttgacttctgaagcaataatagtttatttttatgaataagttaaacatacaacgtaatatctcttgtctgaaatatcagctggctagtggacagtgatagtatggacaattgtttattttcaagtgttgaatggctaataaatactccccctgttctgcagatataaatgaatgtgatgaagatcccaacatttgtctttttggttcctgtactaatactccagggggcttccagtgcctctgccccsctggctttgtactatctgataatggacggagatgctttggtaagatttggmatgacttcactgtcacagttcacgcttagaaactttaaagctgaattgtaaaccatcatgctggtattagtcctaacaaaatacatgtctatgctaaaatacatctgcaagttaaaaatttaggtctcaaacataagcaatgaacaatttttaaggtactttgaattattgccactgtttctacatttttataaatttttttactaaaagaaaaattcttattctgatttatcagaatgactatgttaattttgttgttgtcatagcttttttgtttgttggtgtatgtgwtgcttttgatgtgatgtaacttactgaaagttaycttgattgtttttcttagactatcatgcaacagtgaaaaaagagactctgtgtggaaatcactttgatactgagcatgatttctcgaattttcttagcacattataaaaatattttaagcatattaaataattaaataattttatagccaggtcagtctaaattggcaaatgaaatcagcaatcgaagatttccagacctgccttaactgctgatctagtctgcatcccgtgttctacaatgagaaatgttctgtccaaacagtgttacaaaataatyccatctgtaatgtttgcttttttgattagatactcgccagagcttctgcttcacaaattttgaaaatggaaagtgttctgtacccaaagctttcaacaccacaaaagcaaaatgctgctgtagtaagatgccaggagagggctggggggacccctgtgagctgtgccccaaagacgatgaaggtaagagcaatgacatcatcagacagcactttgtgtaccagtttttgaatgtttgccagagtgggtttaaccatgtaatttaagaatattttgagagtgaaatcatctccttgcatataagttttgatggttcattgaacaacctagcctgagaaacttctttcagcttttgaataagacatgtstaagcacaggtggagttacccttttatttcattccccacctccaaggttagtattacttgctttcaaaagtacgaatttgagaggtccaaggcaggagaaagaagggaatggaaattatattccaggttgctccaggagtcccatgtgrgcattgtatcacaggctgtggctctcagaatgttacattaaattctgagaagctgagtcagcacaatggccctttacaggaaaagatcaatagcctcaggtctcattggcacccataaattataggataattcccagcaaactccagctggcttggcctctgggttagggatggcttctgagtgtgatgggcagggaagttctctttagctgctcagctttaaatgagcaaacagaaagaaccaggagcactgagcaggtggcaccctagaaggtggccctcactaaatatgcttttgaaataaatcataaaaataaaagagtctkgttatagacagctttgtaatggaaacataattaagtgtaatttcatgtatattgttcatcctttcttaagttctttgataatttcaagtcttcaataayggagaatttgtatttttctttgtagttgcatttcaggatttgtgtccatatggccatggaactgtccctagtcttcatgatacacgtgaaggtacgctttgatatattttattcctatattcttatttaatacacacgtattattttacatttattttataactcatgctaactttactatgtaacatatagtatattgtatttaatggatgtatataacccttattttgtatcatatacattatacrtatatcataagattatatcgtgatatatgaaatacatatttctctgacaaaagaagtatttacaagtctgtgttgaatagacatacacagtactggcatatctttttatttttattttatttatttatttatttattttgaggtggagtctcactctgttgcccgctggaatgcagtggtgcgatccagctgactgcaacctccacttcctgggttcaagtgattctcctgcctcagtctccccaagtagctgggactacaggtgtgcgccaccatgcctggctaatttttttttgtatttttagtagagatggggtttcgccatgttgcccaggctggtctcaagctcctgacctcaggtgatccacccacctmggcctcccaaagtgctgggatttataagcatgagccactgcgcctggccggcatatctttttatatgaggaaattcacatgcagttctatattttagatgtcaatgagtgtcttgagagcccaggcatttgttcaaatggtcaatgtatcaacaccgacggatcttttcgctgtgaatgtccaatgggctacaaccttgaytacactggagtacgctgtgtgggtgagtgttggctccacattacagaattttaaagttctrttttacttctcatattcagtaaaaggtctctcaggtaccctgggtgatggggggatttacaaatccaggataaatagctagtagtggcaccttcttcaccagtcttacattttccagtcagacctgatttatgtgaagatggagagagttamcaacctctgtcttcaaccaaacatacaaaatcttatgtgtcctagagacttacaattgccaaaatctctcattggataagaaatccattttactttatgcccttccatgcctgctcttgaagcagaggaccacattcttcttctggatttgtcatctttagggcgagtattgctgcctgggggccagagcattgcacattgatccttcagaccctctgcactacatagctgccagccagccaaggcccaaggkatgccagggttacatgtgcccttctcagatcctggaaatgggtgagggccaagcatgggtcttcctgggcattctcctgttaaactaaaacatctttgtggcagtttcttattcttctttttcagatactgatgagtgttcaatcggcaatccgtgtggaaatggtacatgcaccaatgttattgggagttttgaatgcaattgcaatgaaggctytgagccagggcccatgatgaattgtgaaggcaagtgatctttgtcttaaatattatttcttcttgacatagaaagtgttttttaatgtctcaatatttatttatattgcttctgatattctgctggtgagcatacggtggggttttttgttttttgggttttttgtttggttggttggtttttagttttcctttagtacagttaaaatagctgctgtaaagcccttgtctgatcattccagcatctgggtcatctcagggttggcatctcttgattgtctattcccttgaaatggagtcacagtttcctgccttttcagtatattggttaatgttggatttatactctggatattgtgaatgatatgcttcgaaatcagttatattactctgaagaatattgatgtatttgtcttagcagacagtcaactctggtaggcacaatagcagaccstcaggcctsagaagggcggtggctcatctgtcagttctttaaaccttactcactagcattcttgattttgccccacacatgcatagtacagtcatgccacttgagctgactagatgaaaaacaaatagtatttctccttccctggcattctttcctgggttccctttctttagcagacttggttgccctaagattccctcccctccttcctctggatggaatctcagaaagtttcttctggagagttagctaccagatgacagcactgccaggccrtggtcatctggagggtaatttcagaaaaatagaagccaaatcaatgtgaaattactccctactggttgtttgctctgagtttcagctcaccactaaaaacttcaggtactttttatattctttccggagtttatagctgttatttttaaagatgagtttgttaggtactaaattctgcgtaccagatgtgtaagttctactattctattgctttgtgtrtgaccrccaagtaaatgacatcaacatttagttacacaaayaattagaactctaggctgagcacattcctgtccattcctttggtcagatatcaacgaatgtgcccagaacccactgctgtgtgctttccgctgcatgaacacttttgggtcctatgaatgcaygtgcccgattggctatgccctcagggaagatcaaaagatgtgcaaaggtaaggcctcagactcrggagtagttcgaactttatttgtcatgctggagatacatcttaatgattttatagttctcaactaatttcttctagagctttrcagaaatatatatatgacagcattttgctagtagatttccatacctagataacaagacacatgatggtatttttgtaaaatcaagtccgagataagatgggttgagaagcccactattctcacactcttggattcttattaaggcaaagattgcccttccctaaacttcttatcactatgagcagtgctgaaacttacacatctggaatatagccaacagctgacaatggctgggcttctcctttctctgtcccaccataaaattacatgttaagtgtcagaagaccacacctgtgacttaaaagtactaaactacagcttgctccagataatttttaatttttattttttgttctagatctggatgaatgtgctgaagggttacacgactgtgaatctaggggcatgrtgtgtaagaatctaatcggcaccttcatgtgcatctgccctcctggaatggcccgaaggcccgatggagaaggctgtgtaggtaagcggtaagggaaggtgtctgcttatgtaatgcctccactcccagcctcattaatggcactactcccacatcatcttaactgcaagccaactctttttccagctgtgttaagrcagtgatacagctagctttcttccatctcagggtctctgctaatataataggttctggattgtggcatttatgcctgctcaagaatacatgcccttttgatttttcatattttaaagaaaattgtaaataaaactatatgtgttctgtaggtacatatgtaaccaagtaaatatatagaaaaacattgaaaaaggtaaaccctaattcatagaaggaattactgctagggaagacatcgagattagaagtaactagtctgaggtgattttagctgtatctgtcaattttaattattttacaaaagagtgagtttctgaactattctgaattacatgtgtcatataaaaaattatatatacaacaaattataattggattttttagtttmttttcatttgttagatatttcattcaaatatagtacttaataaagttaaaaatagacgtacataggaggtgtagttatgcagtgattctttcaaaaacactattcttccaagatctgttatcccagaagattaacctaaactcctaagtcatatgtgttcctccaaatctagcacagggcaaaatgctaataaccatgtatggaagaaaggaaatcagcattcttaatcatcgtgtcttcttactgtacatgaaatttcttttcattcatttctcttttaatttatttgaatgaaaacaatgtatgtatgtgctatgtttaatcagattggctaaaatacttaaaaatgtgttttaatttttatgcatggaaatttcttatttttataactagctgaattttatattatactatctttattacatttaaagatatgttgttgggaaagagggagtaagcactgtgatcagattaagaacacaggtttctggtcatggatctgccataaatgatctggatgacttgcaagtgattcaattctctgttcttcagttccttcatctgcatacagtgagaaacttagtctgcatgattgataggagtggtgggggtgggtgttgggaagggtgcatctgctctagctctaaaattctatcatcctctgaacttactttttcaaagaaaagaccaagagcagcattctacatttgtattcttttcgttgttaaacagcactacaaaagatacaggttctgaaacttttctgatcttcaagcttttcattataccatgctgatagctgaaatgtctgcaaaatttttttgatcatcacaaaactctttgtagaacactttcatgcaaacartgtgttttcacaactagaaattccagtttaaaaacagtaaaaatattattacaaagaaaaagtatttacaaaagtcaggatgaaaaataaagccacaaaaaaaatcaataaaaatgccaatgcatgaaattggaatmaaacttacccaaaaaagtcgattgcaacggaaactaaaagtattacagttaagggaattaaagttatacaggaaatctaagacctctttaatgaaaaccataaacctaatcagagacggaaacttgactatgcaatatattatgcctcagtaattatttcttaaacaaataaatgaatcaagaaatctgataagtagaacatttttttaccaagatcattaaattttcttctttagactttggcagactgtcccaattttttaaagtttatccaacaatctttgattagaagatcagggacataagcaaatgagaaaagtatggagtgtttttgtagagacccatttctacactgcagtgtgaaaataggtagatgcaaaggagaaaatactgggatgctatttaattatcaacaaactagtcttctagacatggagactgccggaggtgaggcaggaagaggagaagcagcaactatcagagattctaaggctttaagaactttatcagagccacacgactccctaaattacctgaaagcccgagtgtagtgcctcaagggtagagagcatggcagatttggtgagaggatgttcatacaacaaacatgaattgaaactacacattaggcccactttaggacccgtgaccagctacactatttttcagccagtagctgaactggagaaaattgttcaaagatgagtaattacacaagaccagtgtagctgaagcttgtgcaggagagtggcatgaagtgggtctaaaggtaggcaaataccatggaaaagaatttggttttatgctaaaagtgttacggcagagtgactcagagtatgggccctggggatggactatgaatgttagcaatctaggttcatgtgtgctagctctgtgaccctgggcaagttggcttaaatatgtgcctcagattcctcatgtaaaaacaaataggaattttgagcacactttcataggattattgggagggttaaattaaaaaattcacatgaaacccttagtacaatgcttggcatagagtaaaatttcaattaagtattagttgttatttcctattttacacatttttaaagatatctggctgccttataggtaatggatttgaaggaggtggtagcagaaacaagggtttcatttaggtgactgtcttaaacatccagacgagagaaaaaggaggctcagattagggccaccatagtgtggaaaaggagtggacagattcagaaaatgtattggaaataatcaacagattggatttctgatggattgattgaatatgtataaaagataagtcccaggatttttgcttgagtgactaaagtaaattagcttagtataataatttacttgatgctactgttaactgatatggaaaagattggaagaaacaggtttcgttggggacacagaagaataaaagttctgttttggtcatgctcagtgtcagatatgttctagctttccaagtgggaatatcaagtcagcagacatatttatgagccatagatgtaaattgctagcaaatcgatagtgtttgaaaaattatgggattgactgagaacaccaagagagagatcctggagagtaggaggagcagggctccttcccaggacactggactctggttgttccaatatttagagagactaaaaatattaggagactaagaaagagtagccagcaagataggaagttctccatgtccgtgtgatgtcctgagaactaaagtggccgcttttgtatgatgctactaagatgtagagtaacatagagttgtaattagatttggtgacttcttcaggaggtttcagtggagcacacacattaaggaaacaatcagtgatgaggaagtggaatttatcgccatggatcattcttccagaaattttgttctgaaagtgaatcaatacatgtggcagtagccacaggggtaataggtgaataagagagttttttgtattgttttaagatgaaagttactagagaatttatgcygagggaatgattccttgaaaagggagtattgtgaaatctgggaaggcaatctagagtaccggtgcaagagctggccttggagaaaaaacaaagatagtttagctgttggaagaagacaaaaggttgaaagtgagggcatagcccagtggttcataggggagagatgtctgatgtgtctgagtgtgtaatgtcattttagaaagtgagagtgtgaagatactaagaagtatagtaggattgttgacggaggatcatgtacccatttgagatttgagtcttgagtcttgagtctcattgaaatgaagcctgttttcctctaggctgtcatgctgcactggattggacatagagtaggtagaagtaggggagcatcggacaagagtgatggacaatggaaaggtcgataattgacaatcctgctgcagcccacaaattgtcaaagggtagaaagtacaatgctggaaatcaacattatttaggtagagcaacatcactccaagatacaccctattaaagttacaaatttcaacagaaaaaagaatcaggcaactttttttcaacctcttctcagtaattctttatgccaatgtcaataaagcaaaattaatctaagaatttgaagcacaaattatgtactrcagaagaaactgtattatacataatcaaacttggaagaactcaggcagtatatcctgagttcttccaagaaygcttttagttcaaaagccctttttgaaaaaaaataattcagacaaatcaaatacaattcaaaatcagggtgaatgacattaaggataggattagaccaaggcaacagaccttgcaccctcagattctagaaataataaactaaaaaaactttttaattcataactcattacttttgtatatacctttaaatttctgaagtaagtgtttttttctaaaaaaggaaaaaaataatcacaggaggcacatcatggtgaatttcaaaacactaagaagaaaatgaaaatccttaaaacttccagagagaaaaaccagatttcttacaaatgaacagtaacactggtttaaaaaataataataaaggagctgtattttgaaagcattctaagggaaaataattttgaactaaaatgctatactcaatcaagtatgaaaacaaaagaagacatggtcagaaatctgttttagaatacttatagccctcttaaataattacctgccgggcacggtggctcgcacctgtaatcccagcactttgggaggccgaggcaggcggatcacgaggtcaggagattgagactatcctggctaacatggtgaaaccctgtctctactaaaaataaaaataaaaaaattagctgggcgtggtggcgggcgcctgtagtcccagctactcaggaggctgaggcaggagaatggcgtgaacccaggaggcagagcttgcaatgagccaagattgcaccactgcactcctgcctggtcgacagagcgagactctgtctcaaataaataaataaataaataatcaccaaactacatacactaatttttttaaattaattraagtggaagaaataatataagtggaccaatggtgagccaagaaaccagtaagcctcattaatttaaacagatgctgatggcacactaaaaatctaacaaaccaaaacttctagataacatcaacatggcaggtggttcagggagagagcagagataagtaaatttatgcaaaggtgcttactatggccgagagctttcaaaacagatacttcttggcattgatagaaaattattcattaagaatgtgtgttgaagttgttcagtggtttccactgtaagaattgaaagaagactgtgacttccaaatatgagttcatagggaaaaggagggcataggaagagggcaatcccacagtaaatataaaacaatataaaatgtcaggtgagactctaaacatatcagtaatcatgacagatataagtggtttaaactgctggttaaaagataaatgtgtttttaagaattctgctaggttctctttaatagaattgtagtaccaaaattgaaatctgagataggttgaaaataaaaatattcaaggcaaatactaataaaagcaaagtgcatgcaaatataaatgtcagtaaatttttaaaaattttaagtataaagatgaaaggagccatttatcaaaaagatgtaattgtcatgcgctctcttatgctcctaacaacacagctttgaaagaaacctcaaacaaaatttacaaaatatcaaaaaagcacaaaaagtaaggatatagagaattttagtgaaaacaattttgttgaagtaggtttatttatcaccaaccaaaagagcagtattacttaaactkcctctcccattaactaccctcacagaccatagttgttcctgtgattttactcaaaaccaatttagcagcttgtcctttattcctggcctgtgaggcttttactgtactcatcacccatacccaacacccaccatccctctccccacacctttctctaatatcacagaaactgacattcttttccccagagttcccatccttgcctggtgtctcagggcaattctattccttttggaggccaattttcaattctatatattaacactatcccttctctgcagaggataaagaaaagaaagaagaagacaacattatcttaagaaagaacccaccaagaaggatgaagtaaagctaaaaataaattaatattcacacatgaccatttttaatctcatcatattagtattttggcaaagaagtgttaaataagatataacccattagaagatagcttgtaaactataatttgacarttttctcattattcatattgtttgtttttcyaaagatgaaaatgaatgcaggaccaagccaggaatctgtgaaaatggacgttgtgttaacattattggaagctatagatgtgagtgtaatgaaggattccagtcaagttcttcaggcactgaatgccttggtaagttgacatccaaatatattatacttggtagataaaacatctgttcatgatgtcatcacagaagagctccacatatatattcttgtctgctaaacaaatcccccaatctcaataatccacatgcttcttcttaaagatgcacatctattaaaatgatatatttgtacatgtgtgtgttatatgcacatctatgtgtaatgtaaataacaatcttaaatagtctttccaaaattaagattaattaagttctttggaaaatttggctttagtaaaacttacatcagaggatgatttaattccaaaagaaaatatttgcaatatgaggtaagctctgccacaattaatgcaaaataaatgccatatttcaaaaatgcagggaaggttactttttatattgtggtacagaaaaaaatgttttataaaacctttttatgggaaatatacatctcagacattatattttattttaatgttaaaatgcatacattataaatcattgtagttaattatggcagctgcaaaaagtgtgctgtagtaaaattcaaggtaaacaaagaaataagagcgctaagctgtttgactcatcacttgatttaacataaaaagagtatttcaactatatcacatttttttctgaatgacgtcatatgcttcaaattccaagaaatttttgatcaaaaaaacattttttgtttattgktatctctaatctatacctttactaactaacatcagtcttttaggaaataggaaaagtaacctacatataaagtgtaattttctgttcattttattaacagtttggctaggattgtttataaaactgtattaaagatttaattggcttttaaatctgaaaaaaataattttatttatatttttataaaatctactcagtccaagtgtttgaacagtctttcagatgtagaaaatatgagatatcagattgaataagtaccaagctcataaaatatagtctagagtttgctttccagaaactaatcctggcactcatttgtttaaaggaaaataatttaatttgattttcctttcacttgtattctacagaaatggtaggtcactatcatttagttggcaatggattggaggaaaaaatctatctatttctaaagtatagtatcactttttgtcaaatttaatagactgtagtctgtagtgaaagaatatgctatgaacttaactgccagcaaaacttaaataattaagacattaagctgtcttaattattcctaaggaggaaattcttgactgccctgcttaatttgaaagccaggataatgaaatgtcagttccgcatmcttaactctttctactttgccatttcagacaatcgacagggtctctgctttgcagaggtactgcagacaatatgtcaaatggcatccagyagtcgcaatctcgtcactaagtcagaatgctgctgtgatggtgggcgaggctggggccaccagtgcgagctttgcccacttmctggaactgcccaktacaaaaagatatgtcctcatggcccaggatatacaactgatggaagaggtaaggagttgaggaaatttattcatataatcaacacattaaattttatgaattcagataaatgtgaaggaaaagtgaaaaattgatacaatcaaaagagtagctaaaatgtttataccttgatatttatatytgatgtgtgttttcatatatatgtatatagaaagaataatctttgctaatgctttagagattttaggagttaatcttcgtatcagacctaaggggtagaatgtattattcccattttaacagatgaggaaaatgaagcacaaagctaaggtaacaataagtaattttcccaagatcacacactttttaagggatggactttgagggggtagctttctagattccccccaaaatcattcatgcttagattgcaaaatgggtagtcttaaacagggctttcaccagagtctccctttatcccctcccatcacttgagattatttttccatcacatccatgttgctgttcacctgaatgatgaacaggtgctccagtgctattaggaatgtttgcagttagttatstcatctccatttcttcatttctctttgattctaaccagttttacccttgcatatatgttaactcctgattgtttttgttgttttggtccacagatattgatgaatgtaaggtaatgccaaacctctgcaccaatggtcagtgcatcaataccatgggctcattccgatgcttctgcaaggttggctacaccacagacatcagtggaacctcttgtataggtaacgatgggcacctctatrtccaggggtytgggggctaatcagctactgtttcctgcaagtcactcattatcagtagagtgtctttattrtggagctttggaatatatattttattaaaatgttgccatcctctcaataatgtgcttcttaatcacacagcacttggcctttgtccagtaatgtgggatgcttaaaggagcctcagtaaagagagtttaaaagaacttgtgccacatccatgtgtcaaaaacagagaaactcttaagtttmtgattctcaggttgtaaacctgagaaacaaaaatcacaaatacatactttcaacattttatattttaatttaaaatttaaagtgcacatttgtttgtcactctttgactgaaggaaaagggctttttcttatgaatatgtgtgtttgtgtatattaagagaatgttttccatgtttctctgctattattttgcataaagtataccaagtaagcattacctaaataaaatttccagctgcggagcagtctcagtacagaatccttctatcattttacaatttatttttcttattcggttttttattgtctcactcacaccwatatatgacagtcgtggggcagaaaggacttagacttttgtcgggtctttccaaagtattcaacttcatttttattaaagaaaaaattttttttctcctttatatttcattagcttacttgatattctatcaaattacctatgtcaataacaagcacacttggcattaaaaggttaagaaaacccaactgacttctttgaaacagaagagcatgagtaatagagaataggccattaatcataagcattcagcattctgtgggcatcaacgccgtatgttatatggaggaaatggagattgtctgctatctcagagtccgagtaggaaagagatggcatatttcaaggaggacaattcaaggagggtctaacaaaaagactgtctatacacgtgtgagcagtgtgcacaaaagccaggaggcgtagtgctgtgtgctggggctgtactacccctgggccaaaagaaaagagtcagaagttattggaacctagaaaaagaaagttgtgctcagaggactgccttgagaggacctctgacagctgctccagtgactcagccagcctgagcctatcttgcagggagggagttgaggaaataagggccagacagaagacagagggcaagggagagcctccggatggagtctgtagagctccatctcttgggcctgagagcagagtggaccagggtgaggactgaatctgaaggggaaagtggaaggtttccagcaccatctgtgatcccacaagatgcttaaaggagcctcagtaaagagagtttaaaagaacttgtgccacatccatgggtcaaaaacagagaaactcttattaagtttatgattctcaggttgtaaaccaaagtatattaatctaaagaatgtagtaattttggacccagacagttgtctagacatcataatatttacccaagatccatagattgatttacaaagtaaacccgcatgttactttagaaaaaatccttctgtgcatcatttctctctggctatattccactttaagttgaacaggaaaaacaaaaagaatgaagtgagaatatggaaggaggaaagagtctggttgtttcttttaaccagtaatttaatcttcacatcacttttacttagaccttgatgaatgctcccagtccccgaaaccatgcaactacatctgcaagaacactgaggggagttatcagtgttcatgtccgagggggtatgtcctgcaagaggatggaaagacatgcaarggtgagtgaagagtctctgacaatcgtgaccctagtctgtatcttttctttcaaatttaaatattagattatcaggaattatgccatgtgcatcaccttcattaaaaggtcccatcctagtggccatgttattgctcatagaaaaactctaccaatatgctcattgcaggaagcagagaggattaaaacccaagttaaaacagtttgcttcttatagaaaactgcataaatwttaaaaaataaaataaaacaaaagttttggtatgggaagagatcgaaacaaatcactgaaataagatatttgttgttgttgcttatctaagcttttatttctctaagctacctttattacaggtttactgtggaaaagtgaaaatggataggtaaatttaaattttttgcttaggtagtatcaaaagtaattatttatcaagctaaattagatcattaaaatagtttcaatactatactcatatatttgattttatagtaagcctcatcagaatgaaattaatggactgagcaaatttttaaaatgtagattattctcagtaaaatgaggttttatttccaaggcatatcaaaaaaaaaaaaaataatagcaagcaccgcttggacctgtttagtgaactgaacattgtttatgttcagttgtacattgtttatgagtatgactaaagactccatatcaaaaaaaaatgagtatgactaaagcgttttttaagctgtaaaataataaattagtcttgcctacatcttatgtggtatatttattttaaatatagtttccaaattaagttttagtatagccaaaatcaaattttgagtttttaattagtagggtccaaatatcaataccatttgtgactagaattacaggtgttgtattttgcttcctctaatattaatgcccgtgttttcatctgaatgtggagactcttagtgtttctgttcggaccttcatcagtttctagattctgtttcatttttatttaatccttcctttaataggaatcagtaatcagccatgtactatactgcattcaatgcaagaattgtaacctttggatagtagctttgagaacagttcatggaaactgctatgattctgccattcagtttcttatgttatatattgccttaattgtcctatcatcctagcccgtaatatttattctgcttaaatatgtaaaaagaaactgtttgccatatgcctatggaaatctacgaagcttccagcaaaaatctagacaaaatgcttctaatggagcatgtgcatctcctgtggcttcacaagaaaggaaacatagccagatagtctactgtgattttcactggcttctctctaatttcagaccttgatgaatgtcaaacaaagcagcataactgccagttcctctgtgtcaacaccctgggggggtttacctgtaaatgtccacctggtttcacacagcatcacactgcttgtatcggtaagacaaagttacaaatgggaaattttacaaacttctagtagatgcataaaaattatatttaaaattataaacagaagaatgtcctggtatttrtgttcagtaaccaataccccataatttgtggtctaaagaagttgctaataagatagatattttcaagaacaatatccaaagggaaaaaaaaggcctttttagtccaagcacctgcacagtagccatatttcaagcagtgcctttatatcacattcttaatrcaaccatggtgttcagacaaaatatgattaaaggctcactgtaatttagaacatgttaacaaacatattgagcttttattttagaagacacatgttaaggaactttagtcagtgtgccttcaatcactccaaaatatgctcaaatctcaaacctcttaaaatacactttttcttaccactttwgtctttaatatgacagtgaattktggtataaattttcccaaaatgccattttcacatcrtgaaacttaggttttcatacattgctttttacttcccatgaaacgtaagacatgttatgattggaaagtttgacgctctgcttcttgatgctttgccagacaacaacgaatgtgggtctcaaccttygctttgtggagcaaagggaatctgtcaaaacactccaggcagtttcagctgtgaatgccaaagagggttctctcttgatgccacyggactgaactgtgaaggttagttgatttgctcaaaaattcttaatctaataacagtaaaccatatatatttttaacttccaagacaaattggtataatctgaaaaaaagaaaaaaaagtattgaacaaaataggacccagcaacttattcctggtcataaatttctatgtatcactttggggacagagggaaacctaaatgcagtgaaacaaaaattctgtgattacgaattgacttttaaagtaactgttgactaatcatggatctgagaaagaattgaattgaaaaagaattctgtgcctaatatggtttgcggtagtgtacaagcataccagaaaaaaataataattggccttttgttccatgattcttaaatgtataagaattaaatataaaaagaatctgtcatcagagagaattgaacaaatgtactgaacaygctaaggtgaaatgatggctgtttctgttttttacgagtcaagctcccgcttcactccttcactttcttacagtggaccttggtctcctctgcaataactatttcctgtaaaatccaagggaacatttaagtggaaacaaaataagaacatgcttgcagttaagaaaatttcatctagttcttcactatttatattgcaagtggcagtgtatgacaagaaaaatgtattaggattagtgtcttataaacacccatgccagagattatgagactatatttatttcccttacattcttatatcgtattgcaatttatagttttcttgattttaatcacccttttaacattaactattcttagaaatatatgatttggatttctagaaatatatgttaagtatttaatttgctctctgtaaggcttgtggggcttttatatgtatctcattttcagcaaagaaaaattcagtttttaaaatgtcaattttaatattttatctttcaaatcgttgagacgttgaaagtattcttaacctacagctgtttgccacatgcgagttcagctcgtgaccatccccataagataccatttattaattatccatgtaaatttgttacacccctcagacatgccaattttattttactctttatggatagatttcaaatattcggttgtcattccaaaaaagcatacataaataaagaaattattccacatgtataataataccacatcttgtctaaaaataacatatttaaatacttaagagggatttgcatctaattaatcttgaatggtaataaaaatttttacgtgcaatataattgtactttttaggtatctctgtaatgcttctatcctcccaaaaatgaggattgtatctcagtcactttcaaacttactggactatgcaatgcaaatatatttatatatatatatatatatatatatatgatttaccaaataaatcataccatttgcagttaattagttcaaaatgtacaacatttgtggttgctatggttgacttgctgaaattgagatgttatttagagcactgacatgccgtggtctggtggagagcagaagaatgagctggtctcttatctcagaactgttccctgcaccaccactgactaataaccatgtgacctggaaaaatgacagcctctctatgtgtcatgtcttgtttgtttgtttgttcccatgataacagttaccccaggtttcgtttggagtgcatttaaaaatagtagaagaaaggtgacataaaggttttgccgggcttgtttttgcagatgttgatgaatgtgatgggaaccacaggtgccaacacggctgccagaacatcctgggtggctacagatgtggctgcccccaaggctacatccagcactaccagtggaatcagtgtgtcggtgagtgctcttttcttccatcgcacttgcttttctcacctgaaagtgtctctgaataagatgaacaaattgtgagggttgagatttcagtatagcctttgaattttagactttaaacccagtccttaagactgatgcatggggactcattctgctagtgtgtatgtttgaaaatatctattaaaaaaaaagtttgtttttaagtacygggaagttaacttaactagaggttacttcattttaaatatctgctaagtaattttaagtttctgaagatgatgtcaagaatcatcatctttgtttgcgaaggtcagccacttttttgtctgtaatttaatatatttagatttcccatccattcccctcatacgaatctaaaggagttcacatcaacttaatgaggacagtccatgtgtgctctcctgtcacatagatttaataaaggatgggaagtgttttaaggttgaaaaagtacctacttacagcaaatgctgttggcagctctagacagaagtgtttgtaaaataaaatacgtggctctcagctctgttccttgcattgataatagtcgctgaaattctccttttaaggagtgattgatcaaagagaacattattctctacttggatagccaggtgacttacttagcatatgcctaatttcttggctccttttgaatgcgcttcacagacactccaaccaacacattttgatgctaggtgctggcataactgagcagaaaggggcactgtggtcctgcagagaaatatcaggatgcttcctgtttctgtgtagtaattcaaattacttcacaggttattcacatrttgaattattgtgatccactaaataaattagtctgattttatcctttgtggtcttctcaaaagaaatttctagtgacagctaagtgaattaagaacaaaaaatcaagataaatttcagtggagggaaaatcatgccaggtcaaagacagatgctttaccacaccacgaatatacactcataggagtgtagaaatgcagaaaccaataagtgatcaaaagttaaagacaagacagtttcaaaaaattatttaaattaccaattaggcagttattcaaaataactttataaatttaattcacttttttttcctcttcatagaaaaaaactgttgtagaactccttatgcccagatttattgattcataaacaaaggcaaagtgtatggcacactctttagaatatcagaaacagtattttttacatagctattaaaataatgtaaaacattctgtaggttgcstattcactctgatgatagtttcttttgctatgcagaagctctttagcttaattagatcccatttgtcaattttggcttttgttgcaatttcttttgacgttttcgtcatgaagtctttgcccatgcctgtgtcctgaatgatgatattgccgacgttttcttcagggattttttatttttttaggacggactctcgccctgttgcccaggctgaagtgcagtggcatgatcttggctcactacaacctccgcctcctgggttcaagtgattttcctgcctcagcctcctgagtagctgggattacaggagtctgccaccatgcccggctcattttttgtatttttagtagaaacggggtttcaccatgttggccaaggctggtcttgaactcctgacctcaggtgatccacccgcctcagcctcccaaagtgctgggattacaagcatgagccaccatgcccagcctcttctagggttttttatggtttagggttttaagtctttaatccatattgagttaatttttgtgtaaggtgtaaggaaggggtccagttttagttttctgcacatggctagccagctttcccagcaccatttactgaataggagatcctttccccattgcttgtttttgtcaggtttgtcaaagatcagatggttgtagatgtgtggttttatttctgaggtctctgttctgtgccattggtctatatgtctgctctggtaccagcaccatgttgttttggttactgtagccttgttgtatactttgaagacaggtagcatgaggcctccagctttgttccttttgcttaggattatcttggctatacacgctcttctttggttccatatgaaatttatggtagtttgatgggaatagcattgaatctataaattactttgggcagtatggccattttcacaatgttgattctttctatccatgaggatggaatgtttttccattcatttgtgtcctctcttatttccttgggcagtggtttgtagttctccttgaaaagattcttcatacctcgtttgctgtattcttacgtattttattctctttgtagcaattgtgaatgagagttcattcattgtttgactctctgcttgtctattgttggtgtataggaatgcttgtgattcttgcacattgattttgtatcctgaggcttcgctgaagttgcttatcagcttgagttttggggctgagacaatggtttgttgggtttttgttttttttttggggtggagtctcactctgtcgcccaggccggagtgcagtggcacgatctcagctcgctgcaacttccacctcctccctgcaacttccacctcctccctagtagctaggattacaggcgcctgccaccatgcctggttaattattattagtttattattattattattattattactattattattattattattattgtatttttagtagagacggggtttcaccatgttggccaggctggtttcgaactcctggcctcaagtgatccacccgccttggcctcccaaagtgctagaattacaggcatgagccactgcgcctggtcagatgatggggttttctaagtagagaatcatgatatctgcaaacagataaaatttgacatcctctcttcctatttgaataccctttatttcttctcttgcctgattgccctggccagaatttccaatactatgttgaataggagtgataagagaaggcattcttatcttataccagttttcaaagggaatgcttccagcttctgcccattcaatatgatattgactgtgggtttgtcataaatagctcttattattttgagatacattccatcaatatctagtttattaagtttttaacatgaagagatgttgagttttatcaaaggctttttctgcatctattgagataatcatgtggtttttgtctttggttctgcttatttgatggattgtgtttattgatttgcatatgttgaaccagccttgcatcaaagggatgaagccgactttatcatggtggataagttttttgatgtgctgctggattcagtttgccactattttattgaggattttcgcatcgatgttcgtcagggatattggcctgaaatttcctttttttgttgtgtttctgccaggttttggtatcaggatgatgctaccttcataaaatgagtcagggagtagtccctacttttcaattgtttggaatagtttcagaaggaatggtaccakctcctcttggtacctctggtagaattctgctgagaatccatctggtcctgggcttttttttggttggtaggctattaattactgcctcaaatttagaacttgttattggtctattcagggattcgacttcttcctggtttagtcttggtagggtgtatgtgtccaggaatttatccatttcttctagatttcttagtttatttgcatagagatgtttatagtattctctgatggtagtttgtatttctgtgtgatcagtggtgatatcacctttatcatttttttattgtgtctatttgattcttctctgttctttattagtctagctagtggtgtattttgttaattttttcaaaaagccagctcctggattcattgattttttggagggtttttcatgtctctatctctttcaattctgctctgatcttagttatttcttgtcgtctgttagcttttgaattagcttgctcttgcttctctagctcttttaactgtgatgttagagtgttgacttgagatctttctagctttctgacatgggcatttagcgctataaatttcccctaaacagtgctttagctgtgtctcagagattctggtacgttgtctgtttgttctcattggtttcaaagaactaaagagcttctgcacagcaaaagaaactatcatcagagtgaacaagcaacctacagaatggaagaaaatgtttgcaatctacccatctgacacaggtctaatatccagaatctgcaaggaacttaaacaagtttgtgggaaaaatacaaaaaccctatcaaaaagtgggaaaaggatgtgaacagacacttctcaaaaaaaaacatttatgtggccaacaaacatatgaaaaaaagctcacatcactgattattagagaaatgcaaatcaaaaccaccatgagataccatctcatgccagttagaatggctattattaaaaagtcaagaaacaatagatgctggtgagactgtggagaaataggaaaacttttacactgttggtgggaatggaaattagttcaaccattgttgaagacagtgtggtgattccacagggatctagaaccagaaataccatttgacccagcaatcccattactggatatatacccacaggaatatagatcattctactataaagacacatgcacacgtatgtttactgcagcactatttacaatagcaaagtcttggaaccaacccaaatgcccatgatagactggataaagaaaatgtggtacatatacaccatggaatactatgcagccataaaaaggaatgagagcatgtcctttgcagggacatggatgaagctggaaatcatcatccgcagcaaactaacacaggaacagaaaaccaaacaccacatgttctcatcataagtgagagctgaacaacgagaacacatagacgcagggaaaggaagggaataagcacatgctggggcctgttgggggttggggggcgaggggaggtaacctagaagatgagtcagtaggtgcagcacagcaccatggcacacttggctatgtaacaaacctgcacattctgcacatgtatcccagaacttaaagtaaaatttaaataaataaataaatataataataatataaaacaattttattatattacaatatttataaaatatgaagcccaccactttatttagtaaataccatggacttgttggttaattccatagaccttaatccaaaagaatgattctctatcaaacagaattttttttaaggagaacaaaagtagaaataggaaaatgcatggagtgccaatttaatttcaaagtgtttcagtttcctgaagtttttgtttctgaacacctagcacaaaacgagctgcacaggtttttactaaatgtggaagctctatctaaaatagtctgacttaaaatcaagatggtgtggtgtatcccagttcccctttatgagatcctggggtgagcactttgacaaggcagtcacccccaaaggagctcgcaatggagtccagccagaagccggtttgccttctaatcaggagaaactccatgagcagaggaataaatggtttaagatgagtccaaaactaaaaatacatgagcagatatccctaattgcaggtattaatttgtaagcttattctactaaaatgagtacctctaagcagcaggtgcctgggtacgacacatcagggatttatttcaaaagattctagattcttctgggcagggttgaggaatccagcttgtctctaataaaattgctgactttcttcccttgaattcatgtaacgccattagatttttaactcaaacatatggcagaaattgggtgaaataccccttcaggaaactaataaaagcaacaagttagcaaaagaattaggacaaaacgcaaattgaaaagccaccaacattttttatctgtcactacttgtgtgaatatcttcagccattcatatgattgatgggggaatacagaaggaagcatttcagacagatttcccccggaatcctcgtcagtggtcaacactgttagtcaatgcatcagacagtttaaacaggcaaaactgtaaacstacgatgttactaaacctgctaccaattgaagaagaatgaaagttctttgaaagtgttaatattgaaaaaagctttcagttcaaactaacactttaggaagttttctgccagttgtcacaaagaatttacaacgttctggtagatagagtgtacagatgtagggaacattctcaactatttgtaagcattagaattattcaaatacaattattcaaaattggaaatatgtaaatactaacatttgcatatgaagaaaaattatgtcttcatatatgaagactttgtgttttagtaacttccagttgcttctgtagcctgttcacaataattcacacatagttgagtgaggcttgaatcagttcaaagtatgtgtcagacaggaacatatttatttaagtctataaattttaatcatgayatacatttatagaatataaatatgaggtatatcatggtgcttgcaaaaatgttacatatttttaaatattcttgtaagtgatatgtttaaatataatttattcagttaattatttttgcctggtaatttttcttcctaacacaatgtctaatggtatattcatggcaggatcattttattaaattgtaatctaatttagattccctgttaggagagaaacactgcataggaatgtcagatctaattataaaagcagatgaggctttatggcagaattccaagtctcttgtatatagaaataaaatagcagttatagttacatcttatgtagccaagttactgagaatttatttatcgtatctacgttcttcccctgccataaaggctaagaattttcacatattagataatcagcatcttttatattcagtgattaagacacctacatttagtggtctcctttaattctgagactatcmgaatcatgatacaaaaatgttcctaataatatctaccctttcagtaacttctgtcctgtacttaatgaagtttaattcctgtctgggaggcctcttcactgagagcccaygtgcatcttccaaatctcactgagctgctgcagatccctcgcttccccactaggtactatgtcctctgtgcacacccacttgcacatgggcctgtttccccacatgggctgaaatatatacttgtcacrtattaggtaaacagacactctttgctccacatggagtcacaagaattgaaagaattccatggaacagatgtgatttgttcccagggtgaaatttggattataaaaaaagcccaaagaagtcaagccacatgctgtatatcaaccagacagttaaggcaaacttataatctccaaagttgaaagcataatcagactttgattttgtaaaaatgataatagtaactgaaagtataacctataattatcctgctaccaggtatttatagtataatgttagtcattaagcgagtaaaagctatagctggctgatggctggatgcaaacctgcctcagaaagcacagtctgcacccaatgggttctcaagcattttaaactgaactaggttgttcgttcaactgatttaactaaatagtgttgttttccatcgttttcatttagggtttataaatttttttatgctttctcctcctgtataatgaaggtttggggaattgctgggggaatggatacaaatacttatagggacttttttaattgatatatcataaacttctctcttttaaagtgtacatgtaaatgggttttgtagattctcacaaaggtatgcagtcatcaatactaccagtttccgaacattctcatcacctccaaaagaaacaccatacccaagagcggtcatttcccatttcttcctcccgacaggccccggcaactaattttctctctatctctaaggatttgcccgagatataagcttttgaagtaaccttctgttaagagaatagaagagttattcactaggcaaactgcaaatatctgttcccaagggctgcagacatatttagaaacagtacaaacagaaaagagcaaagcaagggttttttaaagccacaatttaggggaatttttttcattcacgtgctttgcaaatcagtcgtcagaataaaataaaatactgtgttagagttatttctgccataaaatcacaggcacttgagactccagacttgttcacgtttttgctcttgcctgcttccccgtgtaagagtttctttcttcgtttcactagatgagaatgaatgctccaatcccaatgcctgtggctctgcttcctgctacaacaccctggggagttacaagtgcgcctgcccctcggggttctccttcgaccagttctccagtgcctgccacgacgtgaatgagtgctcgtcctccaagaacccctgcaattacggctgctctaacacggaggggggctacctytgtggctgcccccctgggtattacagagtgggacaagggtaaggcggccttcagcctcagcacatagaggaatacatggttcctgagtgagttcaggccaccccccactgcagggaakagtacagtgtctaaaagccaaaccgcaaaagcattgattagaactcttcgggtatgcagataaataccaagaaagcacacacggactgtgctcagggtatagcattacttcctttgtgatgagcataaaacttgaacttgtatgtaaatatcactctttgctcctcttattaagggcctgaattgattcaatttgacccaaggccagagacaaacagatgcttaaaaatgcrgctcacacgttgccatggatacctgggctgtgaggtagaagtggaaatggccttgccacaggttcttctacaaattctggaaggtgctagcatagtgatcactgaggaaggagtttgtccctttctttgctcatgtggctttcctatcgcacagagagaggatggtgcctagttggtgtggtgtcattcagcacgggcctgacccacaagacaggcttccctccaactaggcgcactgtctcaagttccatgggctgtggcagaggtgctggccatttgcattcttccaggaaggccgtggtgctcagtaacacagaagatgggcatttagaggtcagtccaggttgccttctttgaaaggagcagtgtgcaaggcagggactaaaaggcatggaccaagtctgtccaacaatggtgtatgataatagttaaaacaaaaggcttggtctacacaaaggtcatttagagccaattcattgactcactaaccaaaatataagttcagaaatctcagtttttaaagcagggagctttgttgcaagcagcaaatacaggcttcaggcccctgaaacaatggaacctgtcttagcattctctttggaaattcataccttacttttaccttctggagttaattatgctcagtacttcagtctaactaagattgaaaattgggaaagcatggggctcaccctcagaagaattttgctgtttcaaaataagggaaaagtttatctattgtgtgttaaagaattataggggattgtggctcatccctgcaatcccagtactttgggagtccgaggtaggagaatcgcttgaaggcagaagttggagaccagctagggcaacatagcaagaccctatctctacaaaacatgaaaattaaaaaaaattagttggatgtggtggtgtgtgccggttgtccctgctaatttggaggctgaggcatgaggagctcttgagcccagaagtttgaggctgcagtgagcaagatcgtgccactgtactccagcttgggaaacagagcaagaccctgtctctaaaagaaaaataaaagagttgcaaagaatattagggttttatgtttatgagtttagtgtttgctctgttggtttcgtgtttctgaagagtctgctctaccactggaaaactatggtcaagtcagtgataaagtctaacaatactttgctttttgcaaatagccactgtgtctcaggaatgggatttaacaaggggcagtacctgtcactggatacagaggtcgatgaggaaaatgctctgtccccagaagcatgctacgagtgcaaaatcaacggctatyctaagaaagacagcaggcagaagagaagtattcatgaacctgatcccactgctgtgagtatatcccactctgtgttgccacaaaattttatccctacggagtcatgtatacagtgcagttcacgtcgttttcagcctcactgaagttaatcataccttgaatttaatggataaattaatggacccagtatggaaaagacaagtaaattaaagtgattgaattattagatcaaaacacaaagcttgggagaaaagactttaagattcacagtttcagagcattttctcttgttgtagtttttgatttatgtgggagggtatgtccatctcgggaagagctatttttacatgattcaaaaaatgaaattatttttaatttgttcagttctgttttataaatgtatagcatacaaggctgattttaattttcactagggaaaccaagtaggtctcatattctttgttttatttttaagacagttgttccttcattaagaagttttgtcttccaaatcacttgtattctttaaggaactgaagttggaaattgcgagccactgatatttcctttccctaattgcattttggcagtgtttaaaggggtgggctgcagactacctggttttgaacgtaactccctggccctccctatctgttacctctgttacatagtttgtgtttatttaacttctctcaacctcagttttttcacctgtaagatgggaataataatacctctgaaggctgatggaagggttaattgaattgaaacatgtgaactgcctggaacaatgcctgacatatatatcacatgtgttcagttcctatgaatgattaatatctcatatctagagatcttgatgattttcccaaagatctgagacagtatgaggtcgtcactcaccactctctgcagttaatatgactgagaaattaccccaccaaaaaacctaatcaacaactggctggctgtgtgaattggacaacttgcttcagttttttgggcctcagaatctttgtctatatgacctgacttgtctagccaaaaagttcatgatgctattttataataataaataagccagtgttacatttaccttaagtagactaagatacccaactgatgtttgacagttgagatattcatcaagttcccaaactacaaatccagaagttctgcttataaactttcccattggggtactaggacataattctgcctgaacactgatgggcacttctgggtcaccactgccaagtcctcacttaacagatgcccaatcaaagcattgtggtttttatcctatcttactttgatatatttgtgctcctcccaaccctctgagcaaaagtcagacttggtttatctgggccctgccccactggcttttaccaaagatgctggtttgaactggagccctgagaactctgcagatcactcactctgtgtacctctgatagctcccagtaaactcactcatcattcacttaccttacaaatcaaagcccagctttcagacagaagattcccctgggcgcattccctgctgatgcccaacagcagtacttcttattttgactccagaaaaaaaaaaatcattacctaaattttagtttttaaaaattattaattagcacaatatttcataaactcatcaaaaaaaacttgaaatgggaacactctgtaagcccagtcctgtacctttaattaccttgttaaggctgagtgagaagtcctaaagatttacagggtattctcgatggaattggccttttcttccaactgacaaaaatgtacaatagcctctttcacagccactgctggtaaggagagtgcagaaagcgggagtgggaagccacagcctgtcctmgtgaccaaagcccctgcagctgatctctttctagtcctctgcttgtgctgtagaagcttgtcccaaatcatttcctgttcttcctccaggttgaacagatcagcctagagagtgtcgacatggacagccccgtcaacatgaagttcaacctctcccacctcggctctaaggagcacatcctggaactaaggcccgccatccagcccctcaacaaccacatccgttatgtcatctctcaagggaacgatgacagcgtcttccgcatccaccaaaggaatgggctcagctacttgcacacggccaagaagaagctcatgcccggcacatacacactggaaatcactagcatccctctctacaagaagaaggagcttaagaaactggaagagagcaatgaggatgactacctcctaggggagcttggggaggctctcagaatgaggctgcagattcagctstattaaccsttcacagacttgggcccaggctcaaatcctagcacagccagtctgcagaagcatttgaaaagtcaaggactaattttaaagaggaaaaataataataactcttgtttctttcctcyctgtcttagactttgaatgttgaccctcacagggagggataatttagactctggtatggccaaagatttgagcacaaaggcaaccgtggttactgtattttttatataacttcattttaaaatatattaaaagaaacctaaatgttcaagatatcagcatatggcactaaatgcacaaaaataatgtgagctttttttttttttcctgttagcagtctgtaacactttgggtattttgctatagttgctaattaaaaaaatatagatgtttatttatttttaatgcagtaatatatggagaaatgaacaaactatgtaaacaaaaagggaaactcacttgtttttctttagatttataaatttgagctattttttttagaggtgctttttaaaaatccaatagatacaagagatgtttcctttggttttctgccagtcatccagctgatacacacctgatgattttaaagaaagccacacagagctgaatgggcagtgtaatcaataatttaaaaracatgaatgtcattagatcctttataacgtagatcgaagccaaagcagctcatttgtgacaacatttcatatcaccagacacaccaggcaacagaagwtgaagcacaaccactgtagcaaaataccttgactgcttgtgagaccattagcattgcaggccaaaccgtactgtatttccttctcataacctcaaggaaccatatgtgctacccacaacacctcattcttacccagggtgcgctgcgtcctcatggtactgtaggcagctgaagaaccgccgttcccttgaaagggaacacctggcattctgtggtgtttcgtgctgtcttaaataatggtgcatttattatgttcaagttatttcaggattgccatatgtgcaaacaaatcatgcaatgcagccaaggaatatatgttgttgttgttgttttaaacccattttttttttagaattttcattaatactgtagttatacaccatatgcctcattttatcatagcctattgtgtatgaaagatgtttgtacaatgaattgatgtttagtttgctttagtcatttaaaaagatattgtaccaggatgtgctattaagagcacgtatccattattcttctcaacccaagaacctgtttcctggaccartgaccaaacctcatatgtgaaatggccaaagcacatgcaggctcctggttgttcctctcaaacctgygctgaccaaagattagtaaccagttatacccagtattttgaggttttattgtttttttaataactaaaaaraaaaaaggaacagtgtaaatttgtaatcaagagtttgtgaggaaaaacttatggtttttggttttgtttgtttttgtaggtctgtgtatcaaatatgacacttttcttgcaataaagcttattttggggtatttttctgactgaaaattttatgagaccacaacgcctgttgtatttgcgggaggggctgggggctttgtctatgggaacctgtattgaagtaataatagagagccagacacacaggaaaataaaggaatgctggcaaatctgtgaagcaaagtcaacatgtgttcaactgatgattatgatttgaagttacattcaaatagaaggacataaagtcatttacttatgcataaattctaagcttcctgggacccatctttctggaaacttcaaagaatttcttcacttcatgctaatgcccccataaagtatccatgaggaagtgaaacattcttttagagaatcttacttctctaaggtagaaatttcctgaacccaagtttttaagcaaaggtaatagcgggcataccccaggccaaaaggcattttcaaaaataatctaaaccttatctcttaaaatggtatacagtttattcactggagaagtggatagatttaacaaagtatttagcatgaactcccttttgatacactgccaaaacaggcacagaaatgtttccaagactcttagagattaatttaatacatggtttaagaatttatgcgcttaaattttttatccaaggaataagtaaacaaggaaatattgtgactgatcttagtgctgttctttgccaatcagaaattagctgcatggagtaagaaaagtatttgcctcaaggcgttctttaaaacttaacatgcatattcagtttcatctggcatctattattggtacagcatgagtattgtaatatgaaattacctggaaccaaatttgactctagccttgaaagttgagcaacaacatttaatttacctttaactggctcttaaagaagtttgagaatccacatctttaggtgctttacgtagaagataaaaaatgatgaggggtttaagagaagaatgaagtagaaggaaatgaccactgcaagacactccttccaggaggaaatgtctcaggtacctttggtagctttgttgccatttttttactgtgaacactgacaaaatcagaatgaatttgtctgtctcataacgaactgctaatgacattttctgcactattttgtcattcccatgaatgtcccatttgctccagaaactaccttggctaagttatagaaaaccttgcaggagagaaaggtgtgatgtaagcccaaacacataaaccaaatccactgggcatatgtattagttaataagtaataatttggtctttagctgacatgaattctgtttctacttgtatttaaatttggagctttaaaaaatgtagctctatttagtaccttttgctttcgctacttgtagtagataaaagttggatatttttgcacgtgaacattgaatgaaattcagggacaaaacgtttagagttacactaaattcaaacatcttcctttttgcattatctaggaatactaaacaggataattcatacagtctttctcttttaaatactttagggttttattttgcattaattgccttcctggttcagagaataaacgtgtggggttgaggatgggaaatacactaaaaattatagagcatcagtctactagagtcctacaaacctttaggggaacaaggtaattcatatattaattgaagcatatgaatttgctgttatttggccatgtttaacctacaaaatggcaattgtatgtggttcaatttaatagttcagaaatacattcctcgagaattgactggaaatctgaatacatcttttctcttcaaaagacagtaacccattcactccttgctatgccattgttggctcatttgtactcctagtttacaatagtccacaagaacataatttattcaaacaaccactttctttcaagctccaaaacactggaaagagtctaaatcacacacctttgcgacctcaatggtattatggaagctgttcaaagacaaagacaagtccattgggaaaggttggaatacagcacaatgttttgtgtttttttgtttttgtttttccttttaaaaactaaaggaaaaacttgaggaacttttacttcttgagagagacgaaaagttggagattcattgctacccaacaggaagtaagggtgtcaaccatgtctgcaatctcatcccagcctccatttttttttaaaacacgtttgctttctcaaatagatacaaagccatggttttcttgatcaataagaagtacatgtttctgatctcacctccttcaaaattatttcagtgtacagagcagtggagtcctaaaatacaatgtgacgaaagttctctgaaaaggaatttgaagaaaagagactttataccagtgaacagtttgcaaactgagaaaatatagtttcagtgtgaaacaaaggtgtgttccagaaaacaaagagaagattcagattttagagcaaaaggtcatgcccaggttcccaatcaggttcatttatgcaaatgaagtattcaaaattgcttagttctgactggttgacacagttgagtcctgatttgtcaatatagctgagccctgattggcggtggggacaggtgagctctgaatggttggtttccaacccccaaaccagaagtctctgtcagatgcttctttcaaagggttgatgggggcagggtttctggccacaggttattttggcacctacaaggtatcctgtctgtgtcagatgttttgctaagctaaattaaatgatgggtgttcattaaatgtctagatcatttccaggcaagatgtaattccctgtatgccctggctgacagaaagcatggattacccatggattccccatgactaactgaagtgagttaaaacagaaccaggcagctgtggctgggtgaaggactggtcatgtactttgtgttcttagaaagatgtaaatgtatcacaggacctccctgtctacaatcaagccaaaccagtttccgttgtaggtgccaagataaactgtggccagacacttggtccctcctggccctttgacaaaagcatctgacagagacttctggttttgagcttggaaaccaaccaatcagagctcatctaccctggccaatcagggctcagctgtattgaccaatcaggactcaattgtgttgaccagtcagaacaagtttgaatacttcatttgcaaaaatggtcctcactgggaacctgagtaggaccttttgctatatcaaatctgaagcttctctttgtgctctggaaccaccttcatgttacaccaaaagctgcatcttcccagtttgcagattgttactggaataaagtatctcctccaaattccttttcagagaatttttattcatatcattcaattcaattcaatcattcaattcacccactcaggcagtattatcttgtagttaaaagaaaaaactttcaaatcagtcagacctgaatttcaattccgtctccttggacaagttacgtaacttttctgagacctggtttctttcctaggatgatctttccttacactgtggctgagaggattgaatgagatagtacaggcaacgccattagcatagggcccaagcagatagcacacattcagtaactgtcagctgctcttcttcctccttctactcctcttactatcatcactattagaagaatgagctcacatatccacacaaagctcctttctaagcatggcctggaactactgctttctcatggaattgtaggaacaaatccagataaatggcaaccaggaaaattttctaagtgctctgaacctttagaagtcctggtgtggtcatgagcgtttatcgtctccacatcactctgcccttaacagaattgtgggcgacagcccggaaaggtcaagctacaaatgcagcgggagccctcccgtctatagacctccaggaaaccaaccaataaggagaatatgggcatctgatcatccctttgaggtgatttagtgctgttgaatgtcagcactagaaaggcctttagagagccggcacagtggctcatgcctgtaatcccagcactttgggaggccagcgcaggtggatcacttgaggccagtcattcaagaccagcctggtcaacatggtgaaacctcatcgttactaaaaatacaaaaaattagccaggaatgatggcaggtgcctgtaatcccagctactcaggaggctaaggcaagagaatcgcttcaacctgggaagcggaggttgcagtgagctgagatcacaccactacactccagcctgggcaacagagtaagactccatctcacaagcaaaaaagaaaggcctttagaagtccaatcctgtttataagtttaaaagtggggaaagtaaggcccagagttgtaacatagttcattgcaaagctagtttctatcgaggtgaggcgagaaccctggttgcctagttgcagtctggttctattcatatttctactacgtggtaggcctatttggatctcttctaaaccctaagatataggccagttcccatggttttggctcatcttgaatccaaaaatattttccaagcacgatccaagcactgctttttgttttgtctctcccactgtctgtgtaactgctcccaatcttataaaccagagatttgtgtatgcactgaaatgccaaaatattggcggctacatagtagaccccaccccaatcctgtacttctgtaaatacatattacagccctggctctcaaagggttaaatgttttatttaaaccagaccttcaaaactttaaaaacacttacacatttgttttactaagaatgcttaaggaaagtacactagttgcttgtgttgcttaattgtcattttttttccttttcctgagagccttaaaaaagatattactagattaagttggcttactttcgaaatagccaagaaccaacagctcccattagtcactcccattagggctgcagcttaaatgtcaggatgtagtatagacattttccaaaagaaaacaggaaaatgctttacatgatttttagagcaagctatggggaaagttaacattagtagcctttgccagacaactactgctacacgtgtgagttccattgatgaaataacagtagaagctgtgaatggccagttcctaaaaatgtgccaaaaaaaaaagtaggcttttggtctgtttaagctgcctgggtttccaccctaaggccacccccttccttccactctacctgacctcagcttccctacactgatggaacctgctcctgtaggagtggatttagagcctcaggcttgtgcatttgtgatcttcaggcctaaggcagggtcctaagacccatgaccatgtactagaacctgggacttcaccctgttatgaacctgtaaacttcacagagccaaggccagaaaatactccatgaatgaatgaagggagggagaggattctgactctctgcagagtggagacttatggaccagcacaggaaattggaccttgtccaaggagtgggtggtatcatagtcatgattttactggaaaccctcagaacaggtttctggagatcatcatggaggtatcttcccgtcttctaggaggactttcttgatttattctgcttttctccacttttctagagagccccttaggtctcccccagggtgagagcagattgaagaagctgttgaggcaagctggctgcaatcttgacttgtcccattaggatatccttgatccaaacctggactgaggttcatgctgcttctgtagaagtctgggtttgggaactggtacagtaatttttcttcgaagagacattacacagttcttatttctggaacaacttgattaaatgagcatctgttgggtattacacagacctaaaatgattttccctccaaaaccttacaaataattcaaagaaacaagcaagacagccacaaagaaacaagataaccacatgttataagatggtgtgtgcttaagggccatagtggatgtctcaga

SEQ ID NO: 8728 - DNA, 47196 bp, Homo sapiens
  misc_feature (1)...(47196): n = A,T,C or G, or insertion/deletion polymorphism (see Tables 1-2)
ccttggattgggtccatggttaagtgagtgagtgaggctcaagggcttctttttttttttttagagatagggtctcactctgttgcccaggctggagtgcagtggcatgatcacagttcactgcagctgcgacctcgtgggctcaagccatcctcctgcctcatctcccttagtagctgggactacaggcatgtgccaccatgcctggcaatttttttttgtatttttggtagagacggggtcttgccatgttacccaggctggtcttgaactcctggactcaagtgatctacctgcctcagcctcccaaatggctgtgattacaggtaggagccaccgcgcccagccttcaagtgcttttttttgttagtgagactggtacaaccaatgccaaggctggtgagcaaagttgcacccagttggggaggggcgaaaccaagggcagaagggcccagggcatggcctctcatggctgaaggaagaggggacacgtggccagtcacagtgacctctgcagacctcaagaaggaggccagctaggagccatagctgtcactaagacagtcaaaatctaatcagcaccctggcgccaagaggccattgtccgctgctcaggacagtgagtgatagtcgataaccagctctctggaggtcagggccccgaggtggctgagatctgtgcctgcattaggacatttaaggggactccaagccaggatttgctagtgtttgcccagcagggagaggtggaaaattggggatgaccaaccaggcctccctgctcacagccaggggaattcatcctgtcgttcttccattcagcaaatattcatggagcacctgctgtgtgccaggcaccgtgctaggctctggggagatggctgtgagcgggatcgacactggccttgtgtgagctggccttgcagtaggggatatgagcaccaaacacataaggcccgagtgtgcaatatgccacaaagattgcagagaaataaagcaagataacaggttgcagaaagatggaggccaggctggctgctgttcctgggtaggtggcttctggacacagtttcctcaggctctgtttcctcctttgggcctctggaatcttctgaagacaggcctggcttccaggatcccggatggagttgcctgttgactgtgtggactcaaagtgtccacagtgcgccggagcgcgtggtcttccccagcaaatctgcttctcttctcggctctccatcgtgggaagggtccctgggatcctccccaccaccccagcctgaggccactttccctctgtccccgctctccccagcctgctttccccaccaagcgccaccaagtccctgctgcctcctcctcccaaacaggctcaaacctgccccctcttcgccagctctcagctcagcccgctcctctcctgcttaagagccttcactggctccccactgccctagagacagagtttgagtctactgccatggcttggcagacggtgttgtccctggcctgccaaccttccagctgccatcccagccagtccttctcccccttgctccagccaagggccccgcttgtagggtgggaagtgggccgtgccctccctcctgcctgcctattcgctgggtcttccctcattccctccctcaccccgccctctcataagaaccttcagaatctgccagacgcagtggctcacgcctgtaatcccagcactttgggaggctgaggtgggtggatcacctgaggtcaggagtttgagaccagcttggccaacatggcaaaaccctgtgtctgctaaaaatacaaaaaaattagctgggcgttgttgtgggcacctgtagtcccagctactcgggagactgaggcaggagaactacttgaacctgggagacagaggttgcagtgaactgagatcccaccattgcactccagcctggactacacagtgagactctgtctcaaaaaaaaaaaaagaaccttcagaatcataaaatgggtttaataattatacttatctcatagggagggcttaaagcacctaggccagtgtctggcaccaaggaaacactgtatacctgttaaaataagaataaaataaaatacacatgctcacttattgagtgcctgctgtatgtcgggcccctccccgagagaactctggtgcatccccgataaagaaacctgaccctctaggatgagggagggtcttccctgagcgcctgctaacagcctcctctgctaatctgaagtcctgcagcttgcccagcaggctggcttgtcacacgggctacccccacaggccgccatcttggaaaaggccaatggctgtggaatcattcttgactcctattagccttcctgttctctctcccgccccacagcatccatcctgtcagcaaatcctgtgggctctgtcttcaacacagatctagaattcagccccttctcaacctccccatctccgcagcctggtgtgagccctggcacctctctctggggccagtgtggtagcctcctcactgctacccacttctacccgtgcccccaccacccaagcaagagaggtcttttttaaagtctcatcatgtcacttctttgctcaaaacgctctggcaacttcttccttgctcaaatatttgttaaaagaagaaaggaatgaatgaatgaatggcctgtttgcatctgtaatagccagcacataggcagtacttggaaaacacccacagcaagaataaatgaggagatggctggacacggcagctcatgcctgtagcatgttggaaggccgaggcaggaggtttgcttgaggccaggagtttgaggttgcagtgagctatgattgtgccatagcactccagcttgggccacagagagagatccccatctctacaaaaatttaaaaattattcgagcatggtggtgtgtgcctgtagtcacaactacttgggaggctaaggcaggaggatcacttgagcccaggagttcaaggctgcactgagccrtgacggtgcgactgcattctagccacagaatgagaccctgtctctaaagcaaaaaagagaaggagaataagtgaggtacttgagcaagtgggtgaggatggttgagccacagcaggcccacagggaggctggtgggtgctgttggtggagggggccgatttgtgttcctggtggctgcagagccagtctgttgcctcccctccctcccactggctgggctggggacggagccaaccaggcagatcccgggccattctggggccctggcctggcctgccttactatcccagtggggccaccgacgtggctgccatttctggaaaccccagttctaggtaggttactgtcccaggaagaagtgcatgcctagcttcctgccagcccagcccagctgtcccagaagccagaggaagctctgggctggtttcttataagtagcatgactaactgattgcgccacaggagctgaggtttcaggccagtttctgtcgtggagtttcaggggtcagcggctccaaagccccagcccccacccgaggcccctgctgtccctggattcctctccacatgccacctgtcacagaggtgcttgcatcctgtctgcagaaccagcccctcctccaagccaggtttcctgcccagagggaagaagagcagaaggcctgtaccgccccctgtgcgcccccagtcctccgccccctgcccccctgccacccgctgtgggttcgggaagagtcctgctgggtcgcttccaggctgctgctggcttctgacatttcaaggcttaatcacttaatctcccccgagttttttaaaaaaagtgagtcaagtgtgttctcctggtggcgggcgtgttttcccaggcccatgcttctgctcatttcctggctgcggccttcactgactttgctgcttcctaactctgtgaccttggccttgtcacttgctgtctctgggtctcaggccaatgggtctcaggccagtggggctccccggacaaagttccagggttttggggactgcatttcaagggtcagcaaccacagtccttaaacacgtggattttggagtgacaatgcctaggttatggttctgtgaccaccagcaagtgctctagcctttttgtgcctcagtcttctcatcagtaaaatgggaatgttaatggcacctacctcatagggtcgttgggagaaccaaattgattaatatattgtaagtacttagaacagggccaggcacaaaataagtactgcatatacagttaactatggacaaaagcttgggacctggttcatgtttaaaaatgattattgaggccaggtgcggtagctcatgcctgtaatcccagcactatgggaggctgaggcaggcggatcaggaggtcaagagatcgagaccatcctggccaacatggtgaaatcccgtttctactaaaaatacaaaaattagccaggtgtgatggcgtgctcctgtagtcccagctactcaggaggctgaggcaggagaatcacttgaacccacgcggaggttgcagtgagctgatatcgtgccactgcactccagactggtgacaaagctaggctccatctcaaaaaaaaaaaaaaaaaagattgttgaatttattattgctgaatttttttttttttgagacagaactttgctctattgcccgggctggagtgcaatggtgtgatctcaactcattgcagcctctgcctcttgggttcaagcgattctcctgcctcagcctctcagcctcccgagtagctgggaatacaggcacccaccatcatgcccggctaatttttgtatttttgtagagatggggtttcaccatgttggtgaactcctgacctcaggtgatccacctgcctcggcctcccaaagtgctgggattacaggcgtgagccactgtgcccagcctattattgctgacttttaaaccattcattcatttaatatatgtttattgtacacatgctatgcctgtgtcaggcactgtttcaggcactggggataaagcagtgagcacagcagacataaagctctgccctcatggggcttgtggtctctcagagggaggcaaacaatgcatttatagacaaatacataatttaaatttgaggttacctattatactcccaacttgaaaaactagcagtatattgaggtggctatttcacatctgatggaggaatatgtcttttgtgaaccatttatgttctttgcctatttttcttaaagggatgtttgtcttattgatttgtaagaactcttcatatattaaggccattaaccgttcataatgtagattgctacctttttctagtcttttgcttgctgatatagttgggatgtcatcctctctaaatctcttgttgaaatgtgatccccagtgttggaggtgggtcctggtgggagatgttgggtcatggggacgggtccctcatggtttggttctgtccttgccatagtgagtgagttctcacaagatctggttgtttagaagtgtgcggcacctccctcctctctcttgccctggctgtcaccatgtacgcctgctcccctcttgccttccccgtgaataaaagctccctgaggcctccccagaagccaagtagatacgggtgctatgcttcctgtacagcctgcagagccataagccaattaaacctcttttctttgtaaattactcagtctcagatatttctttatagcaatgcaaaaatggactaacacacttgagttctgtctttttcttatggcatattttaatctaggccagacacagtggctcatgcctgtaatcccagcactttggaggccaaggcgggtggatcacttgaggtcaggagtttaagaccagcctggccaacatggggaaaccctgtctctactaaaaacacaaaaaattagttgggtgtggtggcacacacctgtaattccagctactcgagaggctgagacacaagaatcgcttgaacccgggaggtggaggttgcagtgagccgacatcacgccactgctctccagcttggggaacagagcaaacctccgtctcaaaaaaaaaaaaaaaaatctagggaagttgaaaacattttgcagtcaaagctatctttgctrtctgcatcttgaaataaaataaacattcatacatgtaacctcattaatctgattagagatagtgataagtactgggacagacataaacagggtgctgtgataagaagtcacagggagggcccgcattagttgaggggggtcagagaaggcttctgaagtgtttctggtgcaaatgcttggaaaagggagagctgggagtgtatcccagggctgaggccaatggaggattgcagaagagggagaggggataggaggggaatgttagagggataagcaggggaattggctcttttcttcattttcttaaattaaactttttattttcagataattaaagatttacacacagctggaagaaatcatagagaagccgggcgtggtggctcatgcctataatcccagcacttttggaggctgaggcgggcagatcacttgagatcaggagttcgagaccagcctggtcagtatgatgaaaccccatctctactaaaaayacaaaaattagttgggcatggtggcttgcctgtagtcccagctactggggaggctgaggcaggagaatcacttgagcctaggaggtagaggttgcagtgagccgagatcacaccactgcactccagcctgggcaacagagtgagactccatctcaaaaaaaaaaaaaagaaaagaaaaagaaaaagaaatcacagagagacccctgcttctatgctgttccccccgagggcaagattgtagaaatctgtaatacagtatcacagctgggatactgacactgatataagctactgaccttattgggatttcccgatttacttgtactcatttttgtgtttgcgtacgcatgtgtggtttagtgctatgcaattttatcacggcataggtttgtgtatgcagccaggatccagcacagttctatcatcacaaggatggctcaaattctccttttatagccacatccaactcccttcctgacccaccccctcagcccctggcacccactgatgtgttttccatttccatggttatgtgatttcaagtatgttacataaatggagtcacggggtgtgtactctgggaactggcttttttcactctagggcttggattttattctaagtcagagatgcttctctaatgagctgtgaaccccctggggatctgtggcccctgtgaagaagccctttaggagccagggggcattggatgtgtgagctggccctggtctcatttctgattttaaaatggctctggctgtgatgtggagaagaggcagggtgagcctcatctgcagcaactgctaactgcccacatccccccrgmcttctcaaaaatttgccactcccctgctcaaagaccctcaaaagctgcccactgcttagaggacaggcctttgacctgaggtcctcacttgggcttcagggattctgtgaacccctaaaatggaatgcagaattaagtgtatgcaccttgccagaaacagggtttggggtttacattagatgctcagataggtcattgatccccaaaacactaaggwctctgacttctagacagatagtagttaagaaccaaagctttggagcttgagtgctggatttaagacccatgactgtcacagctgtgcaacctcagacaaatcactcagcctttctgtgccttggtttcctcatctgaaaatggagaaaataatattacctatttcatagattattaaatgcattcttgtatgtaaaagatgtaaaagaaaacttggcatgtggtaaactctgtgtgtttaagtgaatggtgaggctgcccagtataggagggcagagctttccaggtaaagactttctaggcctcctgggattatcaggccctctctgtgttggttgttgtcatacatgacagcagtattccttccaaagggatgccaagttgtggttgcacactgcacttagatccagttgattgacagcactgttcaagtcaactgtgtccttactgatttctgcctgctggatctgtcgattaccaaaagagttgaagtaatagtaataatactattattatccaataatagtattattcagaataatcacacagatttctctatttctccttgctgctctcagtttttgccttacatattttgaccctttgttgttagttgcctacacattaaggattgttatttacatcttcttggagaattaactcccgaatcattatatagtgccacttttttttaatttaaaaattttattttttattttttgagacaggatctttctctgttgcccaggctggagttcagtggcatgaacacagcccactgcagccttaacctcctgggctcaagtgatcctcctgcctcagccttcccagtagctggggctacaggcatgtgccacctctaataacttttctttaatttacartagtattagtttgttctcatgctgctctaaggacaygcccaagactgggtaatttataaaggaaagaggtttgactcacagttctgcagggctggggaggcttcaggaaacatattatcatggcggaaagggaagcaaagacatcctttttcacatgacgtcaggaaggagacacgccaaggaaagggggggaaagccctttataaaaccatcagatctcaggagaactcactcactgtcacgaaaacagcatgggggaactgctcccgtaatctaatcacctcccatgaggtccttcccccaacacgtggggattacaattcatattacaattcaaggtgagatttgggtggggacacagagccaggccatatcacattattattaattagtgccttctctctcatttttttgattcgcctaggtagagatttatcaatttcattgatcttttcgaagaaccaatttttgatttcattgattytcctcgattaattttctatttttaatttcattgatgtatgctccaattttgtatttttttcttctgcttgttttagacatatattgcttttctgtttctagtactctagatggaaacagattattgattttagaactttctttctaagatatacattcaataatataaatttccctctaagcactgcttttgctacgtctcaccgattttgataggctatattttcatttttattkagttaaaaatatttttagtttctcttgtgatttcttctttgatccatatgttattcggaagtgtgtttttaaatctccaaatacttggaaattttctggctttcttcctgctagtgacttctaatttgaatccattgtggcctaagagcatatgttgtgtgatttctaatgttttcaatctcttaaggttgttttatgtcccagaatgtggtctgtcttggtgattattccacatgaacctgaggagaatgtatattctgctgttgtgagatgtaacagtctataaatggatacctctgttaatatgacctcgggtgactctttttttttttttaagttgctgcttcaccattggcttttggagattttgcagatgataaaatcctcaggacttttctgctgctcagtcagattttcttatcctacacttgcggaactgttgtttgaaattgacaagcaggatggccaactctgcccggctcattttatttcatcttattgggttcagcctgcagttttaggagatgagattgaaggaactggtatactggaatccacggtgggctcggaagcaaacaaacgtgggttctgattctagctctgaccttttaccagctgtgggacctggtggatgggttatttggcctctctggcctcagtttccttagctagacagttgggataacagcctacctttcaggattcttgtgtggattcggtgaggtaatacttctaaagcacctagcaaagtgtcaagtacaaggtaagtgctgggcaagcagggattttgttcacacaaagccttgactcaacataaggaggctgtttccaatggctctgcttaactgagacctgagagtgattgctccatctgtggtggcatatgggctgaaactgcctagcagcatgtcagargtggggygttcgcaggacatccttgtccaggttggcagttgagcttggcaggtgaccgctgagaccccttccaactccaccacttcaggaatctcttttttttttttctgagacagtcttgctctgtcacccaggctggagtgcagtggctcaatcttggctcactgcaagctccgcctcccgggttcaagccattctcctgcctcagcctcctgagtagctgggactacaggcaccygccaccacgcccagctaattttttgtatttttagtagagactgagtttcaccatgttagccaggatggtctcgatctcctgacctcatgatctgcctgcctcagcctcccgaagtgctgggattacaggcgtgagccaccgcgcccagccaggagtctcttgatttagaatgggaacttgaaatcatctcctcttgccgtgtacttgaacgcgataacctggcacttatctttttaattcttttactcacctgcatctttgttctttttgcctctgatgttcagggaagcctcttctcccactgcatctgtgatctctcctgaaatgtagcacccacacatccctgagaagctagctgcggcacgtgtgtgtgcacatgggcatgcrtaagtctgggcgtgccttccacaacagattaaggatatcaatcctgacgccatgctgggatgttttagtgaatcttgacagggttgttgactcccctgtttccctggaggactttaccatgaaagtcttctgctgtgtgactttggacaggcgtcttggcctctctgtttctctttattcataattgaggctaaagtgacacctttgccatctctgccacaggatactgtgggcatctgtgtagttgtgagagtaaaagttactaggacttgccaaggaaatcagtgtcaggaacccaccaccccattcccgcccctcctttacttgagactttacttttgtaactctcagcaaggaagacgagttcaacctttgagccgatacagagccttcccctagagagagctttgcagcctcatgctgagccagttaggggccccacatcatgtccaaaatgaatttaatcaacaaacagttactgaacacgtcctatgtgccaggcaccgttgtagatactggggactcggcagtgaatgggacagaccctggctgtcaggatgacagacaatttaaaaagggacagatgtcccacgctggcttgtcctttgcaccccyggcacttcgtgaggagcagcggccagttcttgtatatagactggcccttggtgtacatttgtctgacgtttccaaatgatgtatgcatccttggcaggaacccaggaaaagacatgctgtgctcttctcaggaattgtttcagggaggtgatgttggggatttgtcccattcttgttggtgagtttagatcacttggtgaaggtggtgtctgccaggtttctgtattgtaacgttcattgatatgtattttcactcattagttaatatacaatacaagttttgcagggagttactttgaggctgtcatagtaaaatagagctttcccttcttccctgtttatttatttattagagatgaagtctgactctgttgcccaggctggagtgcggtggtgcgatcatagctcactgcagcctccaactcccaggctcaagccatcctcctgcctcagcctcccaagaagttgggattacaggcacacaccacactgcacccggcctcctccatttattgatctatgtcaatacagactcctggactttaactccaagggttacaagtggataccataatattcattttgatgctcaaaatgtgcctgttttgtccaggtcaggctagctgctgagtacttccttattgtctggcacaagaattccaagcctatctggtacttttccttctcctggaatcagctatttctctaaggcgctctggttcctttcagtacagaatagtatttagaagccaagacctggtcactaggaaggcatgataatcaaatgtgatgaatgatcttggattgcatcctggacgtataaagggcattattgaggcaattagcaaaacataaataggggccgtggatgagatagtggtgatgcatcactgttaatttcctgatttcgatggttgtattgtgattatgcagagaatgtccttgtttttctgacatgcacactgaggtattggggtaatttattcattatggagatatgtgagtgtgtttatgtgtctcatacacagatgtttcttaatgatggggttttgtccccataaactcatcataagttgaaaatattattaagtcagaaatgtacttcatactcctaacctactgaacgttatagcttaacttagctcggaacacttgcattagcctacagttgggcaaagtcatctaacacaaagcctgttttgttataaagtgttgaatagcttgtgtagtttatggaatactgagagtgaaaaacagaatggtcgtatgggtgctccaagtactgcttctactgaacacccattgattttgcaccatcataaattaggggaagagaggaaaagcacgcgtaagggaggaagggccgggtacagtggctcacgcctgtaatcccagcactttgggagaccaaggtgggcagatcgcttgaactcaggagttcgagaccagcctgggcaacataatgagaccccatctctatcaaaaatacaaacacttagccaggcctcatggtgcacatctgtggtcccagctactcaggaggctgaggtgggaagattgcttgagcccgggaggtggaggttgcagggagtcgaggttgtgccactacactctagcttgggtaacagagtaaactctgtctcaaaaaaaaaaaaaaaaaaaaggaaagggaggaagggaaggtccctccaggtggaggggacagagagagaaaaggcatggaggtgggactgagtttggtgtgtttaagaagtgcaggtggcagccgggctcagtggctcacgcctgtaatcccagcactttgggaggcygaggcaggcggatcacctggggtcgggagttcaagaccagcctgaccagcatggagaaaccctgtctctactaaaaatacaaaattagttgggtgtgtggcccatgcctgtaatcccagctactcagaaggctgaggcaggagaatcgcttgaaccygggaggcggaggttgcagtgagccgagatcgcgccattgcactccagcctgggcaacaagagtgaaactctgtctcaaaaaaataaaatgaaataaaataaaataaaatgttaaaaaacaaaaaagaagaagaagtgtaggtggcaggcgtaggatgcatgggtgctgggcccaggtggagagggaggtggagccctgctggggggagggccttcaagtgtgcccaagtcactcggagagcatccagcaggggcctagagctcctgaggtggccttaagttcttatgatgccccagacactgcacacagtrcttcagaggcaacacctccgttcctgtttgctgcaagcctgtgaggttagccttggaaccattcctgtgccacagaaacacagccagagcaccaaaagagaaatgctgttaatggcaaagaactactcactagcagaacaaagcctgggagctgcttttttgaataagatcccaggagagagacccaagcgggaagtgaaggatgggcacttgaaatgttgcagggaatataacccagcgcgtgctgttttctttttttctttttcttttttttttttttctctttttgcaacagggtctcactgtgtcgcccagcctagagtgcagtggtgccatctcggctcaccacaacctccacctcctaggctcaagcgattttcctgcctcagcctcctgagtagctgggactacaggcacgcgccactaccgcccggctaatttttttttgtatttttggtagagacaggtttcaccatgttggccaggctggttgtgaactcctaaagtgctgggattacagatgtgagccaccacgccyggccccagtacacactttttggagggtatttgacgttatgtaccaggagtgctggggaaaagtacacacttgactccgtgagattctgcttcttagcatttttttcttttcctttttttttttttttgagacagagtctcactctgtcacccaggctggagtgcaatggcatggtctcggctcgctgcaacctccgcctcctgggttcaagcaattctcccacctcggcctcccgtgtagctgggactacaggtgtgcgccaccacactcggctaatttttgtatttttagtagagacagggtttcactatgttggccaggctggtctcaaactcctgacctcgtgatccgcccacctcagcctcccaaactttctgttttcttttcttttcttttttttttatgacagggtcttgctggagtgcagtggtacggtcttggcttactgcagccttgacatcccaggctcaaacgatcttcccacctcaacctcccaagtagctaggattacaggcatgcaccaccgtgcctggctgattttgtttaatttttgtagagataaggtctcactctgttgcccaggctggtcttgaactcctgggctcaagccatcctccctccttagcctcccaaagtgctgggattacaggtgtgagccaccacacctggcttctgaacattttttcttaatgataatagctggtgctatgggctgaatgtgttcccccaaattcatatgttgaaacttcatcccattgtagtcatattaagagatggggcctttggagaagtgattaagtcatgagggctctgtggttggtcatgaatggggttagtgccctyatgaacgggctgaaggaagtgtgtttgccccttctgtcatatgaagacacagcagcatggcatcgtccgtgaggaatgggctctcaccagatctggatctcctagtgtcgtgatcttggacttcccagtctccagaactatgcattagaaaatttatttatttattatttatttattttgagatggagtcttgctcttgtcgcccaggctggagtacaatgacgcgatctcgactcactgcaacctctgcctaccccagttcaagcgattctcctgcctcagcctccagagtagctggaattacaggtgcccgccaccacactcggctagtttttgtatttttagtacagacggggtttctccatgttggccaggctgatctcgaactcctgacctcaggtgatccacccaccttggctccccaaagtgctggaaatacaggtgtgagctactgtgtctggcctgaataataaaatttaaaacaatttttcaaaaattcaccatgaggtctcactatattccctaggctggtctcaaacccctggactccaagtgatccaccccaccttcccgagtagctgggactagagatgcacaccattgcacccaatagagcaatacgtttctgttctttgtaaattacctgctctaaggtatttttgttatagcagcctrtatggactaagctgacttgtaacgttacttgagactttaaagtgttccggtcactgttggagggctctgtctgtgttagctcatttaatccccacaacacctcaatcagatggggctattcttagtcccactttatagataaggaaactgaggcatggaagcacagcttgctcaaggttcacatctagtcagtgacagagcaggtatttaaacctcaggaaataatcagagaaacatgtgtagagggttgtccaaggaaggccacatccagaagcatctcccaggacagttgttgtgtagctcaccctctggactttgtgggtctgggtgttgtttcatgwttatagagagagctctgtgaacgtggaggacctgttgtcggcagagacacaaatggccagggcatggctgggcagccgcagtggctcaggcctgtaatcccagcacttcgagaagaccagaggggcagatcatgaggtcagaagttcaagaccagcctggccaacatggtgaaaccccgtctctactaaaaatacaaaaattagccaggtgtggtggtgggcacctgtaatcccagctactcgggaggctgaggcagaagaatcrcttgaacccgggaggtggaggttgcagtgagctgagattgcaccrctgcactccagccttggagacagagcgagactctgtctcggaaaaacaaacaaacaagcaaacaaacaaacaaataaatggccagggcaggggagggttgcatattgaataagatgagctctgctggaagcacaggtcagcactaacctgcttcctctctctctgcaggtgccttggcatctcccaatggggtggctttgctctgggctcctgttccctgtgagctgcctggtcctgctgcaggtggcaagctctggtaagtcaccacttctcaatcattcatttgttggctattaatggcgtgccagggtcctgcagtatgtcacctggccttatggagattacactgcagtgggaggggacagccaatgacaagtggccctgattatcagtaaattctaaagattgttagaaagtgatgggagccgggtgcagtggctcacacctgtaatcccagcacttcaggaggccgaggcaggaggatcgcttgagcccaggagttcgaggtcagcttgggcaacatagggagaccttgtctctacaaataataaaatattagccagrtgtggcagtgcacgcctgtagccccagctactcaggaggccgaggtgggaggatcccttgaactcaggaggtcaaggctgcagtgaactgtgatcgcgccactccactccagcctgcgtgagaaagtgagaccctgtcaaamaaaaagagaaggtgatggggaaagaacacagaacagcataagagggggttggggaagctgggtggagtgggggggaytgcagttgaaagtagggaagtcagggaaggcctcattgagctgacttggaggaagcgggamccgtgcagatgtctggggaaggctcattcttggcagagaggccctgcactgagcctggcgggagggttgagcacaggagggaatgtggtggaggagagtgagcagcaggagggagcagtgaaggtcagcaaggtgacagagtggctgaatcaaaaaagaccttgcagtgtttgagcagaggatccatatcatccattatgttccaaaggactcttcaggatgccgtgtggagaaaggaagagggtggaagccaggaggtctggagggaggtctggagtggaggagatgagaggctccggatccctctgggaggtagatttgaggacagattggaattgaggtgaaagacagagaaagagaagtggccaggatgactccaagatttctgacctaaactactgggaaggacgcggttgtcatttctgaaatgcagaaggatgccagaagagaaggtactttggggaggggcgggaatcaggagttagttttggacatgagataagcttggaatatttatttgctatctaagayagctccttaacatggtaagcccttatgcaagttgttgtcagctgagatgggcgtggcactgagcatgggagcatggaggcgcctgagtggtctcatgctcaggtgrtttagcaaactcagtgtacatcctgccaattccagtcctgccatggccactgacaagctaggagggygctgaaaggagaaggaccccgatgtctcctccagcccatccatctcctstcwcccattggccaaacccaaccggaaacyaaaggccaagggtacccggtgatgaagactgtggtatcagcctcctgagcacagagagggcagaaaggggtggagacaaagaggggcgcagatagtgggcaaatggggaagtggcacttcccctagctcgagggcagaggcttggtgtgatggaatggcactccttaaactgctacatattttccctttaatttggccaagaacaagttgtcaagtttgtgtragataaaggtgcacttggttcgttcttgtctaatggcccccrcacccatgggtatttcttcagcttccacagtcatcccracactagctgggaagctccagcagccctggtcctggccccagctctgtgggcgctggccctcaactttgcctgcactgtgcttttgtgytattccccttggtcctgtttgggtgcaagtccccctcacgcattgagttcctgggccgctcaggctgctcctgtgtctccccagggaacatgaaggtcttgcaggagcccacctgcgtctccgactacatgagcatctctacttgcgagtggaagatgaatggtcccaccaattgcagcaccgagctccgcctgttgtaccagctggtttttctgctctccgagtaagcctgcgctggagctggaggtttggggaggttgtgcccaaagggtttgccccaagagtgagctgggtccaggtggtgcgctggagtgcaggatgctgagtatggtttgctgctgtttatatggtgttagaggggaggtcccatctccagggacatgttatgtaagatacagtggagcgcatggtgggagtgttggtccacrtggcacatggatacggctggaatactggactagaccagcagttctcacactttttggtctcaggaccctttttcacacttaaaaatgagtgaggacccaaagggctttggtgtaggtaacacatcattctatgtttacctaattagaacttgcaatgaagaaatggtgtaatttttaaaaaattaaaacaattaaaaattttttttcttactgaaatggaggtctcactgtgttgcccaggctgctctcaaactcctgggctccagtgatcctcctgcctcmgcctcccaaagtgctgggattacaagcgtgagccgctgtatccggcccaaaatggagaaattttaagtcccaacaacatgcaagcccgcattcaacaaatcttcagatcaattacatgatcacaggtcatgtagcctctagaaaattccactgtacgccagtgagagagagtgaaaaggcaaataacgtccctgtattatgatgaaaagagttttacctggtgggcccagaccacactttgagaaccactggactagacccttgattgaggagtacggtgttgagagtggagtyctctgtgatggtggatggaccaggacacatggcataggagtcaggtggttccctgggctactccatggtgcacaggatgcttcgttacactggtgcccaggacataatcacgtacacaagacacacagttacggggcagactggggatatacggcacaccagcatgcagsgttcaccagtaaaggtggtattccatgattattctaaggtagatgggctgtgctttgtttccattggcttagtccagggattggcaaactatggcccgtgagccaaatccggcccactgcttgtttttgtaaataaagttttattggaacacactggctgctgtagttgtaacagaaactgcatggccctcctttatgtttttttttgtttgtttgtttgtttgtttgttttctttgagacagagtttcgctcttgttgcccaggctggagtgcagtggcacaatctcggctcactgcaacctctgcctcscgggttcaagcgattctcctgtctcagcctcccgagtagttgggattaatggtgcctgccaccacacccggctaatttttcgtatttttagtagagaccggttttcaycatgttggccaagctggtctcgaactcctgaactcaggtgatccacccgcctcrgcstcccaaagtgctgggattacaggcatgagccactgagcccggcctyctcctttatcttaattgaaataattcagaaatggaaagtcaaatactgcatgttctcacttataagtaagagttaaataatgtgtacacatgggcattattccatgtaccatggaataacagacattgaagacttgggagggtgggagaggggtgaaggaagagaagttacttaatgggcatagtgtacaccatttgggtgacggacccaccagaaccccagacttcaccactakgcagcatatccagtgagaacagatctgaggcttgccatcaaaattgcacttgtaaggccgggcrctgtggtggctcrcggctgtaatcccagccctttgggaggccgaggtgggcagatcacttgaggtcaggagttcgagaccrgcctggccaacatggtgaagctccatctctactaaaaatacaacaattaactgggtgtagtggcgcacacctgtaatcccagctactagggaggctgaggcgggagaattgcttgagcccaggaggtggaggttgcagtgagccgagatcacatcactgtactctagcctgggtgacagtgagactttgtctcaggaaaaaaaaacaaaaacaaaaaacaaaaaactcgtaccccctaaatttatacaaataaccaaaaaaaaaaaaaaaaaaggaaattgtgtggcctttgaagtccaaaatattaactatctggcctgttacagaaaaagtttgcagacccctggcctagcccgtgagatgtgggttggctgttaaggtggaacattggaattatcttacgatggccaaactgtgcgatgcagagcttatgttgttctaaattaattagtgccaccggttcttccctttcatgggctttcaggaacaagctaagtcccaggaccagggccggcagctaggcaggtgtgaggagcatccttggtgcatgtggtaagaggctgtggccagcaagagaggcaaccctagtcggctgccccagcacaccctggccgctcccaagcccccagatctgtcctcacatccgtgatcgggaagctggaagagtctgatgcggttcctggaggcatgtcccggacacagctgtggggcccagccagcctacaggtgaccagcctaacccagcccctgtgtctgcagagcccacacgtgtntccctgagaacaacggaggcgcggggtgcgtgtgccacctgctcatggatgacgtggtcagtgcggataactatacactggacctgtgggctgggcagcagctgctgtggaagggctccttcaagcccagcgagcatggtgagcagggcggagtgyggcaggggtggctgggtgtgttcccacagctgcctgggytgagggtggggtgrgcaggggaggaggtggggtcatagcaacagcaggaggaagccgcctgtattttcccaaatctgatgggattcctgcccctgcctgggcctcagtcctcccacctttgaaacggagctggtcgcagtagaccaccaagcccccttcagcccagctgtttccacccctgaacttaagtgcccaggaaggcgtattgrgatgaggtgtgcttgctggaaggcatgcctgctgctgattgaaaaccgaactgggaacaktccttccattctdtgtccactsgtcagctgctgcggctttggatggtcttgaccgtggaaggctgaccttcttytggtacccggagtccctgcaggaatcccccttgagcttgctgggctgtggtgacaggagtttaaaacatgcgttgtattccagtgatgcatgatatgacatgcatcacaggaataaaaacctgaggtctcatggatatgattgcttcaaargagaccaagttttaaaacagatgaatcaaaataaagaaaaatactcagtaaatcatcataaagtacagagatgtggccaaaggtgtgaaggatgcagctgtaaaagctgaagtttgaggcygggtgtggtggttcatgcctataatcccagcactttgggaggccgagcccrgcggatcaccggaggtcaggagttcgagaccagcctggacaacrtggtaaaaccccgtctctactaaaaatacaaaaaattagtctggcatggtggcaggcgcctgtaatcccagctacttgggaggctgaggtaggagaatggcttgaacccaggagaaggaggttgcagtgagcttagatcatgctactgccctccagcctgggcgacagagygagattacgtctcaaaaaaataaaaataaataaaaataaaaagattttttaaaaggctgaagtttgggttactttggctcatacactttgccttcactgtagaaaggtggttagtaaagaccaggcgcggtggctcatgcctggaatcccagcactttgggagcccagcgcaggcagatcacttgagccctgggctattgaggctgcagtgagctgggattgtgccactgcactccagcctgggcaacagartgggaccctgtctcaaaaaagaagaaaaaaagggtaattaataaacactaaagttctatgtagaattttagcaacattattgttattataatcttctttgctatggctctgaatctgtgtggtgctccagaagtatgctatggaggttttgtcgaccaaaaatctgggtggtggctgtggtttgtaggccggggctgggctgggtgatgggggagtcactgcatagatcctcacatagaggccgcttctcccrcagtgaaacccagggccccaggaaacctgacagktcacaccaatgtctccgacactctgctgctgacctggagcaacccgtatccccctgacaattacctgtataatcatctcacctatgcagtcaacatttggagtgaaaaygacccggcagatgtgagtgggcatgctttgacgtttttctgtgacctctggggaacagggtgggtgaccagcagaggcccagtccctggagccaggagcctgggaggcaagcyctggggctggatagcaawtcccaggagctagagacctggcttctcacctggctctgcmctaggcaagtccctttgcttcctggccccccrcycctcacatcagagaaggggagttatctctgcatgccgctcctcctctgtaaaggtagrgctgtgggccacrtctgtgtttcccagtttgggggacacaagtgatcgtaggtggcacattgacagctcacttgaataaccctattattgaagagaataatactgactcaagagacagtgacccgtgtcagttcccttttgaggccaacgggttaaggagraagtccccatacagctgactcgtttactaattcctcttaatgaagagagcagaggccacaccccaggcttagactttcccaagaaaacaagatcagtttgttggttgttccccatggaagctggtcctgacattcccttcacagtagtgttggtggagtttttgttgttgtttgttttgagacagagtctcactctgtcacccagggtggaacacagtggcgtgatcttggctcactgcaacctccgcctcctgggttctagcgattctcctgcctcagcctcctgagcagcygggactacaggcacctgccaccgtgcccagctaatttttgtatatttagtagagatggggtttcactgcgttggccaggctggtctcaaactcytgacctcagatgatccactcgcctyggcctcccaaagtgctgggattacaggtgtgagccaccgcacctggccagtggagttccttcttaagtacatgtattgacatctttaaaaagggcragaggatttacaggaaactatcaggtcartaatggcaggggccgtccacagtgggtggctgagtccccctatttttctgctggtgtgcrgggaggtcatttcctgccacccatgtttccccaccctgaatccaccttcctcacattcccattggagggacamtctctggacatatgggacctggggtcccacagggctgcawtccaatgcctgctgtgccactcgccagctgtgtgatgttgggcatatcccataacctctttgtgcctcagtttcctcatctgtaacacaggagtgacaagagcacccgcccacagggctatgacagtacaagktgtgtgatacagatgagctcccctgtttggcccacatgtgtcctaaaagccatgtgccctttctcttgagtgccccaggccacagagatccccatctgcccrctgtcccacacactggtctgtcatttgttccttgaggtttgtgagggccggctctgtgcatcccaggggcccaggctgggcctggttggctctcagggagcaggcacccgccaccttaagctcccatgctggtgtctgtcactgcttcctctcaatctggccaagccaggggtgtcgatttatatctctcaggtctggtttcccctttggcactgggccaggtatggggaaagagcaggaatggggcagttggctcacacagcagaggctcagaaagcrgggggcatggggggaaggagtgcacagatgctagagagtggggcaagttttgtttggtcaataaatctccttctcatgccccaggcctgtgcaagacctacagagagtcccaaggatgggctggggggaagagaaaggtaccaccttcagagtccaaagatatgttatttaatattttcatatttctagatctgccttcaggcatggctggatccagcttctaggaacctgtccagctctgcgccctgctttattctgtactggcttcrtttttaggcaggctcttccctcatgtagtggcagatatgcctactagttgctccaggcctacatcccaaagccacagtgggaaaagggttttttttcttgacggttctaataagagtcctaaggctgctgctcagtggcctggcttcgatgctgtgccagcctctgaaccaatcactggctgtgggtggagagaggrtgctggtggagggccctgcttgtccagggaggagtcacataccygcctctagggctgcaggtgggctcagctccatccaaaccagatgaactgaaaataaggcaggagtggcttccccaggggaaactggggaagaggaagcaggactgtgctggctaaaatgccagccaggtttaagacgtggcaccagatgccagtcatgggattggattggtcagcatgcctgggctatggcttaggggtatgttggtgctcagggatgccacaggcctccagataccaggtctgaggcagaagaatgaagtccagcttctcttgtgggtggaacagtggcaactgagataccccatctctcccttcccaagaacagagctgaacataaagaatttagtgattggccagagcttggccacatgctcccctctgatgaatgataggccaggtgatgggattggcacaattggcttagactaatgagggttggccctggagttgcaggcagtggagttctgtcctaagcagtgggcacctaaacccgatggcataaaagctgggcgggtgtccacctgcatctgccacagcactryaggcaccaactgtggctcatactgagtgggataaattccagaaagaaacattaggaacttactatagaattttggggctagagctactcattcattcccctagataatttctaggcaaggttccatagtggagggggagttttggcttgggcattgaaggatgcataggagttttctagatggggaaagaagggaacggtagaccaggcagagggaactgcatgatawaaggtttatgggtgtgaaaattcatggaatgtttgaggattatggggttgggggatgtgggaatatgtgtagcgawaaagcaccaaacaaagccaaaagtttagttagagccctgaatgcctgcctcataatggtttccatattttatatgcctactatgtgccaggcacattgctcagggtcacacagctggaartggcagggctgagtttttgttgttgttgttgttgttgagacagagtctcactctatcacccaggctggaatgcaggggcgtgatcatggctcactgcatccttgacttcctgggmtcaggtgattctcccacctctgcctcccaggtagctgggactacaggcacaggccaccacgccaggctaattttttgtatttttagtagcgacagggtctcgccatgttgtccgggctggtctggatctcctggcttcaagtgatmcccctggctcagcctcccaaggtrctgggattacaggcttgagccaccrcatccagcccagatctgagatttgcacccagtatttgaactcccaagcctgtgctctttttcctcccatggacatttctctcagagatggtctcccaaacacctgtccttcttgttaaaaaacagacaaaccgcaagtagttctttggaagctcagatttctcttttgtttcttagtaaaacatttcccagttcccagctcccttccagggtgtragatttcttcggtaacttacatctagctgttgcttcttgtttgctcatgtttagaaagaaagacaaaagagagtgagaattttctctcccttccccagtctccccacaactcacaccccaccctcagctccctctgtaataggaaaatctctgaactctctgtagttgctccagcaatcttttggaactttgcttctttcttgtgaaaaaacctcyccttggctcactttgcaccaggtttccccaaatgtgcttccaaccacaagcagaaatggagctgccagtaaccaggaagaaactgccgggggctgaggaagaggagagggaggtgcatagccctggatctcgcagggagaggggtgacaggatgagaactcaggttgctcacttgccatcagggtcagtcatgaatatagcgttcatgtatcactttttaaagcttttttggagggtaaaagtaatagttacacaaaataaaaatacaaatggtacaaaaggacttagaatggaaacatgtttctctcccgactccagcctcctgtttttcttcccagagactgaccactgctgtctgtctcttgccagaagggaaagggaggcaaggttagggcaggcagagggcatgtgcatcctttagagagagcttatgtctatacaagcaaatgtgtgtgttcagtcatcgctgtcttagttttctattgctgcataataatggtactaccagcttcacagctttaaacaacacccatttattatctcatagtttctgtggttgggagtctggacatagcttagccaggttctctgctttagagtctcgtgaggctataatcaaggtgtgggatggggctgcagtttcatctgaggctcarttggggaagggtcacttctaagctcatacaatattggtgacattcagtccctggcaggctgttgaactgagagcctcagtttcstgctggctgttggttgtagttaaccctgaattccttcccatgtgccctttgcaaagccatcaaggcagagagacttgcctagcaagtaggatattacagtcttctgtaatataatcacatccatgaaatcctctatatatcccatcacctttaccatattctgtgggttagaaacaagtagcaggtcctgcccacactcgagaagaccagatgacacaaagatgtgattcaaagtggggatcatcggggccatcttaggtttgtctgcagtgatcactgtgccatctctctctctctcttttttttttttttttttygagacgaagtcgtcactctgtcacccaggctggagtgcagtggcatgatctcagcttaccacaatctctgcctcccaggttcaaatgattcttctgcctcagcctcctgagtagctgggattacaggtgcccgccaccacacccagctaatttttgtatttttagtagagacagagtttcaccatgttrgccagrctggtcttgaactcctcacctcaagtgatccacccacttcggcctcccaaagtgctgggattacaggcatgagccaccatgcccagccccatctctctttaaaaaacaaacaaacaaacaaaaaacataaaaagaagcagagaacacatacacatctgcatcttcccttgtttacttaacaayagatcttggaagtcacttctcagtagaggctaggytgggcagagcattggattctaggccagtgagtttggacttgaccatggagacactaggaagcccatgaaggacagagagagatgcctcgaccctgccagtcctttagaaagatcacccagtgctttttrtataccaaaccctatttgaaatacttacgtatattaacccatttccttatcaccacaaccctgcgggaagggagataggcacttttattatcttcattttgcagatgasgacattgaggtccagagaggttatgtcacttacttaaggtcacacagccaggaagtggtagtagggactcttacccttgttttacagatgagattgaattatctcacraaaactcagaaaggttaaacaacttgcctaagtaacatacagctaattagtcgaggagcctgacgcatgttgctstagcctggtcacagttacagaggtggcaagcaatggcctgaacaggaygaacaaccaaatacccaggctggtggctcttaaacatggtggggtcagctaacgacagcaaccagggtgggcactggtgcccctcgcccccggctggtgccctaacatctcccttttctctaccagttcagaatctataacgtgacctacctagaaccctccctccgcatcgcagccagcaccctgaagtctgggatttcctacagggcacgggtgagggcctgggctcagtgctataacaccacctggagtgagtggagccccagcaccaagtggcacaactgtgagtatcaagaggcctaagcaatggtaatctccactctccattcttcccctgtggccagacacttcccctggctgagtctctgggcttttatatcataggatgcctctaatggcaatcctgccattagatacacctgcygtggtgtatctgccaggtaggcaggctaggctgcagtaacamacaagcccacaatttccatggcttaacactatrggaatatatttcttgctcaygtaacaagctaacgtgaatgttgctggtttgtaggtggtttccctccctgtagaaatctggggagtgaggttctttccatcttgtggtgccrtcattctccmggacaaagattcttacctacttttgtgtcctggtttcctttggcagcctggtgaagcctatggacctcatttcagaatatttwtaaatacataaaatcccagcctgggcaatatagwgaaacccccatctgtacaaaaattagccaggcatggtggcatgcacctgtagtcccaggtactgggaaggctgaggtgggaggatcacttgagcccaggrgtttgaggctgcagtgagccgtgatcgtaccactttactcccacctgggtgacagagcaagagcccatctctaaaaataaataaatacaatgaaataaaataaaataaatagaactacagaggaaactaattgtattgaaatgcagttataaaacatttaaacacatttttaatctagagatatatgtgcttctttattaagatctataaataataagttctaggggtagctcrcataaatactgtaatttcaaagtagataagcataaataatactttatgatactgaaattgtgatgtgatatgagaatagctgtgagttttgttttgctggggacaggatcastgatgctgtcattactggggtctcttccctccattctttttttaaaattgtattttattttatttttaaaattttaaaataaatagagacagggtatcactatgttgcccaggctgcttttgacctcctgggctccagtgatcttcccatcttggcttyccaaagtgctgggattacaagtgggagccagtgttcctggycccttcctccattcttaatggaaggagatgctaggtgtgagaggttagggaaagtaaagatgtaatttctttcccatccaagttctcagacccctgaattctacctgcagccatgttggtccatcaaccccaagtgaagaatccctgctctagggccccaccattgtctgtatccagccagcagaagaggcgtgattatggagatcacatctgcttcttgaaagcagacagcccggaagtgggccgcatcacttcctctcaaattctattggtgaaaatggtcacatgactacacatagccacaaaggaggctgggaactttctcacttggaacstacatcccagaaacractcttttcagtgaggtatcccacaggtctttcgcagtagaaatattgattatctcacataaaatgaagtcttacaaatggacctactgggttttgtacagcagccaagtgatatctcttcccttctgctgtcttcccttctgccrtccttcacatggtggcattgtatccttagacttgccacccatgccctcaggttggccrttgcacaytrtcttacataaagcaggaaggaaaggaaaggctgctacgagagagtgtaccttgtgcatctcttttttaatcaggaagcaaacatctttctagaagcttccctagcaaaattccccttacatctcattggccaagactgttacatrttacatggttactgttattacttgctcattgcaaggaagactgggaactcaaatgcctggaaaaaggaacaggataatcgtgattggctcaagccttagggtgggcatggctccctgacaagggagagaggaaaaagctgttgagtgaagaagactgcttcagtttccccatctgtataatgggaggagtaagggctgtcgtraaaactcaatgaaagaagattcttcaacgtggtaggtgcagtggcagctggcagtaccctgaccctgccaccgcacagccctctcagcattgctcrtcctgcactgtggatatcarttgagccacgtgtctcctgccctgggctgtgagctccataggcagggtctccatggctgtatctccagaacccagcacagaaccaggtgcttgggaaagttttgaattgattctcatctgccattggcatggggaagggaactagcttgyatgaaacagataacaatgtatgggaccctcattcattatttcagcaaatatttgctgagttcctcctacatggctagccctgtgctagacactggggaatcrgcgatgaacaaagcagatagaaatccccactcttgtggagctgacattctggagggagagacaaaaagcaaacatataaagaaagaaagaaatcacatggrtctggatgacagtgagtgctgggaagaaaataaaagcagaggaaggggatggagcgatgggcrgggggcaacggtagggagggtgtcggggaaaactttttggagaatgtgacgatgaaagtgaacaaggagaagtcaaccgtgttgagatgatggcagctaatgatgtggacaggccactctgttctgagtgcattatctattgattcatcatgtcatcctcgcaacagccctgcacgatcaattctgtcattaaccccatagtacagatgaggatgcggaggcacagagaagataagggacttgtcctgtgtcacacagcaaggagccatccggctcctaagttggtgcatttgacttctgtgcttcyggaaagaaagagcagcaagtttaagatctggaggtggcactgagctttggaggagcagggggcaatgaggtggccggtgtgacgaggactcaatgtgcaagagggagagtggyggggagatgaggtggaggggtggtcggcggtcagatcgtggagggtctcggacgagggtcctgaccctgggtctccagtcctgggaagtggagcccaggctgtaccatggckgacctcagctcatggcttcccctcccacttccagcctacagggagcccttcgagcagcacctcctgctgggcgtcagcgtttcctgcattgtcatcctggccgtctgcctgttgtgctatgtcagcatcacsaagtgagtcctgggcccagtgctgccgagcagtccctctggagtgcagggtggcagggacttgcccctctagtctgcccctttgcagtcctctcagtcaataatacgyatttactgagcagctactacacaccttgagagtagagctgagaacatatcgacaaggaccccacttttttctttttttyttttttttttttttttgagacggagtctcactctgtcacccaggctggagtatagtggcacaatcttgcctaacagtaacctccgcctcccgggttcaagcaattcttctgcytcagcctccagagtagctgggattacaggcgcatgccactatgccyrgctaattttttgtatttttggtagagatggggtttcaccatgttggtcaggctggtctcgaactcctgacctcatgatctgcctgcctcagcctcccaaagtgctgggattacaggtgtgagccactgcacccaaccaggactccacatttctaaaaccgscatcctactggggagactgaaaatacatatcaatcacaaacaggtggttttccatagtgacccactctctgaatgcactagaccagggtgsaggccagagatsttctggggtgctttttgcaaggggsaccaggataaggctctccaaggagggaaaatttgaggggggccytgactggggagaatgagctggccagggataagcaagatggagtcatcccacatccccttacaacrctgggtgcctgggcaactgggggcatytgggggcatgtggtaggagccagaggaatttgcgacgattgccctgatggagtcaggagacctgggtttgaatcctggccttggagcttggtagctggyggccgacaagttgctgaaacccctgagcctggggttcctgctttgcagagtgacagtgatggtgagaacatatttcatcagccagaagaggccaaatcacagtaaaggctgagggaggagatgagtggcgagtggctgggaggtggtggaaggagcctcgtttccagagagctcttgccagcccttggaatcatggtgtctcagagcctcagtcctcccatctctgaaatgggactagcaagctcaacctcactaagtcaggattagaggtggctaaggattattaacatgattgatgaaagtgcccactcttggcccagcacacactaggtaggcagggaatgcaaattcccctccatatcttgtcactgatgcctccgagcaaccttggactgatcgccttgctctgagcctcagtttccccatcacctgtacctcttcccactccccatcactatatcccagcatgccagcctctttgctgttctttgtctttggtttcttgttttgttctgttttttagacagggtctcactctgttagccaggctgaagtgcagtggcgcggttacggctcactgcagcctccaattcctgggctaaagagatcctcccatttcaacttccagagcagctgggacaacaggygcttgccaccacacctggctaattttcttattttaatttaatttwattttattttttgggacagagtggagtctcaaaaaccaagctrgagtgcagtggtgcgatctcgactcactgcaatctctgcctcccgggttcaagcgattctcctgccttagcctcccgactagctgggattacaggcgtgtgccacgacacccagctaatttttgtatttttagtagagatggggtttcaccatgttggccaggatggtcttgaactcctgacctcaagtgatccacccacctcgttctcccaaggtgctgggtacaggcatgagccactgtgcctggccaattttcttacattttgtagagactggctgtcacttatgtagcccaggctgatcttgaacttctacccctttatctttattcatggcacttattaccatgaatgaatgacctcatataagcatttctttcgtttttttttttttttctttgagatggagtctcatgttgtcccccaggctggagtgcagtggcgcgatctcagctcactgcaacctccgccttccgggttcaagcgattctcctgcctcagcctcctgagtagctgggattgcaggcgcctgccaccatgcctggctaagttttgcatttttagtagagacggtgtttcaccatattggccaggctggtctcgaacttctgacctcaggtgatacacctgccttggcctcccaaagtgctgggattacargcrtgagccrccatgcctggcctcatataagcatttctgtctccatttatcatccatctttccctcttgaaggtcagtttcaccaaggcaggcatctttgtctcgttcactgttgtrgcctcagggccaggcacagtgagtcaaacatagaaggtgctcaataaatatgtgtttatttattgaaaccatgggcagaggctaattcagaagcggtctgaggaccttacctcccagtgatgatgcaccrtggccccaggcaggccaggaagagagaagggttgtgtttctccgtaggtcccccagcttcccaggccatcccaggccattccctggtcatttgccctcagctgctctgaaaaagggattgttgaggggaacctagaatcctctctctgcagtttgagtctttcctaatcccctggggtctcattcccactgaggacataggtggcctcctcaggaactctgtgctgggtaacagaatgcgggagtgtgaacctggctctgccacctaccagctgtcactccacctccttgggcctcactctcctcatctgtagaatagggttagcaatagaatccatgtcaccaggttagaatgatgagtcagtggtttgacctccagaaactaatcagcctgatctctgatgccaaataagtattggtgataacgaccacttttatgggaggagcgttcacctgtcaataattcagagatcaacaccttttccttttgtttttcaggattaagaaagaatggtgggatcagattcccaacccagcccgcagccgcctsgtggctataataatccaggatgctcaggtaggagtaggcgtggatgaggacatgtgggactgtgtacatgaagaagtgtggttcagaacacctgggctgttaaggaccttcactggcttctggaatggcaaatagacagtcaggagggttgcaggggagacagagrcagaagccgaatgaggtcattagcagaccagaggctttcccgcccttccccttggcaatcccagcctggggtgggcttctctggggttggtttcctgtttttttccctccccttgggagaatgacccttgggtcatcatcactgtgtcattccctggggaggtgccagtaccagggctagaggccagaaggagtggaggaaggagagggtgacaggctttctgtgtcttcttcttaagcataggaaactgcccccgaagcactagcaaatcccttccgggttctcattggcctgaaatgtatcccacccctaagccaggggtggagtcagcttccccaaggcgatggtcctgtgggtgagtgggtggggtttgcctgagcaagatgagagttctctaggtaggagaaagggggattataggtcctgtctagaagagaaggtctgagggtccttgcttttccagggactctggaatctagtggtgttggctttgaatcctgactctgccactcactggcagtgtggacttgagcaagttgcttaattctctgagcctcagtttcctcttgtgggttataacagtgtttacctggtaggacagatattggaatttattgagacaatacatataaagtgcatattccagcctcttgcaaataccaagtgccatttatgtatcagttagtgtttgctgtgtaacaaaygaccccgaaatgtagagggttacaacaactttatttagcttatgcttctgcaggctggcatttggggctgggctcagcagtgagggtggygggggaggctgggctgggctgggctgggcagatctgaattgagctgacccgtccccgtagcctccctccgtgtctgacagttggctttttttttttttttctttttctgagacggagttttgctcttattgcccaggagtgcaatggcrtgatcttggctcactgcaacctstgcytcctgggttcaagcaattttcttgcctcagcctcccaagtagctgggattacaggcatgtgccaccacgccaggctaattttgtatttttaatagagatggggtttcttcatgtyggtcaggctggtctggaactcctaatatcagrtgatccacccayytcagcctcccaaagtgctgggattacaggcgtgagccactgcacccagcctagttggctgacttttacctgggacagtgcaggtgcctgagccatgtgcctctcactctccagcaggccggcccaggcttgtttacagagtggctcagttttcaagggtgggaagtcccaaggcttcttgaggcctaggcgcagcactggcatgatatcacttccatcacattctatgggcccaagcaagtcccagggccagtgtagattcaagggatgggaggagattcagagcactcctctgtggccacttttgccatcgaccacagtccctgtaaatattaggacaatgtaattaattcccaggaatctgargctcagaaagcgtaagtgacctgttggacttctgatctgtgtgatgtcgaggcttgtaccccttcctgagcattgccgtactccaggccgggctgcaaggccactctgctctttcattggctgtctctgtattttaggggtcacagtgggagaagcggtcccgaggccaggaaccagccaagtgcccgtatgtatctgaacttaggtcacagcctgcatgcattgggaaggtgatagaattggagaggcaagcccctagctccatgtctgccttctcttccctgcattcggtaattgccctgtgacattagccttcaagggacggcaggaggaggggtgttctggaaacgtggactgctggccaagmcccctgagtttcactggtgtgtcaggtacatggtgataccccttgggagtgctgttatagttaacaaccagagcagccktgcctgttgttaaaatcttgacctaattgtatacttgtcggcaaatagccactatcctgaacactcccctccttttttttaatatacaggatctcactctgtggcccaggctggtgtgcagtggtgcratcatagctcactgcaccttcaaactcctgagctcaagtgatcctcccatcttagcctcccgagtagctgatactacagatgtgcattaccacgcctggctattttaaaaggtttttgcctgtaatdccagctactcaggaggctgaggcatgagaatcacttgaacccgggaggcagaggttgcagtgagcgcagattgtgccactgcactccagcctgggcgacagagtgagactcttgtctcaaaaaaaataataccaaaaaaagtttttgtaaagacaagctctcgctgtgttgccccgccactgtggcctccttagcttcttccctggggcctgctggacctttccatactccagaaactaaagggggtccaggaccctgcttcaaccctaggatcccgcatcttttttttttttttttttttttggacgcagggtcttgctgtgtccctcaggctggagtgcagtgattcactgcagcctcaaactcgtgggctcaagtgattctctagcctcagccttctaagtagctgggactacagtcatacaccaacatgcccagctaattttccttttttttaattcttgtagagatgtttgagacrgcttgggctctgttgcccaggctgttctcaaactcctgagctcaagcratcctccctcctcagcctcctaaagtgctgggattacaggcgtgagccaccgcacccggcttccatatcctttctaattggtcatgrcttgggataatggtgttgcttttaattatcatcatccataaagactttttcttactcaacagayctgagcttgtatttggtgcccaggacatgtgctgggttcccgaaatcccaaagacacagaccctaccctcagggatttctcattctagcaacatagactgatcaattactgattataacgttagaaggcatgtctgmagtagacagccatcaggacatggtgatttcaggctgggctttgaagaatgaataggagtttttcaagtgtcgaaactgaaccctgaccaamctttgcttttgcagacactggaagaattgtcttaccaagctcttgccctgtttyctggagcacaacatgaaaagggatgaagatcctcacaaggctgccaaagagatgcctttccagggctctggaaaatcagcatggtgcccagtggagatcagcaagacagtcctctggccagagagcatcagcgtggtgcgatgtgtggagttgtttgaggccccggtggagtgtgaggaggaggaggaggtagaggaagaaaaagggagcttctgtgcatcgcctgagagcagcagggatgacttccaggagggaagggmgggcattgtggcccggctaacagagagcctgttcctggacctkctyggagaggagaatgggggcttttgccagcaggacatgggggagtcaygyctyctyccaccttygggaagtacgagtgctcacatgccctgggatgagttcccaagtgcagggcccaaggaggcacctccctggggcaaggagcagcctctccacctggagccaagtcctcctgccagcccgacccagagtccagacaacctgacttgcacagagacgcccctcgtcatcgcaggcaaccctgcttaccgcagcttcagcaacyccctgagccagtcaccgtgtcccagagagctgggtccagacccactgctggccagacacctggaggaagtagaacccgagatgccctgtgtcccccagctctctgagccaaccactgtgccccaacctgagccagaaacctgggagcagatcctccgccgaaatgtcctccagcatggggcagctgcagcccccgtctcggcccccaccagtggctatcrggagtttrtacatgcggtggagcagggtggcacccaggccagtgcggtggtgggcttgggtcccccaggagaggctggttacaaggccttctcaagcctgcttgccagcagtgctgtgtccccagagaaatgtgggtttggggctagcagtggggaagaggggtataagcctttccaagacctcattcctggctgccctggggaccctgccccagtccctgtccccttgttcacctttggactggacagggagccacctcgcagtccgcagagctcacatctcccaagcagctccycagagcacctgggtctggagccgggggaaaaggtagaggacatgccaaagcccccacttccccaggagcaggccacagacccccttgtggacagcctgggcagtggcattgtctactcagcccttacctgccacctgtgcggccacctgaaacagtgtcatggccaggaggatggtggccagacccctgtcatggccagtccttgctgtggctgctgctgtggagacaggkcctcgccccctacaacccccctgagggccccagacccctctccaggtggggttccactggaggccagtctgtgtccggcctccctggcaccctcgggcatcycagagaagagtaaatcctcatcatccttccatcctgccccyggcaatgctcagagctcaagccagacccccaaaatcgtgaactttgtctccgtgggacccacatacatgagggtctcttaggtgcaygycctcttgttgctgagtctgcagatgaggactagggcttatycatgcctgggaaatgccacctcctggaaggcagccaggstggcagatttccaaaagacttgaagaaccatggtatgaaggtgattggccccactgacgttggcctaacactgggctgcagagactggaccccgcccagcattgggctgggctcgccacatcccatgagagtagagggcactgggtcgccgtgccccacggcaggcccctgcaggaaaactgargcccttgggmacctcgacttgtgaacgagttgttggctgctccctccacagcttctgcagcagactgtccctgttgtaactgcccaaggcatgttttgcccaccagatcatggcccacrtggaggcccacctgcctctgtctcactgaactagaagccgagcctagaaactaacacagccatcaagggaatgacttgggcggccttgggaaatcgatgagaaattgaacttcagggagggtggtcattgcctagaggtgctcattcatttaacagagcttccttaggttgatgctggaggcagaatcccggctgtcaaggggtgttcagttaaggggagcaacagaggacatgaaaaattgctrtgactaaagcagggacaatttgctgccaaacacccatgcccagctgtatggctgggggctcctcgtatgcatgsaacccccagaataaatatgctcagccaycctgtgggccgggcaatccagacagcaggcataaggcaccagttaccctgcatgttggcccagacctcaggtgctagggaaggcgggaaccttgggttgagtaatgctcgtctgtgtgttttagtttcatcacctgttatctgtgtttgctgaggagagtggaacagaaggggtggagttttgtataaataaagtttctttgtctctttattttttatgtattaaccaaacatacctccagacactgctgtgagtgctgtgtctctgttaactcctggaattcacccatccagaggaaccaggatgcaagaggttaagaaacttgccgtctgggtttgggttccccatacaaggattcaaatagttgatttaggaagtaatcccgggaaaccctgctaaggtagtggggaactgaggcagggaaggacacaaaccaagaaagtgttacctgaaaggggtccagatgcagaccccaaaagagggttcttgaatctcatgcaagaaagaattcagagcgagtccatagagtcagtgaaagcaagttaatgaggaaagtaaaggaataaaagaatggctactccgtagacagagcagccctgagggttgctggctgcctatttttatggttattgattaattatattccaaacaaggggtggattattatgcctcccttttagaccatatagggtaacttcctgatgttgccatggcatttgtaaactgtcatggcgctgttgggagtgtagcagtgaggacaaccagaggtcactcttgttgccatcttggttttggtgggttagagccatcttctttactgcaacctgttttatcagcaaggtctttatgacttgtatcggtgacgacctcctgtctcattctatgactaagaatgccctaacctcccaggaatgcagcccagtaagtctcagcctcattttacccagcccctcttcaaagctccagtttaaataaacctctgacaaaagggtgagttattcaacagattaccagcatgagtaactgatgcttacctgccggggatctctggaagaccatgcatggcacatgcccagttatgcctgcaaaggagagggagctggggtatttgtccaccagctcccatctgtcattggctgagagctgcttccaggagcattaattctccagcacttccagctactccaggaaaaaaaaaattcttcaactgagagttggaggtgttgagagactctggcacaccaagaagacaggaacaggacaccaacagtggctgatgatacactgccaaggtcacacagctagttagcaacagatctatagtggaatccagacagtgtctccatcacccaggctctctgtagtgatctgcgcttcacatccgaggcaggcagagggatggtgtgggccttagatgggaaggctgggaacctgaagctcctatgtctgtatcacttttgcttctctgagtagctgccctgatttcacacttgaggggcttggccattttagattccttcctgctctaggagcctacatactacactggaaatgatggggagctctctacctcacatgcagcctgatgtttgttagaaacacctccttgcgccaggcatgatggctcatggctgtaatcccagcaatttgggaggctgaggcgggtgtatcacttgaggtgaggagttcaagaccagcctggccaatatggtgaaaccctatctctaccaaaaaataaaaaattagccgggtgtggtggtgggtgcctgtaatctcagctacttgggaggctgagttggtagaattgcttcaacctgggacgcggaggttgcagtgagctgagattgtgccattgcactccagcttggatgacagagtgagaccctgtctcaggaaaaaaaaaaaaaaacaaaaaaaaccttgttctaagccaaaatcaatccctttagctgcccaaatcacacagtttacagatggagaaacagttttagagaggaaaagggacttgcccaaagtcacccagagaatggcagagcctgaactagccttctggacttcttgcctccaaaagctctttataataaaatataattttaaataaaaatagttatctgtttagggccaagcaatatgctaagtgccgtccagccactgtgtcatttacgtctccaaacagctctagttgggaggctcaatgattatcccaattttacagataaggaaacaggtccagagaggttgaggattagcctagaaccacacagctaggaaatcctggagycaggatttgaacccgggtctgacctaagagctcccagccgccgtgatatatcagcttatgtcatcctgacacctacgcrgatgtcggctcgaatccactttgcctgagcattgtctcagagaaatctaatttaaaaattaggcagcaaatagaaaatatatttgactgctagagatgcaatgggactgggagcccaacaaaggatcttaggcaaaagaaatccaagttgttggcctcagcaactattactgaactggctgggctttgggaagctacagagggatgagaagacctggtggatcaggtgggcccaactcaggctggcccccaccctgcaggaagtaggaaaagtccagggtcataggcccagtgagatgccggctgcgggagtttcagcctccggggctggaccagagggcaggaggggacgcccctgggtagcagcgccagagtgggctgagtggcctgggcccctgcgggggagctttcagagatgttgatttgggggtactccctcagccctgcctttacacagaatttgtgggggatgaggggagggggaaaggggggaggaaggcagtgagtgcatctgaattttttttttttttttacaaaaagtggcttattgcatttttctgattactctatcagcacgtgcagaccttttcctattcagagaaagcctgaagatataaagaggaaagtgaagaaaaaccaccggaaatcccatccccgccccagcatctggcactgtgtgggcgatcacgaaatgagcgcttgtttttgaaggcgtagtatctccgtgaacatccggttgaacaacctttctgactttatttttcccacgaaagttattaattaaaaaacaaaaagcaaaacaccgaaaaaacaaaaaacccagcaagtgtttgagctcccaccacgagggaggcctgacgtcactggatcctcccggcagccgatgaggctgcatgggacttgcccacgatgtgctgttaccgagtggcatagccaggcttcaaaccagagtcctagctaaccgccctgtatataccatgggctcatcatcttccctggttccagctcagaacagagactcagaggaacaagggctctgcgctcaccctgcctggttaggtccagcctttccaattccaagctgtgtgaccatgggaaaagtgtttgcccactctgggcctaaatttcctccttggtaaaaggcacacaagagcagtactctgcacgccacagtggtggggtgagcagcagatgacgtggtgggtggaggccaggtgacaccaggctgctctcaagcttaacttgcctgtgatggtggcgggaccgtgtcagttcttccaccaaatcccacctgtttccacgacgtttattgacaagtcaggggcaccgccccgggtggagggggtgtgaagaggaagtcagctccctggtccctgctgccctctggtgaccacatcagcatcagcacctgctccatcccagcagctccaggtccaggccgtgcccagaaaacttggcctgggagattccccacccgccctgccccgatcccacctctcttccatctctgcattttccagaaattcccccagcaccagacaaaagagcctaatgtccattagatatgctgtgtggcgccaggccagcgtgtaacctctctgtgcttgattcgttatctgtaaaatgggaatcattataatatctgcctcatgtagctattgtgagaattaaatatgttagtacctgtgaggtccttagaactatgcctgcggctgggcacagtggctcacgcctgtaatcccagcactatgggaggccaaggtgggcagattgcctgaggtaggcgtttgagaccagcctggccaacatggtgaaaccctgtctctattaaaaatacaaaaatcagccagacatggtggcgggtgcctgtaatcccagctactcgggaggatgaggcaggagaattgcctgaacccaggaggcagaggttgcagcaagcggagattgtgccactgcactccagcctgggcaacaagtgggactctgtctcaaaaaaaaagaactatgcctgcaaatagttaatgccttaaaagtatttgctaacattcttcttcttcttcttttttttttttttttgagacagggtctttctctgtcacccaggctggagcgcagtggcccaatcccggctcactgcagccttgaacacctgggctcatgtgattctcccacttcagcctctcaagtagctgtgaccacaggtgcacacaccactaagcctggctaatttgttttttaattttttgtagagacagggaatcactatgttgcctaggctagtcccagactcctagggttcaagcaatccatccacctcggcctcccaaagtgctaggattacagatgtgagccaccatgcctagtctgctaacattatccttaatattacactgaatatgtctgtggattttgtgggaggtgagggtataaaacataattagaggaaataatgacattctaaatttaatttgactttattacaaaaagggcagaatggagcaacagtaatccaggacaaaaaattgtcccaatcccatcattcaacccacttgtgtttgtatctgtttgtgccacttctgtgtgttgtttacatgcagagtcagtgtttgcgtatttgcggttttatatcattcatttctcatcatacatacatatatttatattcctgacatttttctagggaatatctttatattcctgacatttttctctttttcccttatgttcttccataccgggacttataggaccttgcccagactcaacttccctcttccccatggacccaagttgctgagcttccaacaggtgtttacagcaaaggagaatgagacagagagaagcagagatgcagagagaaagacagacagagaagactaaactgattgatcccaactccattatgatatctgactccaaccacagaatgaccctgatccagccacagactgacttctgatcctggccacagtccacctcctgtcctcagccacagaacagctctgactcaagccaggaactgagtcccgacccatgttactgacttactcatgatcctggttgcaggctggccccagccacatgctgacccctgaccctcaccacagatggatctttgatcccagctataggctgatctctgattctggctgccctgaaccaccactcctatatactgatgacccaccttagcgtgatcccacccaggaactggcatttcctgggacaggctcttggccacctgctgctctgccctgggcacaccaggccctacgcatcctcccccttccaccaccatccatgatttcctgatttctagcagcaaatttagcttgagttggtcaacatagctgggctgcctgaccttcctctctgccatggaaccacagagcaagtcagcagttctccttcctaatcaaaaagcagcatggaggagaaggctcctttgccaccttcctttctgctttggatggtgcttttgcaatcatgaggagacaagcctggagatgaaaggaggcattctgaatatggtggagtggaagaagaagaaggcctgcctggggctttgattacatcaccaagtgatcaaaccaaccttaaattcttaaataaactgtaagtgtgcttttctttaaaccactgtgagttttcttttgcagtcataaagcaaccttaaaaattgtagtaggtacaataatgaaccccccaagatgtccatgtcccaatccctggaacctgtgaacatgttacattacatggcaagggggggattaaggttacagatggaagcagggttgctaatcaactgaacctgagatgtagagggagattatccttaattatccagacaggcccaatataatcccaaggatcttca

SEQ ID NO: 8729 - DNA, 38023 bp, Homo sapiens
gagacaaggtctctgttgcccaggctggaatgcagtggcacagtcttggctcactgcagcctccagctctcaggctcaagcgatcctaccaagtagctgggaccacaggcatgcaccatcatgcccagctaatttttgtgctttttgtaaagacgggcttcaccatgttgcccaggctggtctcgaactcctgggctccagcgatcctcctgcctcggcctcctaaaaatgctgggattacaggcatgagccaccatgcttggccaacacaaagatttttaaatgaatataggaaggatcacttgctattgcacttacgttcaaggaaatttattgtgattactaatacatatggcaccaaacctaggtggcttatagcaaagtttccctttaacttccagtttgcagtgcctgtcacaggccaggttctcagctagcatttgtggagggatgactggccttgcccctcctcgttttgtgctcactaccttgttgacataaaaaatgttctcaagatcaggcgtggtagctcatgcctgtaatccccgcactttgggaggccaaaggcgggagaattgcttgaggttaggagtttgagaccagcctgggcaatacagcaagatcccatctctacaaaaaataaatattagctgggcatggtggcatgcacctgtagccccagctaattgggaggcgtaggcaagaggattgtttgagcatgagaggttgaggctgcagtgagctgtgatcaggccactgcactccagctccagcctgggaaacacagcgagactctgtcttaaaaaaaaaaaaaaaaaagaaacagaatgttctcaccccgtttttctccagagtttccaaacagcctgcctctgaagcagccctcttctcaagcatagtattatgggctgaattaggcccccaaaagtttgtatgttgaaaccctaacccctagtacctcagaatgtgactgtattcaaggtctgggtgtggtggctcatgcctgtaatcccagcattttgggagggcaaggcgggcacactgcttgagcccaggaatttgagtccaacctggacaacatggcaagacccagtatctgtaaaaataaaataaaaaacaacagccaggcatggttgtatgcgtctgtgatcccaggtagtccagaggctgaggtgggaggattgcttgagcccgggaggtgaaggttgccgtgagccaagatcctgccactgcactccagcctgggtgacagagcgagaccctgtctcaaactttttttttaattaaataaatgaaaaataaaaataaataaaactacaagggcaactgaaaccccaagtgagataatacatttgctcttcatggaagaggacaagtgagtaaaccctgctcttctgtggtggggaggccatagttagaattgaaggggccccaccagaaacagaaatggtgggaagtggtggcctctggaggcaaagctttgggggctgtggacatctgctgagaccctggctgcagacatggcttcccttccgagggagttcatgtgaaagtcgaggcccccaccggtattagaggagcagccatctcttttgctcgcagttaaacaagtgctctcgcagtaggataagccacaaaggagacactgtaggagaataaagaggaatccttctggaagccaatagaaaaaaaaaaaaaacaatgtggtcagccctcataaggctagaaccagaaacttagttctctgaagccaaggcactgtaatttccctccctctgatgacagtcacaccacagaaagggagctgtcgggaggaagaagaaggagcccagaggcacggctcatacctccctgctggaaggaggggtaaagggcacgaaagtcctttgagaagagaggaaggagaaatagaaatgaataagacagcaccctacaccaaccaacttagagtttagataggaatggagacatatttctgaaaatactggaaacaatcacagccaaataagaaatccagttcatttcaacactgaatagttgggcactgtagcgtattcaaggataatttttaaaaattaaaaagttaaatcaggctgggcgaggtggctcacacctgtaatcctagcactttgagaggcggagacagcaggatcatttgagctcaagagcttgagatcagcctgggcaacatgggaaaacaccgtctctacaaaaaatacaaaattaggctgggccctgtggctcacgcctgtaatcccagcactttggggggccgaggcaggtggatcacgaggtcaggagttcgagaccagcctggccaacatggtgaaaccctgtctctactaaaaatacaaaaattaggggagtgtggtggcgggtgcctgtaaccccagctactcaggaggctgaggcagaattgcttgaactcgggaggcggaggttgcagtgaggcgatatcgcaccactgcactccagcctgggcgacagagcgagactctgtctcggcaaaaaaaaaaaattcatattagcccccagagaaaccccacaccctttagctgtcacctacctaacctcccatgtggatttcacggaatcatacaatactgagtcctttggacctggctgattttatttagtaaacgttttcaaggtttatcgatgttgtagcatgtgtcactacttcattcctttttacgactgaataaaactccatttggtggatttatgacagtttgtttattcgtgcaatggtttttaatggatggacatttgagttgttttcaccttttggttactgtaaataatgctgctataaacatctggtgtaagtttatacatacgttattaacttttgttttagagttggggtctcactatgttccccaggctggtcttgaactcctaggcttaagtaatccacccacctctgcctcccaaagtgctgggattacaggcgtgagcccactgtgcccggcggatttttgtgaggacgtatgttttcacctctttcaggtgttaacttaggcctcttttacggatgttcaacaagcaaacagcttttacacacgtgagtcaaggcctctctgtaagttctgagagctgttccccaggccctgaaccctgacccccaaatctagcaggttaagccaaaattctcctcaacttcaaggcctacttcattcattatgcatccactcaactcacatttctctatcctctgctatgggccagacaccctgcaatgagctgggatgaagcaggggaacaccgcaggtaaaaatgcttgcctgggtggggcttaagatccagtgagggcaggaaggaacatatacaagtaaatatgctgtatgttcctttctccatgaagctttcctggatgttccaggaagggacgaattctactctggtagtaatatatttcttttcttgtcttttgaggagtcttgcccatgttggagtgcaatggcgtgatctcggctcactacaacctctgactccctggttcaagggatcctcctgcctcagcgctcgagtagctgggattacaggcccgcaatgccacacccagctaatttttgtatttttagtagagacggggtttcaccatgttggccaggctggtcttgaacttccaacgtcgtgatccgcctgccttggcctcccaaagtgctgggattacaggcgtgagccactgcgcctggcctatttctttttttcttttcttttcttttgagatggaatcttgcccgggttggagtgcaatggcgtgattttggctcaccgcaacctccacctcccgggctcaagcgattctcctgcctcagcctctcaagtagctgggattacaggcgcgtgaaccaccacgcccagctaatttttgtatttttagtagagactgggtttcaccatttgggccaggctggtctggaactcccgacctcaggtgatctgcctgcctcagcctcccaaagtgctaggattacagtggtgaaccaccgcgcctagcctgtttcttttgtttcaaaagtgatttttacctctcaaaagtgatttctataatgacactgatggaaaattccatcaaatagccataacgcatgtcaagcactctgctctgcataccttctgtcacactctaaggatgagagaggggagagttatcctggttctggctgtgtcctccccattttggccatcttatgagctccttatagaggtctgaaatgatttggagtccagagtccatggctgtcaggatatgactagggtgagcaggcagttgggaccaccttgacctccagcctcctggtcctcagttcctcgggtatcccactctgctgggggcttagtgaccatgtttgggctccagagattattttttccttccactcctatccttagtttgttactaaccaggcgggagtacaggcatgtctctgaagacaggctcagggctgtgtgacagctgacgaccaggctgcagggaaccaggtcccatgcagtcctactgccttctttttttttttttttttttttttttttgaggcggagtctcgcttttcgcccaggctggagtgcagtggcacgatctcagctcacgggttcacgccattctcctgcctccgcctcccgagtagctgggactacaggcgcccgccaccacgcccggctaattttttgtatttttactagagacggggtttcaccgtgttagccaggataatcttgatctcctgacctcgtgatccgcccgcctcggcctcccaaagtgctgggattacaggcgtgagccactgcacccggctactgccctcttactgtcgccacagcctggataaaatacgattcttctgagccttttttttttttttaatacagagtttcactcttgttgcctaggctggagtgcaatagtgcgatctctggtcaccgcaacctccgcctcccgggttcaagcgattctcctgcttcagtctcccgagtagctgggattactgacacgcgccaccacgcccggctagttttgtatttttagtagagacggggtttctccatgttggtcaggatggtctcgaactcccgacctcaggtgactcaccggcctcggcctcccaaaatgctgggattacaggcgtgagccaccgaacccagcccctctgagcctcttgaatacaactggggtcatgcctgctttgcaggtttgtcttaaggattaaagctgtttggggagtgtctggaggagggtgagtcttgagccaacccctgcatctcccttccagggcctcccggtaataaaccccaagtaaatgtgcactttgtccgtcctctcggagcaggtctccgggtactcctgtgccaaaccgatttccgcccccaaggtccttctcctcttagaaatcctgacgcagctcctaggttccttcgcagtgacagccactcttttctatttgtacgtagctgtagtgttttgtgggtacgttctctgaacaacaaagtggcccttctaaaggctgttctgtggggtccacagcctcgccacccccagcctctgcagcggcttctgaatgaatgaaataagcgacggcgccctctccaccaccccacccccgccaactcggcaggcagggatcccaggcgcgggttctggcggaggcggtcccgcgaggcggggggacttttctaggcggggtgggggccttgggaccacctttaggggctttttccccatcccctggccccaattcgcagcgtttcgccacccagggcccgcagggctccaagcccttcttccccagcccgcgcgctcaggcccccgcccgcccccggcggtggccccggaccccgagcggaagggggcggggggtgtgcggggccgggaagcggggagcgcgggcggcggaaggtggcgggagggggtgggggctgggaagcaccgtgcgcgggcggcgggagggcccgggcggggctgcgcggtggtcacgtggggcggggccgggagggtacttagggccggggctggcccaggctacggcggctgcagggctccggcaaccgctccggcaacgccaaccgctccgctgcgcgcaggctgggctgcaggctctcggctgcagcgctgggtgagtgctggggacccggggccaccgcagcgtaagtgaccttggcggggacggtgctacccggccgccgagacgggttcctctgcgccctcagtcgggcccaggcgcggccccgcggcgtmcctgggggccggcggggagccgggaccctcgggactgtccctgacgggcgggctggggtgggagtccgcgcgctccgaagcgtcggcgagaaaagcagaaaacarctccgcccgccagccctctgccctccgctcccctccccgggctgtgcgccggaccccggccctcggagcggggacgcggccaggaccgccgagggaggcgcctgcgaggaagagctcggccgggtccggagactgctgcctgggaccgcgctcccagcgcctgggcctcggtgtctccgggccaaactgccgacataatcgcatctgccggcatctattttcggtttatttccccctcattgcgaaggatttgcctggccaactttctgcgcaagatcccacgcaattcctgggaccccagaagacaggtcctgttgaagaacaggaatctggcactgggtgggctggggaggaasccgcacggtgttaaatccataaacaggaagagaaaccagacagcgaaaccaagaggcgaatgggcgattggatgccggtggggagaaggccgggggcgcaccctgctcctggactccagtaaagggaggccgggcagagtccctggggcgccacctccccctcggttagtagccctggaggccggggggagttggcctctggggagcagtgggtgctgggtgtggggcgttgcaggcaggctggggtgggcgacccaggtggaagtgaattgcacttggcttcctggtgggcctctgtcayccccttcccaggcgctgagaaagccagcaggctggcaaagaaaaggaccctagcgcaggccccacactcctcctcctaacggacgagagaccccccaaacccactggagaagtgacgctgtggggttcaaatgcagacctggcacctttttgtagcctggaaaaacattcccactgcctgctgccggaggagaggatagctgagatgcactctctttgaatccaaacgttcaggaacgtaaggcgaagaggcctaagagggcgttggctggctctgtctctcaggctggagcacagtggcgcgatctcggctcactacaacttccgcctcccaaattcaagctattctcctgcctcagcctcccgagtagctgggattacaggtgcccgccaccacgcccagctaatttttgtatttttagtagagatggggtttcaccatgttgaccaggcagatcttgacctcctgacctcaggtgatccgcctgtctcggcctcccggtgagtcacggtgcctggccaagaactgtttcttgttggctctggtgctggtgacttagaacccgccagctcctggagaaaggggctgggccgcccaccctgtgtagctttcccaaagacagagtcaaacgtctcctggagaacagaggcttcccttcgtctttggtcatttgtcctctagctgggggtaccccctggtggaaaggcacaggtcccttgctccccaggtggcaacgcaggccagacacggccctggcacagctctcctgggtgttggctcaggacagccctgtttccaactggttaggcggtgaggggtggtggccctttggttccaggttgaaactgccyatgtggtgctgatttagcagactggggaggctctttttgtaggcaggttcttttctttccccagctgctggacctgggagttggaagagaagttgcacccattttaggggtaacagatattttctgttgctcttggttggattgggaagtgaattgaagggaggtcacgtttcaggggtgccttgggatgtctgtcagtgattttcttttctttcttaawttctttttctttcttttttttttttttttgagacacactccctctatcgctcaggctggagtgcagtggtgcgatctcggttcactgccacctccgcctctcatgttgaagcaattctcctgtctcagcctscctcccaagtagctgggattgccagtgcccatcaccacacctggcttttttttttttttttgtatttttagtagagacgggctttcaccatgttagccaggctggttttcgaactcctgatctcaagtgatccgcctcagcctcccaaagtggtaggattacaggcatgagccaccgcgcggtggaggggtaattttcttaaatctggtaatgagttgtggttgtgtagagtaacataccgtcctttcgagatatggactgaaacattgagagggaggagttacaggtatgycgattcttcttttctctctctcctttttttttttgaggtggagtctgactctctcacccaggctggagtgcagtggcaagatctcagctcactgcaacctccgcttcctgtgttcaagccattctcctgcctcagtctctcaactagctgcgattacaggcatgtgcctccacactcagctaatttttttatttttagtagagattttttgtctctcctaaaaaaatccaatgtaaaaaaatcccaatgtgggggttttgccacgttggccaggctggtctcgaactcctgacctcgtgatccgcccacctcggcctcccaaagcgctgggattacaggtatgagccactgcgcccagtctgctgcctcttttcaatggtctggcctaaggaaattattggaaacatgtgcggttgagtgatatttactgggcacttccacatggtccatgtaaagggagatggttggggtgacaggcagttgagtctaggggaggcatgtacagatgtgctgtgcctctgggatatcagggtggcaggcagcagtctctacgtctggtcccaggctgcctgagaaagagcatgtgggaggcaaaccttgcgccctggcatggttgttaatgtttatatttaccctagcttgtgtggggtaggaggtttagggatcaaattccactctgtgtttagacatttttttctttctttttttttttgagacagagtttcactctgtcacccaggctggaatgccgtggcacaatytcagctcactgcaacctyacctcccaggttcaagcaatgttcctgcctcagcctccggagtagctgggattagaggcatgcaccaccatgcctggctaatttttgtatttttagtagagacctcaaatgatctgcccgcctcgcctcccaaagtgttgggattacaggtgtgagtcactgtgcccagccatgtgtttagacttttaactaatctcttttttagtttcaagccttatcgtccgcctctrtagaccactcctgtgcctgtttcctgatccttccaagggccattgtattccctgtctgctgcccctcttttggattctyctgcacatttttttgttcatgcattcattcatttattgtttgattaatgacagggtcttgctttgtctcccaggctggtgtgcagtggtgcgaccacggctcacggcagcctcagccacccagatgtaagcgatytggttcccacctcagcctcccgagtagtaagtagctgggaccacaggcggtgcccaggttttttttttttttttttttttttttcgtttgtagagacagggtctcactgttgccaggactgctctgaaactcctggtttcaagtgatccccttgcctcctcccacttaggccttccaaatgctgggattacaaggcatgagtcacctccaggcctttttgtacttttaaaactctgcatcagtgtataaacaatgttattaaagtttatatgacttcagttacactacatggatcctttttcactcacggttgtgagatttatttctgttgctacatccagttctagtccatttgtgttaagtgcccagtgtgtttatctactgagggacagttatgttatttcgtgttcactattatcccatgctacaataaatatcctgtgtctcccagatasttagaagagtttctgcagggcacatgtgggagagtttgtttctgggtcatgaggtgtgttcatcttccatcttgctagatgctggcaaagggttctccagtgtggttgcatcaatttactcgcccagcagtgtgcagagttcctgttcctcacatttaccaacactagatagtaccagactttgatttttgccaatctgatgggtttgaagtggtacccctgttttaatttcatgaccagaaattcaaatttaatctttgctgtaggacaacagtaacccacttatgcctagtgttccattattagaacgctaagcatgtgggagtttttacatcatactgctcaaggtcatcgccaaggtctgatgtttttactcrtgcaaaaatttaaaaaattgcaacctctggcataaatgggttgagtgacacttttcctgtttttattgttggtcagtgatggcatatttgctggktttttttgttttttttttgaaacggagtctcactgtgtcgccaggctggagtgcagtggtgtaatctcggctcactgtaacctccgcctcccgggttcaagtgattctcctgcctcagccccctgagtagctgggattacaggcgtgtgccaccacgcccagctaatttttgtatttttagtagagacgggatgtcactatgtttgtcgggctggtgttgaactcctgagctcatgatctgcctgtcttggcttccctaagtgctgagattacaggcctgagccaccgctagcctatttattttttattttaaattttaattttctatatagagacgaggtcactatcctgcccaggctggtcttaatctcctgggttcagtcaatcttcccaccttggcctcccgaagtgtcagaattatagatgtgagccactgtgcycagcccagaactgatgttttctaaatgctgggtgctgagaaggatgtgtggctggcagtcttgactgtgttatctgtctttaccaggccagtaacttctttggtctggtcatcaagataatctagcatcaccagcaagcatgcatggagaaggatgggcccaatgtggccaagatggtaacgggaccagtagagagccctgtagaagacatctagatattctgccctaagagcccggagggccgggctgtctcatgaccctctgacgtgctgacctggactctggcagaatgtgcacacacacagtcacacagcttcstggcttgcgcaagtcccaggagggcggtgccagccacaggcttttcccattcgagggttggaagcgtatcatcaaaccacatcagagtgctgggggccacctgccacccattcccaacccactcagccttcctggtgtttgggacatgctttgctttggcagtcaagacagcagaacaaatcaacttttaaggccttgtcactgatagtacaatttccattatttttcatccaaattaggatacttctgaaaatagaaatgatgactctgggatgcaaacgttggctgtcctatgtataaggagatggcttttcacgctcccagtgactgaggaagtttctcccagatggcgctgctctgagcctggtgcagggtaggcactttcaaaagagtgtctccttgtatcttccatcagccttgcgagatgggtatctgttcccagggccccaagggaggaaaacaggacctagctggatccaagagctaggcctttctttttttttttttttttgagatggagtctgactctgtcgcccaggctggagtgcagtggcgtgatctcggctcactgcaaactccgcctcccgggttcacgccattctcctgcctcagcctcccgagtagctgggactacaggcgcctgccaccatgcctggctatttttttgtatttttagtagaaacggggtttcaccgtgttatccaggatggtctcgatctcctgacctcgtgattcgcccrcctcagcctcccaaagtactgggattacaggcgtgagccagcatgcccggcccagagctaggcctttctgtggctggccttcgcgtcagcctcaactaccctggtgtaatctcgcctgcggttgaattagggaaccgccgtgttctgcaagctggagaggcagaacactaatgagcagaacactaatctcattgcaatctcaaaggatctctaaaagcttttataaagcaggcccaaggtcctttggtatccgatgcagacgtggtgaatgcattggctctgtcagcatctgagcaagtcagtaacagaaatggggagtaaaagctttcagaactttccagaatattgactaaattgtcttgtttacaaccaacaacgacaacaaaaaataactgctgagggccttcgtagtgtctgctrtttcaagtgtacagtagtcattttgtctgcaggatgtggggttgctgtggctgaccttgtacaatattccactcataggtgtcttcaggcctatggagagcagcttgcgtgggctgggcctgcagtacctggtttgcatagatgattggcaggtgggcagcacggggaaggacctgtgagtggccaacctggttcaggtgagggaggtggagtggggcttctctgcttcccctggttccctggaagcctccaaggctggtgagcatcactgctgcctctgcacacctgtgtgctgggtgggttttctgacaggttttcagttgcttcggggctacagctgcagggagcctgctccatgggacagatgggcctctggtgcccgttcatcaggggactgatgagaccgaggcctgagagccctttggattttgtttttgtccttaatttaatcataagccaagaatctactaaacacagttccattaggggcaaagacgtaacacatcagaggccacagcaaggctgtgattcatactcaraaaggaaaggtctctgggtcacaacagagcatagttgaggtcagcacactcccacccagtgcagggctgctccagcattgaggtgtgtctggcaggttgaagtaggggaagatgaaactcgccgaagtcttgttttgtggttgcacttaagtggtcaaaacttcaggagcaactgccgttattagcggtgagtgccaagactagtttttatagaagagaaagaaacaaagtactctgggaaggtcttactgagccttcacagtctccccacctttccactgttcccgtgctcttagccgctctgctggcctataaggcacagtcttcatttgtggcttctggcaaaatgtaagcacttgacttttgtttttgttttgttttgttttgtttttttgagacggagtttccctcttgttgcccaaggtggagtgcaatggtgcgatctcagcccactgcagcctccacctcctgggttcaagcaattgtcctgcttcagcctcccgagtagttgggattataggtgcacaaccaccacgcctggctaattttttgtatttttagtagaaatgggatttcaccatgttagccaggctggtctcgaactcctgacctcaggtgatccacctccttggcctcccaaagtgctgggattacaggtgtgtgccactgtgcccggccaactttcaattctttagagctgactatgagaggagccagcagtatagccacagcaccaacgaatgaggaagagcaaaatactgcatgacagctttgctaagaattctttcactttttttgtctatcagccaggagctagcaacttggcttatttggaaattttaagtgtacatatcctgtctccttaaatcctttacagatttaaagtgcagtctacctgagggctctgtgaccatgtaagaaagctttttctttctttttttttctctgagacagagtgttgctctgtcgcccaggctggagtgcagtggtgtgatcttggctcactgcaacctctgcctcctgggttcaagcaattttcctgcctcagcttcctgagtagctgggactacaggcagcaccaccatgcccggctgagttttgtatttttagtagagacagggtttcaccatgttggccaggctggtcttgaactcctgacctcgtgatccgcctgcctcagcctcccaaagtgctgggattacatgcgtgagccattgtgtccggcctttttttttttttttttttttttttgagacagagtctcgctctgttgcccaggctggagtgcagtggtgtgacctcagcttactgcaacctccgcttcctggattcaagtgattctcctgcctcagcctcccaagtaggtgggattacaggcacccaccaccgtgcctggctaatttttgtatttttagtagagacaggagtttcaccttgtttagtagagacaggctggtctcgaactcctgacctcaggtgatccgcctgccttgacctcccaaagcgctgggattacaggcatgagccactgtgcctggccagaaagccttctttattgagcttggtggcagcccaaaactgattctttaagggtgtcaggacttaacacctcctgtgacttagccgcacctcctctcctttgactttcattccacctccttccaggatcgcaaggtccctatttgtcctggaaacggcttcaaggtagtytagggtgccgtttgccgggggaggaaggtgctctggttgatagagtcgcctggccgcacactctttttggcacataacaacgttctacagagccggggtggagcgtgctttctcataagtgctctgcaggtttggagagagaggatatgaggagcacccttttctgttttttttaacmcaaagattagcttggaaaaggggcagaggggtgcactggaactcaggtctgcctaagcagcacagcagaccaaggtctagagatgacatctgctcgcagctgttcttccaccagcccgcatcctggaaaggggtcttgtggcacacaagagttcacatccttccctsgtgaaataaggactttgtgttcatcatctcttgtaagaagcagagcagaaagcacagaattaagaaataaaagggaagtgggtgcctatataaagggaagtgaaaatgggttgctgtcccatgcaaagaccctggaaagctgttaacagctcagcttgtcactttcaccatctgcatttgtccagagtgattgagatttgcgttgttgtggagagaaaggcgcctgttgcacaatggagtgagattgccactgctgtcaggacctctgtgtttggcttgacactttttgagttctcagcagtctcgggaccctcaagagtggaagcatttttggatgttaaatgctggggttaattgaagttaagagcttgttttactgggcatggtggctcacacctataatcccgacactttgggaggccaaggcgggcagatcacttgagtccaggagtttgagaccagcctgggcaacatagcaaaaccccatctctacaaaaaatacaaagctgggcgtagtggtgtatgcctgtagtcccagctccttaggaggctgaggggagcagatctcttgagcccaggaggcagagtttgcagtgagccatgatcgtgccactgcactccagcctgggcaacagagtgagatcctgtcttaaaacaaacaaaaaaaacaaacttgttttcatttaractcttcctggcgttggggacctattggaataggtttagtgtgaactgagagctagaagtgttagaggagagagggagggaacagagcccgctggagcgagtgcccttcctaccttatcactgcatgccaggcatgtgccggcgctttggtcctcctcatttcattcttgactgccacctgagacacgatggttactagctccattttataggtggtgaaactgaggcttggggaaggtcagaccccaagggtgccatttagtcagtggcagagccagatccaaatgcaggtctcctgactccaagtgcagggctcattttatcgtccggttgcagcacgctggcggccccttgagccccaacctggataccayaggggaggagcagagaagccaggaacaccacagccctgggccaaggtgcggggctgaaagaacttcccagcgctcagcctgggactagtggaatgggctgggccctggggctggcagcggtggccccggggagcctgggaatgagtagggagcacagggaggtgtgggagggcctgggaaccatgaaaaggagggcgggtgcagggaagtcgcctgctagtgaagtggcgagggggccctgtgggactccagggaatggccacggcaggttgtcctccaggagttgagagccactggacatggcagctgcctgtgttctcagccaccacagtaaccaaagaaatcttggttttaaaattcaagttgccatggaaacgctcccatcctcgacttggcttattatttaaaataacatctctacagcacaaagcccccgggtacatccaaggacactgctgtctgcccacgagacatgctaacctcacagtgtggaggctgtgtgggtcactgacatgcatggccacgtgagacgctgcctacccacgagtcacggaaaaggggaagattattaagaaagtcactaggggccaggtccagtggctcatgcctgtaatcctagcactttgggaagctgaggcagttagatcccttgaagccaggagttcaagaccagcctggccaacataacgaaacacggactatactacaaaaattagccaaacgtggtagcacaggcctgtaatcccagctactcaggaggctgaggcacaagaatcacttgaacctgggaggtagaggtttcagtgagccaagattgcgccactgtactccagcatgtgccacagagcgagactcccatctcaaagtcactagggaggaagcctcattggtgggaaggaagaccaaattggaaatgctctgaggaatcattaaaacaaatgtccttttatcagtttggtggctcagggcctttagtaatactgccaactatttttcctagaagaaacaaaactgaaataataggaacatactcacttttttttttttcttaaaagtaagggtatgttgtgaaaaaaagtctccccaccgtagtgaccgactgccgtrcatcttccttggcattttgcatgtagtggcaggagtgttcctacatgtgtagattgctgagagggtcagatgcttatggtcctcagtcacccacagcttgctttttccccacttaacattgggacttggggcatttttactctgttaatacaatagaattcacttcaactagttggttttttacttttattttattattattatttttagatgaagtctcaatctgtcgtccaggctggagtgcagcctctgcctcctgggttcaagtgattctactgcctcagcctcccaagtagctgggattacaggcatgcgccaccacgcctggctaattttttgtatttagtagatacagggtttcaccaccttagtcaggctggtctctaactcctgacctcaggtgatccaaccgcctcggctacaggcatgcgccaccgtgccccaccaactaaytgcttttttaatggttgcttcatattctatttaaccacttaccgtaatttaacagttactctgttattggatacttgattcatttccaggacatgcagatttagaaactggtgggcgttgctggttgatgtctcggtggttgtgcccacccaccccaggcactcattatcatgccttccgtttccccacttcctaagccctgcaagaagtgccaaactgtccagcccttgccaatctgatacatgctgaatacctccttgattttatctgcacctccctgaggttgaacttattttactttattttattttatttttgaggcagagtctcactgtcacccaggcaggaatgcagtggtgaaatcttggctcactgcaatctccacctcctgggttcaagtgagttgaagcaattctcctgtctcagcctcccaagtagctgcgattacaggcacctgccaccacacctgggtaatttttgtatttttagtggagacggggtttcaccatgttggccaggctggtctcaaactcctgacctcaggcgatccacctgcctcagcctcccaaagtgctgagattacaagcttgagccaccatgccggttgaacttatttttatctgtgttggccatttgtagtttttctattatgctggttccatttttctgactttgaagagccttttgtggaaacgaagcctaaagtatatgtgagtactgctttgtttcgtcagtttttgttttaaagagacttttcagtgtaatgcaagcattttcccttgaaggctgtgtttcctgtcaatcctaagctttcctccagcattacctttttaaaaaactttattttctatattgatggggtctcacaatgttgtccaggctggtgttgaacacctggcctcaagtgatccacttgccttggcctcccaaagtactgggattataggcatcagccaccgcacccagcctgtttttcaaagggcattgatttttttcataaaactttttaaattaagatctgtgggcctggtgcggtgcctcacgcctgtcatcgcagcactttgggaggctgagtcaggtggatcacgaggtcaggcgttcgagaccagcctggccaaaatggtgaaaccctgtctttactaaaaatatgaaaattagctgggcatgatggcacatgcctgtaatcccgctgctcgggaagctgaggtaggaraatagcttgaacccaggaggcagaggttgcagtgagccgagatcatgccattgcactccagcctgggggacagagtaagactccgtctcaaaaaaacaaaacaattctgtgttgcatgtggtactttttgtgtgtgaggagtccagtgtgaagattcagacttcaggcagccacttgtacaagcactgtcctgttkcctctctggcctcacctaggtaacgctgattcctccacggaggatgtgcttctgagtggtccgttgggtgctgtgctgatgagcatcacccagcattttacgacacatgtgctgccccagagggctgggctcccgtcagagctcttttccactggctgggtgcggtggctcacacctgtaatcccagcactttgggaggctgaggccagtggatcacctgaggtcaggagttcgagaccagcctggctaacatggtaaaaccccatctctactaaaaatacagaaattaggtgcgtgtggtggcgcacacctgtaatcccagctacttgggaggctaagacacaagaattgtttgaacctgggaggtggaggctgcagtgagccaagattgtgccactgtaccccagactgggtgacatggcccacagaccaagaccctgtctcaaaaaaaaaaaaaaagcttttttccagagccatcttgctgtcctcatatatttattctcctagatgaattgttgcttaagcaacaatgaagtttaaattgttcttcagatagaacccctaggtgccaggcagtttgttaagcactgacaccgcagtcctgtgactttcatgacgacctgtgacctgtgggaggtagaacacctcacccacccgtgggagcccctggagtgactgacaggaacccctgcctcacccagctccccgcgccgcggctctccccagccctggatgcaggcgcccaggagacatgtattgcttttgttgagctgctcacttaggagggtgactcagagttcaagctggaaagcactggcttgtgactcatgagccagtgcaagatcaaacggctggggcatcgaggtgagagttttccttctcagaagcctcatctccgcagccggaagcagagcccttggctgactggaaaaaccagagaggccccgggagtgggtggatggccagcccagccccacctctcagcstcaacctccaccagcccacaccgagcttgtttgtctgtgtcctgtcgaaactaggactcctggattgtaacttttcttacatttccctgtcccctgggtcctccacttagggtgtaatcacacagacaggctcttaactgtttcatatcactcacttgggaaagtgtctcaagctgttctacaaatccatgcaaaggccgtttaaaaatagcagcgaaggccctggactcggtctygtccagcacagccccttggctctctctctgggctctggccgcctggcccccggggacccacacgaggtcatggcgtgctkcgggcagkggggcggggatcccatagacacctcagctccttagagttctccgcctgggccaggacgagcatgggggtccccactgatgcccgagacrgtgcccctgtgtgtgtgagccctcgacccacataacagagaggtgtcctgatgccctctgtcctctccaggtgratctmggatcyggcttccaacatgtggcagctctgggcctccctctgctgcctgctggtgttggccaatgcccggagcaggccctctttccatcccstgtcggatgagctggtcaactatgtcaacaaacggaataccacgtggcaggtargctgtggggctgcgtcctatgtatgtcccctcccaggtcggtctgtgcacactgactccaggaatgggaagccagccctcactgtggcccacagaacattgtcctggactgttgaaaaatggccctgaccytgagtcatgtcggctctggaccacgcctccctcctttgtcccataccccacgtgtgtgcatgagtgtgtgtgcwtgtgtatgaatatatggttgtgtgcacgtggaggtgtgtgggggagtaagtgagcttcggaagtgttcaaaaccagctagcccctgtgacgcccgccgtggcacagtggcagtttatcagtcccgcccctgattccctttgtctctgcccagccctgaccctcggactgagaaccaagaatgaggagtgagccatgttgagggctggagagggtctctgattgtcagcaaatgggagcagatcaggggagacacccactytgcccgtgtgtcactctgggctgttccccagtgccccccaacccttgggcccttgaattgggtagggyctctggttttccctgggttgggcttcgtgtgtgggcagcgtgcccatccaccgccatcccgggagacccttcagtcagtgggtgactctcttccaggccgggcacaacttctacaacgtggacatgrgctacttgaagaggctatgtggtaccttcctgggtgggcccaagccaccccagaggtgagtgcctgctcctctgcaccgctgtaatgtgagtggcaggcgttggtttggggcagtgggaagtgggagagtgaaggcctctctggcgtccgcagggctcatgctgcccagggctgccgacaccgcttgaggtacagtacttgtttcttttcatttttrtattactttctytttttattttattttttccttctcaagttattagtagagaagatgctggtgcttttttttggtttttgagagagtctcactctgtcacccaggctggagtgcagtggcacgatcttggctcactgcaaactctgtctcccrggttcaagcgattctcatgccacagcctcctgagtagctggggccacaggcttgcaccaccgtgcacggctaatatttgtatttttagtagagactgggtttcgccatactggccaggctcgtctcgaactcttggcctcagcaagtcatctgcccaactcggcatcccagagtgctgggattaccggcatgagccacccccagtgttttctattgtgcttctccaaggtgtctcagccgcagatgtgacagacaaggtctgggtccccactatgtgggcagactcaatcttgagtaatttaagggaaatctaagaaaagccagatgaggccaagtatggtggctcacgcctgtaatcccagcactttgggatgccaaggcaagcggatcacctgaggtcaggagttcgagaccagtctgaccaacatgatgaaaccccgtctctactaaaaataaaaaactttgccaggcgtggtggcgggcgcctgtaatcccagctactcgggaggctgaggctagagaatcgcatgaacccgggaggcagaggttgcggtgagctgagatgatgccacttcccacgtgaggatggggtagttaagttgcacracactgccttctgcacaatggggatgatatgagaaatgatgagaggatcctgggcagaggttgaggcaggagagcagggcaagaaacactatctggactgaataaacttatttaaaaatgagtttataatttgtggataaattcatcttaaaaaatccattacataagcctagaaagaagcgtacaatatcgcaagtcaggccaggtgtggtggatcatgcctgtaatcccagcactttgggaggccaaggcaggcagatcatttgaagccaggagtttaagaccagcctggccaacatggtgaaaccctgtctttactaaaaatacaaaaattagccgggtgtggtggtgcatgcctgtaatcccacctactcaggaggctgaggcacgagaatcgmttgaactcaggaggcagaggttgcagtgggcagagatctcgccactgcactccagcctggatgacacagtgaaattctgtccactcccaccctcccgtcccacccaaaaaaaaaatcaaaaggtgcattgagcaacagaatttccttttgttttatgaaattaccaaggacacctgtctgcagccttcttcggcatgtcttgtgctcatttccttgttaggggagtgtggcccagccaaagtggcctttgcagggattggggagggagttgtgggatcagagcttgtaatgaagaccttcctttatccagagttatgtttaccgaggacctgaagctgcctgcaagcttygatgcacgggaacaatggccacagtgtcccaccatcaaagagatcagagaccagggctcctgtggctcctgctgggtaaggccctgctggctggyggggaagcgctggagagaaagtgggagcaacactggagagtcttgggggattcggggtggggacaactctgacaaggcaagttatagaaactttytgagtcccagtttccatcagtacaaaaatcacaatccctctggccatgaatgatggcgaggattaggtggagtggcgggcagagcatccagcagattgcaagtccacgtgtacaggtggcgaagcagctccctttccctgacatgctggcccgtccgcaaataccaggagctctcactgctactctgcttcaagaaagcatccctttagtgtcagtgagctgtcttaattttgtcatttaattgtggtaaaatacacgtaacagaaatgtaataatcttagcaatcttcttttgttttctttttctttytttttttttttttttttttttggagatggagtcttgctctgtcacccaggctggagtgcagtggtgggatattggctcactgcaacctctgcctcctgggttcaagcaattctcctgcctcagtctccccagtagctaagactacaggcrtgtgccaccacgcccagctaatttttgtatttttagtagagatggggttttgccatgttggacagcctggtctcaaacgcctcacctgttgatctgccttcctcggcctcgcaaaatgctgggattacaggcgtgagccaccgtgcccagcaactattttcaagtgtacagttctgtagcattaagtacattcacagtgttgctcagccaycaccaccatctgtcccccgaactctttttcagctcgcaagacagaaactctgtccccattaacaccaatattgtagcccctggtaagccccactctactttctgtctctatgaatttgactcctagggacctcatacaagtggatcacaacagtatttattttctgggtgagctgtgttttttgttaagaaaaaaacacagccaggtacggtagctcacgcctgtaatctcaacactttgggaggctgaggcaggcggatcacctgaggtcaggagtttgagaccaacctggccaacatggtgaaaccctgtctctactaaaaagacaaaacttagctgggcctggtggcaggcacctataatcccagctactatagaggctgaggcaggagaattgcttgaacccaggaggcgcaggttgcagtgagctgagattgcgccactgcattccagcctgggcaacaaaagtgaaactccgcctccaggaaaaaaaaaaaaaaaaaccacacacacacatacaaactaatactacacattttgcagatttcaraaatgaaccsagttyccaggcagaggttcacggkggtgcttctcttgctttaaaagctgagttgggcagatgttgaggcaggagagtggggcaagtggctcatgacgcctctaatcccagcactttgggaggccgaggtgggcaaatcacttgaacccgggagttcaagaccagtctggccaacrtagcaagaccccatttctaccraagaaaataaaagctgagtttgagccccaggagcgtcccctggtgttgagagatcagttgcctacaaggtctgaggtgcccctgtggccctttgaggggactgctgcagagggcccagcccggacatggcagcctcacccggtggggctcgttcctgcaggccttcggggctgtggaagccatctctgaccggatctgcatccacaccaatgcgcacrtcagcgtggaggtgtcggcggaggacctgctcacvtgctgtggcagcatgtgtggggacgggtgagtcaggctgtgcttccacagcgggtttagtgctgagasaccctgggccscagcttctcagtggaggggactttgaggacttcctgggactgctgcgagtcagaagtgtttcggggagactccragagtctggcaggcagggcctggcaaggctgctgcttcctgggaggtgcctgaaccaaggctggcccggcagagctgtctgaggggtggcatcccagcaaaacagtcagtttcagaaaawgtggtggaatgtctggcccctggtctggtttgtgtcatcgcatgttcctttttcctgcttggggaaccagtttggggcrtttccttatgtgtagttagcggggatggctccaccttaacaacaaggtggtggcacagaactttctgctccagctgcctgcagcctcgccttggttccgcagtagcggtgttcactggcggctgcagatccgaaatgcctgagggcttaaaaaaatgcatgggcttctcccctaactagttaaatgggaatcactggcgattctcatttcagagaactggtggtgtttttaagtaccttagggaagtttagcgtctgctcagttgagaatcagtgttctacccggaagggcactcgtagcctggtctggtatggacatgaacaggagagcctcctgtcttctcccggatctttgtgggyaggggtggggctggcggttattccctgcaagctgtgcttatctagggagcgtcccttggagggtttggggtctgggaggtctgctcgcaccacttgctgcagctgggggtgggtccacgagtggcctcgggcacttgggtagcacacagtggtctggagagctggtggtgcttctctcagaggttttcattasaggctgtcttttcagctgtaatggtggctatcctgctgaagcttggaacttctggacaagaaaaggcctggtttctggtggcctctatgaatcccatgtaggtaagtgtgtccccttggccactttctggccagatggattgtttgagcaattaaccatcatggctttatttrcctttataaactgggggttgagacagaggggctgctgagaggtgctagycaggtgyacaggmctctggcaggacctgcctggcgtccatgctgcaggcacgaggcttgccttgccccaggtctgcctcgcscagctggggcttctccgtgggggctgtaggttgactccgctttctcccgsgtcccatcagggtgcagaccgtactccatccctccctgtgagcaccacgtcaacggctcycggcccccatgcacgggggagggagatacccccaagtgtagcaagatctgtgagcctggctacagcccgacctacaaacaggacaagcactacggtaaggggcctggggcctggccacggygcacgtggaggctggggagctrctgcatccctcctcacgctgcagcgaagaggtcagggctgaggagccttggggtcccrgaactctaggatagaggagggggagtgatgccctcttgccaggagaagcagcacactctccactttctgcctgttccaccctgaactcagcctcagcccttccaaactggaagggaccaaagccctccttttacaagggagtggcgtgtcctggagtcttgaggtatcctggcctcttccgggrcctcgtgctcattgctccsttctcccatttctgagcttccagccccagccctgtccttagttcttcaggggagccttccttgagctcccctggcagggcaagtccccttagatgcagtcttcccctggaggccaccagaaatcagtgactggctgaccgtggcgtgccacgaggcackgtcactgccctccccaaccccgagctcggttcattttccaggatacaattcctacagcgtctccaatarcgagaaggacatcatggccgagatctacaaaaacggccccgtggagggagctttctctgtgtattcggacttcctgctctacaagtcaggtgcgtgctgatggctgatggcaatagagggtgggggtcgggaggggagcctgggtgccaggatggttcatgttgaccaatagggctggattgggcaggcaggkgaggggctggggaagagggctgtgtggggccttccatataggctcactcctctgtggaccagcctggcacctgactgtctttgtccaggtgttgtgccaacacacasaattccagaggcctctcccagagcctctgggctagttccttcccatccattrgmgtccagctcatacatgttctctgtgggaacgcccccctccctggtggctggccacgcctgccctcgccttcctggctttgcattgctttaccagcatgtttctgttataatggcaggccgttcgtgtttgcactggctgacacattttcttcatctttctctttgcaaaggcctagatcgtgcctcacaccagtggatgaacacacagggaggaccttgccctgggtagtgccatagggactccaaccaaggaatctggacagtccccatccccaagtcctgtcttagaaatcccttgctccagatgaacagtctttgctgactgcatctatcccattaatattttgctagattggaaacttgtaaaacaacagtttgacaaaggaagatgattctggcaagaaaaagtttctgtgaagatggcacttcttagcatagtcctcrcccttattattaaaagatgcatttccactttgacagtgatttccccacccgagagcctggttgggcagccctgagccccttagccagtatctttcccatcagctagcattagctgccaccagtcctcccttctcctccctcacctcttcagggtgtacctggagcagctattaaaactctttaagccgtgtarcrctttygacaaacccttacttacatggaatcccagtataaagaacagatgaatcagtcatctagcattaaatgttttatcaattagaatgtattagaaattctatttttaaagccaacaagcacattttgtaggmatctatttcaatatttactcaacaamtttgagtgtgttgggccttcaaaaatatatttaattccccagtattgtgggaccccccctggagcctcctggtggarcagcaggttccctctggaagctgtttctccttcccggagcatgaccagctgagtgtggggggtgctgtggggcgtgggacagtsgcccggtctcggtctcagccagttcttcccttttcaggagtgtaccaacacgtcaccggagagatgatgggtggccatgccatccgcatcctgggctggggagtggagaatggcacaccctactggctggttgccaactcctggaacactgactggggtgacaatggtgagtggctgcccccttcctgccaagaacagtgaattgtgagccacaccccgtggccatctcggctttctctgttctacccaccgcacagccttaaaccctggacctacggccaggctgtsagctcctcctaagtgccaggcagtcaggagttcccttttrctgtgrgggcagactctgagcagcttcagagccaacgcctgcaacagttcccacagcatcgcgccagatcctgtgatgggaagggtgaccgggcagggggcttgcccgtggaggtgtgccccacggctcyagaagccttgtggtgttgaggactgtgctagtgggccmacagyaggagtggccagggatgagtgacttaaggtcttttaaggatgagtctgactatattggttgacccttgtcacactttaaaagcaccttactttttattcccaggcttctttaaaatactcagaggacaggatcactgtggaatcgaatcagaagtggtggctggaattccacgcaccgatcagtactgggaaaagatctaatctgccgtgggcctgtcgtgccagtcctgggggcgagatsggggtagaaatgcattttattytttaagttcacgtaagatacaagtttcagrcagggtctgaaggactggattggccaaacatcagacctgtcttccaaggagaccaagtcctggctacatcccagcctgtggttacagtgcagrcaggccaygtgagccaccgctgccagcacagagcgtccttccccctgtagactagtgccgtagggagtacctgytgccccagctgactgtggccccctccgtgatccatccatctccagggagcaagacagagacscaggaatggaaagcggagttcctaacrggatraaasttcccccatcagttcccccagtacctccaagcaagtagctttccacatttgtcacagaaatcagaggagagayggtgttgggagccctttggagaaygccagtctcccaggccccctgcatctatcgagtttgcaatgtcacaacctctctgatsttgtgctcagcatgattctttaatagaagttttattttttcgtgcactctgctaatcatgtgggtgagccagtggaacagcgggagacctgtgctagttttacagattgcctcctwatgacgcggctcaaaaggaaaccaagtggtcaggagttgtttctgacccmctgatctctactaccacwaggaraatagtttaggagaaacsagcttttactgtttttgaaaaattacagcttcmccctgtcaagttaacaaggaatgcctgtgccaataaaagktttctccaacttgaagtctactctgatgggatctcagatcctttgtcactgcctatagacttgtagctgctgtctctctttgtccctgcagagaatcaygtcctggaactgcatgttcttgcgactcttgggacttcatcttaacttctcgctgccccagccatgttttcaaccatggcatccctcccccaattagttccctgtcatcctcgtcaaccttctctgtaagtgcctggtaarcttgcccttgcttaagaactcaaaacatagctgtgctctatttttttgttgttgttgtgactgacagagtgagattccgtctcccrggctggagtgcagtggcgccttctcagctcactgcaacctgcagcctcctagattcaagcgattctcctgcttcagccttccgagtagctgggatgacaggcactcaccaatatgcctgggtaatttttgtatttttaagtacatacaggatttcaccatgttggccaggctagtttcaaactccyggcctcaggtggtctgcctgcctcagcctcccaaagtgttgggattacaggygtgagccactgggccctgcctgtaytttttatcagccacaaatccagcaacaagctgaggattcagctcataaaacaggyttggtgtcttggtgatctcacataaccaagatgctaccccgtggggaaccacatccccctggatgccctccagccttggtttgggctggagtcagggcctgkatacagtattttgaatttgtatgccactggtttgcattgctggtcaggaactctagtgctttgcatagccctggtttagaaacatgttatagcagttcttggtatagagcaaactagaagaaccagcaatcattccactgtcctgccaaggtacacctcagtactccccttcccaactgaagtggtatgaggctrgctctttccaaaagcattcaagtttggcttctgatgtgactcagaatttaggaaccagatgctagatcaaataagctctgaaaatctgaggaacattgtaggaaaggtttgttaagcatctcttaagtgccatgatgagcataacagccggccgtsgtggctcrcgcctgtaakcccagcactttgggaggccaaggtgggaggatgacaaggtcaggagttcaagaccagcctggccaacatgctgaaacctcacctctactaaaaatacaaaaattagctgggcatggtggcacatgcctgtaatcccagctacttgggaggctgaggcaggagaatcgcttgaacccgggaggcggaggttgcagtgagccragacagtgccagtgcactccagcctcggtgacagcgcaaggctccgtctcaataattaaaaaaaaaaaaaaaaaaaaaaggccgggcrcagtggctcaagcctgtaatcccagcactttgggaggctgaggcgggcagatcacctgaggtcaggagttttgagatcagccttggcaacacggtgaaaccccatctctactaaaaatacaaaattagccaagcatgctggcacatgcctgtaatcccagctactcgggaggctgaggtacgagaatcgcttgaacctgggaggcagaggatgcagtgagccgagatcacgccattgcactccagcctgggggacaagagtgaatctgtgtctcaccaaaaaaaaaaagaaaaagaaagatgcttaacaaaggttaccataagccacaaattcatraccacttatccttccagtttcaagtagaatatattcataacctcaataaagttctccctgctcccaaactgagttgattcattccatgcgcactgtctccctcacctccatcrtatacgcacctgcagctccttgcctgcttctagcatggagscagcggggatgtgctggtgagtgacaaggaattgtggggcatgtcgacatcagcttaaggctttgttagaaacacctgccttgcagtgtttgtgactgggaaagagctcagtgttttaatacacctcagatcaccacattgatcataactttgtcacctcagttcaatagtttctcctggattcttgtccaagtgagatgacaggtggacgtaacaatgccttttcagtctttacctagmctctccagagaatcactccagaatagaaattagagtataggtaggcagtccaacctctgcatttaaaaaaaaaaattttgagatgggagtctctctctgtcacccaggctggagtgcagtggcatgatcttggctcactgcagcctccgcctcctgggttcaagggattctcctgcctcagcctcccgagtagctgggattacaggcacctgccaccacacctggcctaatgtttatatttttagtagagatagagtttcaccatgttggccaggctggtcttgaactcctgacttcaagtgatccacctgccttggcctcccaaagtgctaggattataggcgtgagccactgtgcccggctgccactctttttaaagaaagcagtaatttgccctcttttattgtgcttcagccatactgaagtggtccacagaccaggagcacggccgtcacctgagagcctgttagaaatgctcatcagagtgtcagagggccagacctctgaaccagcatttgcatctcccaagaccccaggtagtttcccaggtacattcaagctcacaatacctttccagctgctccctgattagaaaactgcatgagaatttaggaatgcaacctcttgggcaccccatcagacctactgtatcagtctctgttcccagcaatcaggcaattctgatataaagtctgagaaccacagccttagaactgtttccaaaactgccaagaataacctagaatgtttgttaacatgcctgactcgccctcttcctcctatacacacccgagcccctgggaaatggctcagtagatggaagaaggggccctccctgcacttgcccacagggatccggaagttcccatatgcagatataaagctcttgctcccaagcattctaattgtttatggtcctagattcacatgggtcagaggctcctctgaggaaaacaaaatattgcaccattaggtcggatccaaatagactgtatgccagagatgctataaaattatattagaagtggggagtagagggtagtgttgccagagttaccaaacagaaatacaagatggccaactacttctgaattttcagttatgcaagtttgtttgttttttgagacagagtctcactctgtcgcccaggctggagtgcaatggcgtgatcttggctcaccacaacctctgcctcaacctcttgagctcaagggatcctcctgcctcagccccaacaccctccgagtagctgagaccacaggtgtgagccgccatgcccagcatcccctattatatctggcaaccttagtagagaagatacttagaaggaaaacaagctttcaaagagcttcagaatggaatgagagcgaatacctttctacaactcagtgagtagaaaaaagcacatagctttatagatagaaaaaatctgagatcacccaaaccacacagctcaggaagtggtcccacaggtaatgaccaagtcaggaaagaagatttccgcaggccccactcagaccaaatctctttccagcaggttgttctgtcttaacgtgaactttggcagaattaaatcttagatttcaacacacagatttttaacaacctaccctgaaatctcaaaccaagttttgaggctttaattccttggaaaatactgtcgagtctagctcagtggtccccaagctttttggcaccagggaccggtttcataaagacaattttcccaaggacagagggaggaaaatggttttgggatgaaactgccacctcagatcatcagggactagattctcacaaggagcatgcaacccagatccctcacacgcgcaatcgcacctatgagaatctaacgccgagtggagctcacgtgataatgttcactcacccgccgctcacctcctgctgtgatgcccggttcctaacaggccacgtaacagaaggtttagtgccggtcctaggcctgggggtcggggacccctggtctggctgtattccatgtggcaagttatcttggctggtgacaaatgagtccagggctaagcctcaaatgaaccaattaactgaagtctccctgggcccaaactaattttggtgtcagtggtcacagcaagaaagtgtgcttacaacaatgcaaatccaacgytgcagctcgaaacaactcaaattcaatgattaagccaccatccacgatgggctgcagaagagtagactttatgagtacctgtagcattaatggcttctagaaagtaccgaatgccctagtacaccaattctcaactcgagggtccacaggcctccttgctgcactgagcacctcagtgagagcacatcacaagctctgctgcactggagtagagaggaaggtgaaaccccgagcagaagtactgttctgcccccaagccaatcacctgaagacagcttttgcctttcttaagacctgaatatataaactgataactttagaaaacaaaaactgctgggggaaatttttttttttttttttttacaattttttcctttttttgagatggagtctcgctctgttgcccagactggagtgcagtggcgcgatctgagctcactgcaagctccgcctcccgggtttaagccattctcctgcctcagcctcccgagtagctggaactacaggcacccgccaccacgcctggctaattttttttttttttagtagagacggggtttcaccgtgttagccaggatggtctcgatcccctaatgtcgtgatccgaccgcctcagcctcccaaagtgctgggattacaggcatgagccaccacgctgggccatcaactccattcttgagctccatcttttccacagtcaggcaggctttcaagcgaactgtacttgacaaatgcagagcaattaaattctttattataaaaatctcaaaaatgtccacctttactggagaccaatcttctaaaaggtcaaaagcaatcctgctgtttctctctgaaagctaaactcctttaaatgagaatacgagaatacccagaattttattcccagcctttgtgtggaaaaggcagtttgcattcttaggaaacatctaactgttacctaaaccataaatatttctatctactccattcaacccaattaaagaaaacaaaatgatgagaaaaataggagccgaacagaaagaaaattcacatcattttctactattacgaacattcaaatggtgcttcaaattaaatacttttaattatcattctagccaggatcatactaagtaggatctcatgacagtcacatatgcagcgacttcacctaaaccgtggcactgaatgctctgccatgagccacaagcagcacagtgatcatcacccacaaggacaggttgctgggatgaggcaccctttcctttcatgtttaggttcttctcacctgcatttcactttcctwaaggtcccagccacacagcgttcttttagggattaaagtagtaggaaaaaaataaagagaacacaacatccatccttaaagaaaaaaagtaaatccactttatggtggacttcagctatggacaaatttgggatcagtgttctccagtctgaacatagtcttctgttacctgggagagagtggtcaggtactgccagctcagggcagccaaargcatgacaaacgacaggtagatgggggagtagtggcttcgggaaatcagctgacagttgggaagattctgcgtccggatggtggagatgatctgccttgttttgctagaagatgggtctgagtcggggattctatgataaatctgttaaagacacaggaaaaaatgataagtgctatgtgctttacattttccatggctacttacaacaaccctccactggcaggtattttatacccattttaccaatgaggaaagggaggctcagagaacatgaacataacttacccaaagccatcccaatgataaggtggggatgtcagccccagctcatctcaaagcctgtcttcctgagcaaacaggaggcacaggtgtgcatactgcacccagaggccctcgagagcagcggctgagccacaatgatcttcacatccccagcacctcacagtgccaggcccaataaacgtcaccatagttcacgtagacaggcacagactaacatgacgaaagggaaatgctggaaagactgggcaaaagcagcttagaaacaagatggaacacgcagtacagaccacagcttgacaaagggggacaggaacagaagcagggagccgtatgaaccaccctggagtcctccctgtgcctccctccccactcctccacaagcctcccaagtatgtgcagaatccatctcttcccctacatccctaaaattactgcctgagattaggccctgagtgcctctcagatgagctatctcagtctccaacgtgagtctaagcttaaattcccaaatctacctgtctgctctacactgtcaccaaggagatctcaaacctctgcttgatgcctcagtggcaccagccctctcacctggagaaaaaaagcctgagctctgtaatgtgtagcgcaaggccacccatggtccagacctactgcacctgtctagtgtcaccagcccttgcccacctccctctctatagtctagtaacagttgccgggccaggcacagtggctcatgtttggaatcccagcacttcaggaggctgaggcatgtagactgcttaagctcaggcgtttaagaccagcctggacaacacagtaaaaccctgtttctacaaaatgtacaaaaattagccgggcatcgtggcatgcacctgtggtcccccagctacttggggactggggtgggaagatcacttgagcctgggaggtggaggttgcagtgatccgagatcatgccactgcactccagcctggatgacagaacaagaccctgtctcaaaaaacaaacaaaaacaaaagaacaactgtctactgttgtttcgcccatgcgatgctgctgcacacctctgttccagtctcataccactccttctctctggaatgcgcctcccacgtcccttcaactggctcctacctaggcccccaagtctcaacttcaggattatgccttctagaaaacctgtctgcagctccaggttcagccaggagccaccctattgtacatacctttacctttccacttacgtggaaatggaccatctgtagttttcaccctgactacaccgcacctacttactcacctttttatctccagcctagccctgtgctggcacacagcaagcgtgcatccctggctaatttttgcatttttaatagagacaaggttttaccagtgttggtcaggctggtctcaaactccagacctcaagtgatccacccacctcggcctcccaaagggctgggattacaggcgtgagccactccacccagccaagacttttcaatacaagcatccataaagtaaaatatatagtgatgagataattctattagaagtcatccttctgcctgcccatgttgctttactgcttgtcttagccttcctcctaaaagcagaacctgaggcaaaagcttgcatgcagccatttatttggaaacgagtggagaagtgaaacagaaggcaggaaggcctatcaaggatgtgttgagttggcttgatcttgagggaccttcaaggagccttatgaaaggtggccctgaggagcagagaggtggccctcacctcctctgggttgtggggacccacgtgccaggcagttcctgcagctcgtcagaagcccaagggcaggaagcgagaggtctctggagcagaaggcaaggtccagccctacttggaaactggttgctacagcagtggccgaaggccaagatgagtggcagtgacacacagggtctcacacactactcttgtaaatgacctgagtgccctgatgccatcaaaagccataaaataggcattcactacaatgaccctgagaatagtttctcaggtaagtaatggttttggtatattgtagatttttttttttttttaagatggtgtctcgctctgtcacccaggctagagtgcag

SEQ ID NO: 8730 - DNA, 40186 bp, Homo sapiens
gagaacttgtgcaggctagctcccatttttttttgttttgttttgttttggggtttttttgttgttgttgttggtttgttttttgtgtggtttttgttttgttttgtttttttttgagacagagtcttgctctcttgcccaggctagagtgcagtggcacaatctcagctcactgcaacctccgcttcccaggttcaagtgattttcctgcctcagcctcccgagtagctggggttacaggtgccctccactgcacccggccaatttttgtatttttagtagagatggggttttaccatcttggctaggctggtctcatactcctgacctcatcatccacccacctcagtctcccaaaatgctgggattaaacttccatttttaaagccaacagatgtcataagacttattcactaccacaagaacagcacagaaaagagcaacccccatgattcaattacctcctgtcgagtccctcccaccacacgtgggaattatgggagccacaagatgagatttgggtggggacacagagccaaaacatatcaagctcactataagtcattcatttagccaaaatgataactcaacaatttttaaaaggcaaaaacctctactcattgacagagggaatacttagtttcccaaactctgtctgttgtctttcccttccctttcctatagtttattcaaaagacaaacaaaaatatttcatagccagccatggtgtctcattcctgtaatcccagcaatttgggaggctgaggtgggtggattgcctgagctaaggagttcaagaccagcctaggcaacatggtgaaaccccatctctactaagatacaaaaattagctgaatgtgcacacacctgtaatcccagctactcgggaggctgaggcaggataattgcttgaacctgggaggcagagattgcagtgagccaagattgtgccactgcactccagcctgggtgacaaagaaagactccatctccaaaaaaaaaaaaaaaaaaaactttcattattctttcatatacataagtatcttactcaagagaaaagccaagtttcttttctttctttaattttttattttaaattctgggatacatgtgttgaacatgcagatttgttacataggtatacatgtgcattggtggtttgcttcacctatcaacccgtcatctaggttttaagccatgcatgccttaggtatttgtcctaatgttctccctcccctttttccccacccaccaacagacccagtgtgtgatgttcccctctctgtgtccatgtgttctcattgttcagctcccacttatgagtaagaacatgcagtgttttgttttctgttcctctgttagtttgctgaggatgatggtttccagcttcatccatgtccctgcaaaagatacaagctcattcttttttatggctgcatagtattccatggtgtatatgtgccacattttctttatccagtctatcattgatgggcatttgggttagttctaagtctttgctattgtaaacagtgctgcaataaacataagtgtgcatgtgtgagaaagccaaatttcacccttgcatttgtgtactattaatgtcaacatcaatttttaataaaaccttataggcaaatctatctaatcctaatcagtttcaccataaggtaagagtctcataagcctcttaaaaccctttacaaatttttgttaaagagcagatcagttctctaagaaaaccctgttgtgcttattccaatgttcaatttatggaaaaatcaaataatacccctttaaatttagctgatatgttcccacacagaatttcttttacaatattaatgttctataaaccttccacaacttgctcaaactttcagccttatcctatctaacttaaaacaatcctttaatcctttaatttaggcacaaacaaaaacccacattcccttgccttcttataatcttttgccaaaatcacattttgctttcctcacacaccttgcatttaaaactgttttttcagtagtctcaattacatggtacaatgttaactcttagcaatttttatttttgatgaaaaacctggtaagtgattttaattatgtactaggtgtggagcctaggacaccagaaagaaatgcagataaagtctgatttattccagcatagccaggaggcatggctaactccacatgtccccagggcttacctagaatgtaatggctccaaaacaagtaagttgaacaattttcaaaagacaaagcagtttattaccttaaagcatttagcaaacctaatatctgacgtgcctaatttagaccaaatagcttcattttaccaataatctttaaaactcttcatttctcaaagtcacattaactaaaaggcattaattacagtttttatttttgatatggttcagctgtgtccccacccaaatctcatcttgaattgtagctcccataattcccatgtgctgtgggagggactaggtgggaaataattgaatcacagaggtggtttcccccataatgttctcatggtagagaatatatctcatgagatctgatggttttatgagggaaaacccctttgattttgtccttgtccaccaccatgtaagacatgcctttcaccttctgccatgattatgaggcctccccagccatgcggaactgtgagtccattaaacctctttttctttacaaattacccagtcttgggtatgtctttatcagcaatgtaaaaacgaactaatacagtaaattggaccaggagtgggcactgctgtaaagatacccaaaaatatggaaacgactttggaactggatagcaggcagaggttggaacagtttggagggctcagaagaagacaggaaaatgtgagaaagtttggaacttcctagagacttgttgaatggctttgaccaaaatgctgataatgacatgcatgcacaatgaaacccaggctgaggtgatctcagatggagatgaggaacttgttggcaactagagtaaaggtgactcttgttatgtttagcaaagagactggcagcattttgtccctgccctacagatttgtggaactttgaacttgagggagatgatttagggtatctggtggaagaaatttctaagcagtgaagcattcaagaagtaacttgggtgctgttaaaagcattcaattttaaaagggaaacagagcctaaaagttcagaaaatttgcagcccaatgatgtaatggaaaagaaaaacctggccaggcatgatggctcatgcctgtaatcctaatactttgggaggctgaggtgggctgattgcctgagctcaggagtttgagaccagcctgggcaacacggtgaaacctcatctctactaaaatacaaaacaaattagccagttgtggtggcatgcacctgtagtcccagctacttggggggctgaggcaggagaattgcttgaatccaggaggcagaggttgcagtgagccaagattgtgccactgcactccagcctgggtgagaagagtgagaatccatctcaaaaaaaaaaggaaagaaaaacccattttctgaggagaaattcaagtcagctgcagaaattggcctaagtaatcaggagccaaatattaatcaccaagacaatggggaaaatgtctccagggcatgtcagaggccttgaagcagcccctcccatcacaggacctaaggcctaggaggaaacaatggtttgtgggcaggacacaggggccccatgctctgtgcagtctagggacttggtgccctgcatcccagccactctagccatggttaaaggtgccaaggtacagctcaggccatggtttcagagggtgcaagcctcaatccttggcaacttccatgtggtgttgagcctgcaggtgcacagaagtcaagaattgaggtttgggaacctccatctagatttcagaggatgtaaaaaaacacctggatgttcaggcaaaagtttgctgccagggtggggtccttatggagcatctctgctagggaagggaaatgtggggttgaagcccccacacagagtccccactgtggcactgcctcgtggagctgtgagaagatagccaccatcctccagaccccagaatggtagatccaccaacagctttcaccatccacctggaaaagccaaaggcactcaacaccagcctgtgaaaacagccaggaagtgggctgtaccctgtaaatccacaagggcatagctgcccaagaccataggaactcacctcttgcatcagtgtgacctggatttgagacacaaaatcaaaggagatcatttggcactttaagatttgactgccctgcgagattttggaattgcatggggccttcagccccttagttttagccaatttctcccatgtggaatgggtgtacttatccaatgcctgtacccccattgtagctaggaagtaactaacttggttttgattttactggctcataggtggaagggacatgccttgtctcagatgagactttgggctgtggacttttgagttaatgctgaaatgacttaagactttggggaactgttgggaaggcatgattggttttgaaatgtgatgacatgagatttgggaggggccagaggtggaatgatatggcttggctgtgtccctacccaaatctcatttgaattgtagctcccataattcacatgtattgtgggagggactcagtgggagataattgaattacgggggcagtttcccccacactgttctcatggtagtgaatatatctcacaagatctgatggttgtataacaggaaaccctatcacttcattctaattctctcttgcccactaccatgtaagatgtgcctttcaccttctgccacgattgtgaggcctccccagccatgtgaaactgtgagtccattaaacatctttttctttataatttttttttgagacaaagtctcatctctgtcacccaggctggaatgcagtggcacaattatggctcacctccacctcctggattcaagtaattctcctgtctcagcctcccgagtagctgggattacaggcatgcaccaccatgcccagctaatttttgtattttcagaagagacggagcttcaccatgttggccaggctggtttcaaactcctgacctcaggtaatccacctgcctcagcctcccaaagtgctaggattacagtcatgagccaccgtgtctggcctttctttataagttatccagtctcagatatgtctttatcagcagcatgaaaatgaactaaaacaatttttctgaaaaaatatttgatttaaatgcttattattattaagccaattaatcagaactttttcatataaacatcacacacaacacataaatatatagacagaagaagatccagtagttgtaagatttttcatttgccagtttttaagattcttaattggattactggattcagggtggagtcctttgaggaacagggctaggaaaacatgcagtttctagggcctaataagcaggcacagctggaaagcaaacagatctccaaaaattcagggtcccatttttatactggattctggatccccaaaagagaaatgctgtggaacaagacagtgcaatgattttaccgtacatttcattgcaaagcaacccaaactcaatcaacccagttttgatcagtccatcctccatgggaatcttatctctcagtgggcaggtaggaggacacccagctaggtgtggagcctaggacaccaagctcctaggctagtgtatcttgatatactaggatatccaaaagtacatttagccttagattttgagaagaatggtatgctttggctgtgtccccacccaaatatcatcttgaattcccacatgttgtgggagggacctggtgggaggtaattgaatcatggggacaggtctttcccatgctgttctcatgatagtgaataagtctcatgagatctgatggtttgataaggggaaagctgttttgcttggctctcattctgtctttgcctgctgccatccacacaagatgtgacttgtttctccttgccttccaccgtgattgtgaggcctccccagccatgtggaactgtaagtccaaaaacctctttcttttgtaaattgcccagtctcagttatgtctttatcagcagcaygaaaatggacaaatacaagggatttatctactctcagttcctggggtttcatgaggaaaaaaggtttttcccaaaatggggtctgtggcacttcttctgattttcccaaggagtctgggctgttagaaattatcttaggtattcacatctgtaatcccagcactttgggaggctgaggtgggcagatcacaaagccaggagttcaagttcaatgtggccaacatggtgaaacccctttctctactaaaaatacaaaaattagctgggtgtggtggtgcgtgcctatagtcccagctactcagggggctgaggcacgagaatcacttgaacccaggtggcaaaggttgtagtgaactgagattgtgccactgcactccagcctgggcgacagagtgagactccatctcaaaaaaaacaaaaaaaaaagaaaaaagtaattatcttaagtctggccagacatagtggtacatgcctgtaatcccagcactttgacagactgaggcaggtggatcacctgaggtcaggagttcaagaccagccttaccaacatagtgaaaccccatctctactaaatacaaaaattakccaggcacggtagcgcatgcatgtaatcccagctacttgggaggctgaggcataagaatcacttgaacctcagaggcggaggtggcagtgagccaagatcatgccattgcactctagcctgggcaacaagagtgaaactgcttctcmcaaaaaaaaaaaaaaaaaaaaattatcttaggtcctctcgtgtgtgcatcaagagtggcaagaagacaaaatgaagaaaatcaattcagttgactgaaaagataaaaatatttttttcctagaaaaacaagacccagaaagagaaaaaaaaaaaaacataaaggtcttgtcaatatacctatagcttgaatatctgcttttaattaagttgactttgaaccaaatatcttattacaagactctagccaaaacaagcagcaaatatttcttacctttgaactttaccaaaggcaacctcccaagtgctcagagaaaggaaaattcaagacaggaagtcagaagttgttcatggagggaaagagaatcaataaatggcaaaagtcacacagatatcaaaccagaaagtgttacaacagtgggtagctaattaggtatgagcagggcaggagagggctccccacacacagacacacacacacacamgcactaggagtgttgggcgccaatcaggtgatggtcaggcggttgttaactgtttccttaaagtartaatcattcacagctggtgccagggaacagcagtctcctaatagatacaaaacacctgaaactgatcagcagcttcccaataagatctcaggagttgggagaagtaacacaagatcctggaaggatgccaacgtataaaaccccgagtcaagaggtcaagttgtgcacttggtctcttgagtcacccacttggcttgtatttccaagtgtactttccttactgctctaaagctttttataaactttccctcgtgtgctaaaacttgcctcagtctctccttctgccttatgcccctcagttgatttttttcttcccaggaggcaagaactgaggttgctgcagacccatgtggataactaccactggtaaaaaaagtactcattccctaagtcgggaattgaaccctggccaccactgtgaaaagacagagtcttatccactaagccacagcatcrggcagtttctgctgctcttcccrgaagtagcctagagaggtcaattttgaacttcaaatggcttttaaatgttcaaaataattttcagagctgttacatgaactccgaaattcctgttccctggatgatggagaccaagacaaagtattgctctatggttacaagatcaatctcccaatgacattaaacaagaagatagagaaacctcatccagcttttttgtttcagggatcttcagcaaagtttgtaactaaccagtttgccagaatggcttgaacagtgagcttatgggggtcctaggcccacattctattttattgtacccctttttatgacagaacaatgcagaaggacacattcatagcacaaagtacaccagatttgctacagcttaagaccagcctcacgaatccttttactcattaattaaaactttgcggtcaggcatggtggctcatgcctgtaatcccagcactttgggagaccgaggtgggcggatcacctgaggtcaggagttcaagaccagcctgaccaacatggagaaaccccgtctctactaaaaattcaaaatcagccagccatggtggcgcacacctgtaatcccagctactcaggaaggctgaggcaggaaaatcacttgaacccgggagaattgcttgaagccaggagaatcacttgaacctgggaggcagaggttgcagtaagccaagatcacgccattgcactccagcctgggcaacaagagagaaactccatatcaaacaaamaaaaaaaaaaagtcttaaatgctgggcacggtggctcacacctgtaaccccagcactttgggaggctgaggcgggcagattacctgagatcaggagtttgagaccagcctggccaacatgatgaaaccccatctctactaaaaatacaaaaattagctgcgcatggtggcacgcgcctgtaatcccagctactcaagaagctgaggcaggagaatcccttgagtctgggaggtgggttcactgcaagccactggagtgcacgccactgcactccagcctggtgacagagccagacaagaaaagcaaaggggtggaacacaaaaatccatgcaaatttccaaaagccaaattttacaccccctgcaatattgccatttactacctgtttctttctgacccagtcagatgtaagaggcttctaactagatccaagccagttgatcagttaattactgaatccaatctggtcctggacccagtctggtttctgtcaggactttcaaaccaagtttggatcagaaatttgctcagagaaactcagagagctcaaaacacaaatctatggcgcttcggaatccgagagagaacttacccatgatccctgcttggtcactcagcactcctgggggttgtgagaagctctacttcagatcccacttctgacaccatctgaaaaacttcagccaaattaaatttaaaagagtttaattgagcagtgaatgattgatgaattgggcagcctcctgagccagggtagactcagagactccaacagggctatatggtggaaaatttatggacagaaaaaggaaagtgatgtatggaaaatgaaagtgagatgcagaaacagctgcattggttatagcttggtatttgcctaatttgaacatttagccacatttgactgaccaaaacttggtggtgattggcacaagagtagactacagtttgtttatacttccatttaggccatagttcgtgatgtacagagaaacctttaggccaaacttaaaatatgtaaggaggcagctgtaggctaaatktgatttaacaatggagaaaatttaagattacatcacccaaacagaaagaagggcctgggcacctgtagtcccaacactctggtaggccaaggcaggaggattgcttgagcccaggagtatgagaccagtctgggaaacacagggagaccccatctctacaaaaaaaattttttaaaataaaawtttaggccaggtgcggtgacactgaggtgggcagataacctcaggtcagaagtttgagacccacctggccaacatggtgaaaccccatctctactaaaaacacaaaaattagctgggtgtggtggcaggcacctgtaatcccagctacttgggaggccaaggcaggagaattgcttgaacccaggaggcagaggtttgcagtgagctgagatcatgccattgcactccagcctgggcaacagagggagactccgtcttaaaaataaataaataaggctgggcacagtggctcacacctgtaatccyagcagtttgggtggcagaggcaggcggctcacaaggtcaggagtttgagattagccggccaatatggtgaaaccctgtctctactaaaaatacaagccgggcgcggtggctcatgcctataatcccagcactttgggaggctgaggcaggcggatcacgaggtcaggagatcgagaccaacctggctaacatggtgaaaccccgtctctaccaaaaatacagaaaattagccaggtgtggtggcgggtgcctgtagtccccgctactcaggaggctgaggcaggagaatggcatgaacccaggaggcagagcttgcagtgagccgagatcgcgccactgcattccagcctgggcgacagagtgagactcygtctcaaaaaaaaaaaaatacaaaaattagctaggcacagtggcgggtgcctgtagtcccagctactcaggaggctgaggcaggagaatcgcttgaacctgggaggctgaggttgcagtgagccaagatcacgccactgcactccagcctggttgacagagcgaggctccatctcaaaataaataaataaattaattaattaaaataaattttaagaaaagagaaagaaagtttaataatgatttgaaaggttatatatcagatatcacttaaggccagtcacagtggctcacgcctgtaatcccagcactttgggaggccaaggcaggtggatcacctggggtcaggaactcgagaccagcctgaccaacatggtgaaaccccttctctactaaatacaaaaaattagccaggtgtggtggtgcatgcctgtaatcccagctactcaggaggctgaggcaggagaagcgcttgtacccaggaggtggaggttgcagtgaaccaagattgtgacactgcacttcagcctggatgacaggagtgaaactctctctcaaaaaaaaaaaagaaaaagaaaggtatcrgccaggcgcggtggctcacgcctgtaaycccaacactttgggagaccaaggcaggtggatcacgaggtcaggagatcgagaccatcctggctaacacggtgaaacctgtmtctactaaaaatacaaaaacttagccgggtgcrgtggcgggcacttgtagtcccagctactccttgggaggctgaggcaggagaatggcatgaacccgagaggcagagcttgcagtgagttgagtcgagatcacgccactgcactccagcctgggtgacagagcgagactctgtccaaaaaaaaaaaaagctatcacttaaaaatagcagcaagtgaatgagtaagtcagcctcaccttcaaaatagtctaacctgaccaccattcacaaycctactgctttcatcctcttctaagccactagcatcccctggctggctgcaagtctcctcattggtctctctgcttctgctcttggcagtcttcagtatatcctcaacacagccaaagtcatcctgttaaatcaggctaccctcctactcagacctctctgaaggcttctagtcttgcccagaaggcccacaatatcctacacaatctgctcccatcttacctttgtgctgtcatgacctgctgctttcctccatacttatgcagcttctgctagccaaatctccctgcagctccctgaacrcagtgaagatactcccatctcaataccttggcagttgctattccctctgcctggtactttatggctcaatccctcaccttcttcagatccttcctcaatgtcaccttctcactgaagtcttctttaaagatctattaaagttgtaaaccaccaccacccccaatatatctatgtcgctactcaactttctttttctccatagcacttttcaaacttaacattctagtctgggtgtggtggctcatgcctgtaatcccagcactttgggaggctgaagcggggggatcatttgagcccaggagttcaagaacagctgggcaacataaggagacctggtttaaaaaaataaaaataaataaataaatwaaaacttgacattctattatttatttttatagcatattgtatatttcctggtactagggtacaatctccagaaaggcagaaatgtgtacctgacttgttgctatatccccagcatctagaatatgttctggcacataataggctcgcaattaatgcttttaaaagaaataaacacacaaatttgtgattagaaaacattcatgaagcctgctgttagttctagagcagccactaaaaggatagaaaaaaagcttacaattttaaaactagtagagagaaaaaaacaatgacacaattgtgtcagtttcctagggttgccataacaaattgtcacaacctaggtggctttttaagaaattactctatttcagaggtgagaagtccaaaattaaggcatcagcaggactgtgctctgtccaaagactctgcaggaggatcttctcttgcctcatccagcttcaggtagaaagcaatccttgggttttttgtttgtttgcttttggttttgatagaaatggagtttcactgtattttttgcccaggctggtctcaaactcctgggctcaagcaatcatcccacctcagcctcccaaagtactgggattacaggtatgaggcaccatgcctggccaatccttggtatttattgatttgtggccacataactcccttctctgcctccgtcttcatacagctgccttccatctgtgtgtgtttctgcatctgtgtctcttctcttcttataaggatattagttatattggaattagggcccaccctaatccactataactgcattttaaatagttgcatctgcaaaaatctcatttccaaataaggtcacattcacaggtaccttggattaggactttaacataccactttagggaacacagttcaactcacaatagcaatcatcagtcttggtcttgaattatgtctatattcatacagaatgctcagcaatgctatgatctgaacatttatgtcctctcaaattcatatgtaggtttgttaatatcctgtttagaattgttgcatatacagtcatgagggtggttggcttataattatcttttcttgtgatactcttgtgagattttcatatcaaggttatgctggatacattgttagaggagcagcccacaagaccaccctcacttctgacaccgattgcaaggttggggtcccccaatatcctcctcctctctgacattaattgtcagcttggggggaccccaagaccacccgtgagtttaataattcacaagacaaactcacagtgctcatggaaagttacggtttattgcagctaagaatacaggttaaaatcagccaagggaaggggtacatagggcagagttcaggaaagctctaaacacagaactcccagttgtcctttccatgagttgtggacagtgttaatttcctgacatccagtgtgtgataatactcgcagaatattgtcaaccagggaagcttactcaggccagtttattaggctcaatcacataaatctggtcagctgccctcagtctcctagcccttgcaaagtttgagctgataccactgttctggtgtggggttttcatgaggttgcagtcacatggtggctggggttgggataatctttaagactctttctctaacatgtccgatccctgggtgggcagactgaaacagctacagaaagaagcatatatggcttcttgggcatctttctacttctatatgatcttttcacatggtctctccagcatagcagcttcaggatagtggacttctcacttaataaatcaggatccgaaggcacaagtcctaagaaagagaaagccaggaagaagctgtatcattttttaggatgcagtctcagaggtcacacttctgccatattcttttcatgaaaacttagtcactaagcccgcccaaatttggtggggtggggggaattaccaaagaattggcaggctatatgcagaatatgccatatcagtgaattttctatgtcagaatgatctttccaaggtgaaaaacaatactgggtcagggttggtctctggattttgaaagcaacacatataacatgtgagcctgctgctttcatctaggccaattttaagtggggcacaaagcaagaaaagcctccacggcaagtctaggctttgatgaaaattttccttccacgtggaccttatggttgagcataccatataagattgctagttggaaaaggtattttagctctccctttcccctccccctcccccctccctctcactctccttctcccgctttctgctcggtctccctctccctctgtccttctccggctttccacggtctccctctgttgccgaagctggactgtaccgccatgatctccgctcgctgcaacctccctgcctttttctcctgcctcagcctgcccagtgcctgggattgcgggcgcgcgccgccaggcctgactggtttttgtattttttggtggagatggggtttcgccctgttggacgggctggtctccagctcttgaccgtgagtgatctgcccgcctcagcctcccgaggtgctgggactgcagacggagtctcgctcactcagtgctcagtgttgcccaggctggagtgcagtggggtgatctcggctcgctacaacctccacctcccagccgcctgcctcggcctcccaaagtgccgagattgcagcctctgcccggccgccaccctgtctgagaggtgaggagcgtctctgcctggctgcccatcgtctgggatgtgaggagcccctctgcccagccgcccagtctgggaagtgaggagcctctctgcccggccgcccatcgtctgggatgtggggagcgcctctgcccggctgcgaccccgtctgggaactgaggagcctctctgcccggctgccaccctgtctgggaggtgaggagcgtctctgcccggccgccccatctgagaggtgaggagcccctctgcccggcagccgccccgtctggaaagtgagaagccccctccgcccggcagccactccgtccgggaggtggggggcagcccccgcccagccagccaccccatccgggaggtggggtcagcccccgccctgccagccgccccgtccgggaggtggggggcagcccctgcccggccagccgccccgtccgggaggtggggggtgcctccgcccagccgccgccctgtgtggaaggtgggggggcgcctctgcccggccgccccgtctaggaagtgaggagcccctctgccccgccgccaccccgtctgggaggtgtgcccaacagctcattgagagcgggccatgatgatgatgacggttttgtggaatagagagggggaaatgtggggaaaggagagagagatcagattgttactgcgtctgtgtggagggaggtggacgtgggagactccagtttgttctgtactaagaaaaattactctgccttgggatgctgttaatctataaccttacccccaaccccgtgctctctgaaacatgtgctgtgtccactcagggttaaatggattaagggcggtgcaagatgtgctttgttaaacagatgcttgaaggcagcatgctcgttaagagtcatcaccactccctaatctcaagtacccagggacacaaacactgtggaaggctgcagggtcctctgcctaggaaaaccagagacctttgttcacatgtttatctgctgaccttccctccactattgtcctatgaccctgccaaatcctcctctccgagaaacacccaagaatgataaataaatactaaaaaaaaaaattaaaaaaagaataccacagggaaaaggtattgtatggagtctctgacaagccccaataggagaaccacaccactcacctctagggttttagagtaagactgtttctgtttggtcttctgccaattattctccatttgaacagctcctgccttgctgctgggtgctggagaggctaaatgtatgactaaggagcatcaagtgactaccaaacccaaactccccatcaagcactgggtacgaactgtgagtaaaaacttcctggccaggggcagtggctcatgcctgtaatcccagcactttgggaggccaaggcgggtggatcacctgaggtcaggagttcgagaccagccatggtcaacatggtgaaaccccttctctactaaaaatacaaaaaattagccaggcgtggtggtggcgcatgcctataatcccagaatcccagctactcaggaggctgaggcaggagaatcacttgagcctgggaggcagaggttagagcaaagttccatttctaaacaaaaaaaaaacaaaaaacttccttcatgacagtcatttttgtgtctgtatgccttaccatacccaaaacaaattccaggtacccttaaaacacaatgtgaccaacagacttcctcccctcaaagaaggtgatcaaaacaagagctgcatttatatatgtatataatatatatatgcatttatatattatatatattatatatttatatttatatataatattatatgtatatataatataataatatataataatataaatatatatttacatatattatatatttatatatacatttatagaattatatgtaatatttatatataatatatatttatatatgtacatatatattgtatatatatgctatatatatatatatatatttattttttttttttttttttttttttttgtagagactggatttcgccatgtcgctggtgctggtcttgaacttcctggactcaagcaatccacctgcctcagcctcccaaagtgctaggattggccaggcgcaggggctaacacctgtaatcccagcactttgggaggccgaggctgggggataacttcaggtcaggagttcaagaccagtctggccaacatagcaaaatcctgtatctactaaaaatacaaaaactagtcaagcatggtggcaggcacctataatcccagctactcgggaggctgaggcaggaggatcgcttgaacccaggaggcagaggttgcagtgagccaagatggcaccactgcactctagcctggacaacagagtgagactccatatcaaaacaaaacaaaaaaaaaaatgattcttcctgcagcacgtatgtgctgtcgctacagagcagcgccatggcagactcagaagcactgagcttcgaacacatagggccttgatccctggctcctgcaggctgtcaacaacttgggctgctcgtgacctacggtgatccaggaaaaggctatcccattggccctagaggggaaggacctcctggctcaggctggcaggggctccaagaagacagctgcttatgctattctgatgctgcagctgttgctccacaggacggcgacaggtccagtagtagaacacgcagtgagaggccttgttcttgctcctaccaaagagctggcacagcaggcacagtccatgattcagtggctagctacctactgtgctcgggatgtccgagtggccaatgcctcagctgctgaagattcagcctttcagagagctgtgctgatggagaagccagatgtggtagtggggaccccatctcrcatattaagccacttgcagcaagacagcttgaaactccgtgactccctggagcttctggtggtggacaaggctgatcttttttccttggctttgaggaagaactcaagagtctcctctgtcacttgccccggatttaccaggcttttctcatgtcagctattgttttttagttccttcttcttcctcttcctcttcctcttttcttcttcttcttctttttttttttattattttttttttattgatcattcttgggtgtttctcagagagggggatttggcagggtcataggacaatagtggagggaaggtcagcaggtaaacaagtgaacaaaggtctctggctttcctaggcagaggaccctgcagccttccacagtgtttgtgtccctgggtacttgagattagggagtggtgatgactcttaatgagcatgccgccttcaagcatctgtttracaaagcacatcttgcaccgcccttaatccatttaaccctgagtggacacagcacatgtttcagagagcacagggttgggggtaaggtcatagatcaacagcatcccaaggcagaagaatttttcttagtacagaacaaaatkaagtctcccatgtctactcctttctacacagacacagcaacaatctgatttctctatcttttccccacctttcccccttttctattccacaaaactgccatcgtcatcatggcccgttctcaatgagctgttgggtacacctcccagacggggtggtggccaggcagaggggctcctcacttcccagaaggggcggccgggcrgaggcaccccccacctccctcccagagggggcggctggccgggcgggggctgaccccccacctccctcccggatggggaggctggccgggcgggggctgacccccacctccctcccggccggggaggctggccaggcgggtgctgccccccacctccctcccggatcgggcggctggccggcagggggctaacatttaagtctttaatccatcttaaattaatttttgtacaaggtgtyaggaagggatccagtttcagctttctacatatggttagccatatgtagaaatggccatctacaattggccagcaccatttattaaacagggaatcctttccccatttgttatttttgtcaggtttgtcaaagatcagatggttgtagatgtgtgatgttatttctgagggctctgttctgttccattggtctatatctctgttttgatacaagtaccatgctgttttggttactgtagccttgtagtatagtttgaagtcaggtagtgtgatacctccagctttgttctttttgtttaggattgtcttggcaatgcgggcttttttttggttccatatgaactttaaagtagtttttctaattctgtgaagaaagcctttggtagcttgatggggatggcactgaatctataaataaccttgggcagtatggccatgttcacgatattgattcttcctatccatgagcatggaatgttcttccatttgtttgtgtcctcttttatttcattgagcagtggtttgtagttctccttgaagaggtccttcacatcccttgtaagttggactcctaggtattttattctctttgtagcaattgtgaatggcgttcactcatgatttggctctctgtctttgtctgttattggtgtataggaatgcttgtgatttttgcacattgatgttgtatcctgagactttgctgaagttgcttatcagcttaaggagattttgggctgagatgatggggttttctaaatatacaatcatgtcatctgtaaacagggacaatttgacttcctcttttcctaattgaatgccctttatttctttctcctgcctgattgccctgcccagaacttccaacactgtgttgaataggagtggtgagagagggcatccctgtcttgtgccagttttcaaagggaatgcttccagtttttgcccattcagtatgatattggctgtgggtttgtcataagtagctcttactattttgagatatgtcccatcaatacctagttgattgagagtttttagcatgaaggctgttgaattttgtcaaaggccttttctgcatctattgagataatcatgtggtttttgtctttggttctgtttttgtgatggatttcgtttattgattcatgcatgttgaaccagccttgcatcccagggataatgccaacttaatcttgatggataaggtttttgatgtgctgctggattgggtttgccagtattttagtgaggatttttgcatcaatgttcatcagggatattggtctaaaattctgtttttttgttgtgtctctgtcaggctttggtatcaggatgatgctggcctcataaaatgagttagggaggattccctgcttttcatttattggaatagtttcagaaggaatggtaccagctcctctttgtacctctggtagaattcagctgtgaatttgcctggtcctggactttttttggttggtaggctattaattattgtctcagtttcagagcctgttattggtctattcagagattcaacttcttcctggtttagtcttgggagggtgtatgtgtccaggaatgtatccatttcttctagattttctagtttatttgcatagaggtgtttatagtattctctgatggtagtttgtatttctgtgggatcagtggtgatatcgcctttatcatgttttattgcatctatttggttcttctctcttttcttctttattagtcttgctagtggtctatcaattttgttgatcttttmaaaaaaccagctcctggattcattgatgttttcaagggtttttggtgtctccatctacttcagttctgctctgagcttagttatttcttgccttctgctagcttttgaatttgtttgctcttgcttctctagttcttttaattgtgatgttagggtgtcaaytttagatctttcctgctttcttttgtgggcatttagtgctatacatttccctccacacactgcctttaaatgtgtcccagagattctggtatgttgtgtctttgttctcattggtttcaaagaacatctttatttctgccttcgttgtgtacccagtagtctttcaggagcaggttattcagtttccatgtagttgtgcagttttcagtgagtttcttagtcctgagttctaatttgattgcactgtggtctgagagacagtttgttatgatttctgttcttttacatttgctgaggagtgctttacttccaactatgtggtcaattttggaataagtgcaatgtggaactgagaagaatgtatattctgttgatttgaggtggagagttctgtagatgtctattaagtcagcttggtgcagagctgacttcaagtcccagatatccttgttaaccttctgtctcgttgatctgtctaatattgacagtggggtgttaaagtctcccattattattgtgtgggagtctaagtctctttgtaggtctctgaggacttgctctgtgaatttgggtgctcctgtattgggtgcatgtatatttaggatagttagctcttcttgttgaattgatccctttacctttatgtaatggccttctttgtctcttttgatctttgttggtttaaagtctgttttatcagagactaggatagcaacccctgcttttttttgcttggtagatcttcctccatccctttattttgagcctatgtgcatctctgcatgtgagatgggtctcctgaatacagcacactgatgggtcttgactctttatccaatttgccagtctgtgtcttttaattggagcatttagcccatttaaatttaaggktaatattgttaatatttacatttaagtttaattatgtgtgaatttgatcctgtcattatgatgttagttggttattttgcttgttagttgatgcagtttcttcctagcatcgctggtctttacaatttggcatgtttttgcagtgcctggtaccggttgttcctgtccatgtttagtgcttccttcaggaactcttgtaaggcaggcctggtggtgacaaaatctctcagcatttgcttgtctgtaaaggattttatttctccttcacttatgaagcttagtttggctggatatgaaattctgggttgaaaattcttttctttaagaatgttgaatattggcccccactctcttctggcttatagagtttcttctgagagatatgctgttagtctgatgagcttccctttgtgggtaacctgacctctctctctggctgcccttaatattttttccttcatttcaactttggtgaatttgacaattatgtgtcagattcaccaagatactactcttctcgaggagtatctttgtggtgttctctatgtttcctgaatttgaatgttggcctgccttgctaggttggggaagttctcctggataatatcctgaagcatgttttccaacttggttccattctccccatcactttcagatacaccaatcaaacgtagatttggtcttttcacatagtcccatatttctcggaggtgttgttcatttctttttactcttttttctctaaacttctcttctcagttcatttcattaatttgatcttcaatcactgataccctttcttctgcttgattgaattggctactgaagcttgtactgaaacttgtacatgcgtcacatagttctcgtgccatggttttcagctccatcgggtgatttaaggtcttctctacactgttgattctagtttgccattcgcctaatcctttttcaaggtttttagcttccttgcgatatgtttgaacatcctcctttagctcagagaagtttgttattatgaccttctgaagcctacttctgtcaacttgtcaaaatcattctacatccagctttgttccattgctggcgaggaactgcaatcctttggaggagaacaggctgtctggtttttagaattttcagcttttctgctctgrtttctccccatctttgtggttttatctacctttggtctttgatgatggtgaagtacagatagggttttggcatggatgtcytttttgttgatgttgatgctattcctttctgtttgttagttttcctcctaacagtcaagtccctcagctgcaggtctgttggagtttgctggaggtccactctagacctgtttgcctgggtatcgccagcagaggctgcagaatagcaaatatcgcagaacagcaaacattgctgcctgatccttcctctggaagcttcgtctcagaggggcacccagctgtatgaggtgtcagttggcccctactgggagatgtctcccagttagactacataggggtcagggacccacttgagggggcagtytgtccattctcagagctcaaacactgtgctgggagaaccactgctctcttcagagctgtcagacagggatgtttaagtctgcagaagtttctgctgccttttgttcagttatgccctgcccctagaggtggagtctacagaggcaggcaggcctccttgagctgcggtgggctccacccagttcaagcttccaggccactttgtttacctactcaagcctcagcaatggcagacgtcccctcccccagccaggctgccacctcgcagctcaatcttgtactgctgtgctagcagtgagcaaggctctgtgggcgtgagacccactgagccaggtgcaggatataatctcctggtgtgccatttgctaagaccattggaaaagcacagtatttgggtgacagtgtcctgattttccagctacagtctgtcacagcttcccttggctaggaaagggaaatcccccaaccccttgtgctttccaggtgaggtgatgccccaccctgcttcagctcaccctccgtgggctgcacccactgtccaaccagtcccaatgtgatgaaccaggtacctcagttggaaatgcagaaatcatccgtcttctgcattgatcacgttgggaactgcagaccagagctgttcctatttggccatcttggaacccttcccaatatttagtattttaaatatttagtttcttgttagctggtcttcagttgacttggttctctatccagttacagccatggtgcatgttgcatgcagtcgtctatacattatttaaaygggcttaaatattaaatgtgttacccaccaataataaaatagacccttatgaaaactataaaaacaaaacacacaaaaaaagccattgggtacatttgttcaaatctttttttttttcgagatggaatttcactatttgttgccctggctggagtgcagtggcacaatctcagctcactgcaacctccgcctctcaggttcaagcaattctcctgtctcagcctccccagtagctggaattacaggcacctgccatcacacccagctaatttttaatatttttagtagagatggggtttcaccagttggccaggctggtctcgaactcctgacctcaggtgatccgctccccttggcctcccaaagtactgggattacaggcgtgagccaccatgcctggccttaaatctctttttttaaatgctcttgggcttggcacggtggctcagccctgtaatcccagcactttgggaggctgaggcaggcaaatcacgaggtcaggagatcaagaccatcctggctaacacagtgaaaccctgtctctaccaaaaatacaaaaaattagccgggcatggtcgtgggtgcctgtagtcccagctacttgggaggctgaggcaggggaatggcatgaacctgggaggcagaggttgcagtgagccaagatcttgccactgtactccagcctgagcgacagagcaagactccatctcaaaaaaaaaaaaaaaaagttctttattgccttcagctgtcagggcttcatgacttccattctatagaatttaaacaaaatcctctgtttctcaatggcagcacagctggcatttgagatcagaccattctttgtcatggagcagggatgtcctgtgcagtgtaaggtgtttcacagcatctccagcctctattcactagatgtcagtagcgctcctgccaggccttccaccaccactcattgcggtgtctccagacattgccaaatgttccctagatgtagggttgccaggtaaaatattgcatgggacaaacatactaaaaatattatcgattgtttatctgaaatgcaaatttaagttggccttccatatctttatttgctaaatctggcaaccctatctgagaggtgaaaaaccctatctgagaggtaaaatcaccactacatctcctacctcccatcccatttgaaaaccaatgctctagtccacagggagcaatggagaaaaagtgtggkaatgggtttgggaaatgttatgattagatttgcatttggagcaaagcactttttgtttgtttgttttgtgttgtgttgttttgtttgagacgcagtctcactctgttgcccaggctggagtgcagtggcaygatctcagctcactgcaacctccgcctcyggggttcaagtgattctcctacctcagcctcccgagtagctgggatgacaggcacccaccaccacacccagctaatttttgtatttttagtacagacggggtttcaccatgttggccaggatgttctcgatctcttgacctcgtgatccacccgcctcgacctcccaaagtgctgggattacaggcatgagccaccgcacccagcctggagcaaaaaaactataagacgtccaagccctcttcaccagccaggactgctgtagtcaacatcctgtttgagacctgattggaatgcctggctctctttttttttttttttttttttgagatgtagtctcgctctgtcacccaggctggagtgcagtggtgcaatcttggctcactgcaacccccacctmctgggttcaagcgattctcctgcctcagcctcctgagtacctgggactacaggtgcacaccaccacacctggctaatttttgtatttgtagtagagatggagtttcaccatattggctagtctggtctcaaactcctgaccttgtgattcgcctgcctcggcctcccaaagtgctgggattacaggtgtgagccaccacacctggccatctctcctttttagtaagcaactagagttgggattccagatgtggccaggcacatgcacctctggagagactaccctgtctgctaaagctggaagaataaaagaaatgggtgattgtgctatctcctgtttctcttctttaatatgtttatattgaaggcttaatttaattagctaataaaggtgcattaggaagaactaacatgaaatattttctcttgtccttaaatccagttcagggatctcctaaaaacaggaacatacttgtgttctgggacagatgagacttgaaattccaaacccagaatgtctttgtctttatttttcttttcttttctttttttttttttttttttgggtaaagttttgctctgtcacccagggtggagtrcaatggcgagatcttggctcactgcaacctctgcctccctggctcaagccaaccttccacctcagcctcctgaggagctgggactacaggcacgcattacttcctagctaatttttgtacttcttgtaaagatgaagttttgccatgttgcccaagctggtctcaaactcctgacctcaggcaatccacctgcctcggcctcccaaagtgctgggattacaggcatgagccaccatccctggcccagaatgtctttttatttttcaatttttttatatctttttgctaatcttctctgtattgttccaattttagtatatgtgttgctgaagtgaacatttatttttattcaatgggttcttcctagccactgtgcaagcccagaatatgtgaggtggaattcaccagaaccataggtattcttttaaaatatccctcaacacatcagccaatttataaaaagaattcaaagaaacatagagttgcaaattgatgtgatttagtctcctctcctccttgttagaattccagtttttccgtctccaaatagccggggttggaagatgggttctcgccctgacaccgcagagctctgtctcatctatagaacaagagtacagccgcctccgttatctcccgactgcagctgctcttaacgtgagttccatatccatcccagtcaaaggcggagaagtccccacactgacggggtttgccctgtgggaagaaccctcctccaccgatgcagtgctgggaaacagaaagaagaaacactgtgaggaatttgatttgctgctgacaccagtgagcgcaaggctggtctcgaactccagacctcaagttatccgcctgcctcggcctcccaaagtgctaggattacaggtgtgagctaccacacctggccctmtgcatgtattttaaagtagtaatgcatgcaggaacatacacaaacaygcactaatggacagtctgaggagcacagagccagtagagaaacttgtcaaggaaaagggcataaagacatatactctagtccacccccactgcccacgtggtcgtcatcctccgaattctaatctgcgagtccctccatgagagaatagctgcctcatcttagctggaaaatgaaaaagctgaaagctggggcagggaagatggaaccgtgagttcagactgtcagttggggagggaagggggccctaagtgaatgcccttgttcttgatggctctgacgctctcttcctccaacccctaggcacaggatgtccctcaaatacaatctcccaccactacaactgtggtgctgtctcctacaagactggaaaaacaataaaaatataaagcttctaaaagttaagattaatattggagaatattttcacgacctcggtgtaaggaggtacatcttaaagaaaacattaaaagtactaaccataaatgaaaagtttgataaactgaattccattaaaataaattatactcagccgggcacggtgactcatgcctgtaatcccagcactttgggatgccaaagtgggcagattgcctgaggtcaggagtttgagaacatggagaaacccatctctactaaacccatctctactaaaaatacaaaaaaattagccgggtgtggcartgcattcctgtaatcccagctactcaggaggctgaggcaggagaaacacttgaacccgggaggcagaggttgcagtgagcagagatcctgccattgcactctagcccaggcaacaagagtgaaactccctctcaaaaaataaataaataaatacataagatttaaaagacaaataaattatactcaacttctggcatctactactccaaactttgtaccacttaatttttattaaaaatatggactcttcaggctgggcgtggtggctcacgccagtaatcccagcactttgggaggccgagacgggcggatcacgaggtcaggagatcaagaccatcctggctaacatagtgaaaccccgtctctactaaaaatacaaaaaaaattagtggggcgtggtggtgggcccctgtagtcccagcaactcgggaggctgaggcaggagaatggcatgaacccgggaggtggagcttgcagtaagctgagatcgcgccactgcactccagcctkggtgacagagcgagactctgtctcaaagaaaaaaaaaaagaaagaaaaggactcttcaaagaaaaaaaaagaaataaaaaataaattatattcataagacatcatcaggagagtaatgagagtaaacagaatgagagtaagcgagtaaccacagagacacacattgatacaccccacacaggtacacacatgtgcatacccatgcacacacatggtgaagggggccagcccctccacatctgtgggtatttctcgtcaggtgggatgagagactgagaaaagaaataagacacagagacaaagtatagagaaagaacagtgggaccaggggaccagcactcagtatacggaggacctgctccggtgccagcctctgagttccctcagtatttattgatcattatttttactatcttagtgaggggagtgtagcagggcaacaggtaaggagaaggtcagcagggaaacatgtgagcaaaggaatctgtatcatgaataagttcaaggaaaggtactgtgcccggatgtgcacataggctagatttatgtttctctttacccaaacatctcagtgtagcaaagagtatcagagcagtattgctgccagcatatctcgcctccagccacagggcggttttctcctatctcagaatagaatgaatgggagtggtcagctttacacccagacattccattcccagggatgagcaggagacagaagccttcctcttacctcaactgcaaagaagccttcctctttcactactcctcctcagcacagaccctttacgggtgtcaggctgggggatggtaaggtctttcctytcccatgaggccatatctcaggctgtctcagtgggggaaaaccttggacaatacccaggctttcttgggcagaggtccctgcggctttccgcagtgcattgtgtccctggtttatcaagaatggagaatggcgatgacttttaccaagcatactgcctgcaaacatattgttaacaaggcacatcctgcacagccctaaatccattaaactttgattcattacagcacatgtttctgtgagcacagagttggggctaaagttacaggttaacagcatctcaaagcagaaacaatttttcttagtacagattaaaatggagtttcttatgtcttccttttctacatagacacagtaacaatctgatctctctttcttttccccacacgtgggccattgatctccccaaaaactcacatgctcagtgttacagccagtaacttttatcccagcacaaagggcgttggctgctctctcgttattaaacacccggaactgaacgaatcctgcaacaaattcccctgaaaaagaagaggtgaagaaacagccaagtagtcaaaggatgaactagaagcagcatcccattggccagtccagggaytccctaagccaaaagctgaggctacagccaaacaccccaggctgtaggggtgcagcccagtacctttatggccagtggctggtgcacgtcagtcctaaacttgtccccaaggaaacctctgttcatagggggcaagaggacaaaggctgggactcacaaaaggacccaggtctgcttacagcttacaggagaaactagactctacaaaaagattaccaaaaagatctgagaaggcccagcaggaataagcaatgatcagatgtggctgcctattgctgtttacacacttctcatccaattaccatgggttagtttccctgaccatcacctgctttcatcaaaatatcaaaggcaaacagtgatgtctttgatttttttatccacaacttaacttctgtgctcttattatactgaaaactgtcttttgtaagataattaaagttatccttcataacaaaagtaaatctctctcaccactctgctagtggttctttcctgtgaacctcagtgtgcacttttttttttttttttttgacagggtttcgctcttgttgcccaggctggagtgcagtggtgtgaactcagctcaccgcaacctccgcctcccaggttcaagcgattctcctgcctcagcctcccgaggarctgggattacaggcatgcgccatcatgcccagctaatgttttgtatgcaccttttcttaactattattgaaggggtggcctgcccctccacacctgtgggtgttcctcgttgggtggaacgagagactgagaaaagaaagagacacagcgacaaagtatagagaaagaaaagtgggcccaggggactggcgctcagcataaggaggacccgcaccagcaccagtctctgagttccctcagtatttattgatcattatctctaccatctcagagagggggacgtggcaggacaatagggtaatagtggggagagggtcagcaggaaaacatgtgaacaaatgtctgtgtcataaacaaggttaagaaaaggtgctgtgcttttgacgtgcacatacataaacatctcggtgcattaaaaagcagtattgccgccagcatgtctcacctccagccctaaggtggttttctcctatctcagtaaatagaacatacaatcgggttttacaccaaaacattccattgcccagggataagcagaagacagatgccttcctcttatctcaactgcaaagaggccttcctcttttactaatcctcctcagcacagaccctttgtgggtgtcrggctgggggacagtcaggtctttcccttcccacgaggccatatctcaggctatcacatggggagaaaccttggacaatacctggctttcctagacagaggtccctgcggccttccgcagtgtattgtgtccctgggtacttgagattagagagtggtgatgacctttaacaagyatgctgccttcaagcacttgtttaacaaagcacatcctgcacagccctaaatccattaaaccgtgagtcaacacagcacatgtctctgtgagcacagggttgggggtagggttacagattaacagcatctcaaggcagaagaatttttctyagcacagaccaaaatggagtctcttatgtctacttctttctacatagacacagtaacagtctgatctctttttcttttccccacaattataagagtatacaaggtggtgatgaagaaacctgggattacgtgctgtgaaatggggataacagcaattctaacttcatagttttctcatggtaattaaatgacacaaaatcatgttaagttccaagacaagagtctggtgcattttaagtgctcagtaaatactagcaattattaattgttgttatttgccaccattctccaagagtacaagaaaatatttatgactggacttagggagcaaacactcacgttgaccatacggtgagtaataagatgcagtcttcttagcatcaccaaagtcatagaccacaggtatggctgggccattgtcattccaacatttccctgatctgtatttcactgggtatttctgcagagacccagaagaaaggttttgtgaggacagtagagatgctgccacagtgtggggggaggaggggtttcaaattaactgccattacccaaaaccaatcctcataatagtgactgcttttccccatagctgtgtctccccaacagccccaaaccccttgtccctgtctctttctccccatgctttcctgtcccacaggcctcttccttgcyggcttagagtttctgagagrccagacatgagttcacagtgaatcaaaggaaggagaaacagccaaccactcagtagtgatgtggaaccacaggacagatctgccccctaccctagacacttcgatctctgttcaccaaagaaagtgccccccagccagcagccctgtgtacctggtagatgccaaacagattatgtcccagtctctggaggaagccagtgttggtgcggtacctcagcagggcgctgtttctccaatgctgcatgggggacttgttgggcacatgccagatgcccaggtccttggcctggatgtcgtagtagccagggttctggaaagcaacagacactgagcctgactgggccaggaggtaccaggaggcagaaggtccacatgtgcagcctcagctgggctgagagctctgggatcagtaggcagatggccagccacgctcagacaccccactcccagctgatgatcccaccaccacccagggccctaacagccttgttgagaggaagttgtgattcaagtcctgtatttctctcttcttctccagcccttccccatatccccaccttccagccctccctcctgcaggctggtggccagccacactccacacctcaccctcacccragtrggagagaagtggcaccaaccttgtagtcatcgctcgtggccgcctctgcagatccaaaggtgttgtagttggcccagttgccatccccctctgggtagtctgctttgttgccctgctgactggaccagcgatcacccaccgtgcacttcccaygcatgtcattctcgtgcacgctggccaccagggtccagccgccacccccagaagtcatgtcacagaaggtctggtagacaacaccattcttggtgcggagaaaatacaggccatctgtagagagaaccagcccagagcctccctgtctgagagctcagggttcatctcagctccgtgaatagaaaagccctaggaagtcaaaagcacactcagaagactycaacacatacttgctggaagaygatgctccaygcatcttgtgtkctgctcacctatgagcagaggcactgactgtcttggcttcacactatcttttcaaagagtttgtagagcaaatagtcttagaagagacagagatggtatctccctctcgacagtgccaccctgtggccasgagaggccagaaatcagcacacgccacatctgattctacagcaggatagggcctctgtgcagctcagagcaaaggttgtgcccacttcataagattcagcttccctaagctcagagttcccctcctgttcacaagcttgcaggagactggctccacggtggcatcctggtgaccttgcacatttgcgcataggccacatagggacagctgacctaagtcttggcagaaagcctgtggtcttccccaaacatggaaagatgggaaccttgtgaggagctgcaacaaggtcacttctcaccccccttcccatctttcgtggaggctgtcatgagacagctgtcataactgtgtcatcatctcctgggttctgaagaggtatgaggctttttgcctcactcacccccaccccgtagggtacacaggctatgaaacagctatggcagcatggactggctcctcagccactgcccatgttgtgttgtcactcgccctcttttctgtgctgtcttgtggggcaagggatgggaaaagctgacacttttgccgatcttgaacttgctagctatgtgagtaataaactctctggctctaaaaagggtttgttgtttccttgccagccacatttgtcagccagcttgacaaacccactacttgggcagatgtcacctggcccagtacaagaaaatgctgatgctctggctactgctatttctgtgattaataaagctctttgtctctggctcgggagtttcaggttttctgccagcatctataaacctggggcaagtaggggcaaatctcagacgcatcacagttcttgccaccaccataagcgtcaccaggaacactgcattctctctgtgttcagaagactttgtgactggaatgggacacaaaagcctcaaaattcccactagaaacctccttgagtaggagctgggggcagaacaggctccatatggatatgtccctcctgatttccatgactgggctctgttgagctaaaaagtggcttcaaagagagaatgctgagttggttcattactcaccacctgcactatggcagcgttccttgatttctttgcagcttctaggcagggaagaaaaggagaaggcacaggtttcgaattccctcgagagcatctcaagagaagaggctgctgctagaaaatgtgagaatgagtctcattagaagtctgaccactgaggccatctttcctggccaatctctgcccctgtatcaactcatcactctgctctgaagtcccaggaggtcagggattccctatgctaagacggtctgatccaacagctggtataggttaaacacctggaatcttccactcgactaattttaattaaatacctactgtgtgaactacctagacaccggacaaagacaatttgacacatttcttcaagagactacattctacaaggaaggagcacatggaaagggacccaactgagatgggagggcaaacccactaacgggggtgaggcctgggaactgctggggaagggaccagctgtaactcagagcaggctgattttgatgggagaatgggagctggctacaggacaggaaggaaaggggagagtacaccccaggaagagaagaaagcacatgagatggcctgaagcaataacagagcccagcccagcccagcctgccaaaaactacaggtcagtcgcttattgtggctggaacatatgttgtaatacaaagaagtctggaaaccaaagctgaaaaattaacagaggccagtggatgaagggccatgtatataagtctaaaagcctagaaatcattccaaaagcctggcagagcgggaaaaagtgtaaaattacaggactcaggccaggcacagtggctcatgccggtaatcccagcactttcggaggccgaggagggtggatcacaagatcaggagttcaagaacagcctggtcaatatggtgaaaccccatctctactaaaaatacaaaaattagctggggtgtggtggtgcacacctgtaatcccagctactggggaggctgaggcaggagaagctctttaacccaggagacggaggttgcagtgagccgacatcacgccaccgcactccaacctgggcaacagagcaagactccgtctaaaaaaaaaaaaattacaggactcaaggtaaaatccagacaaaccctgatgacagtgcctccttgagcagacacttaacatctctgatcctttttcttcatctttaagatgtcattaataacttctttatacgcatggagatcaaatgagatgacatatgtaaatgtgctttttttaactgatggattgaaataaacaataaacccagtatcaatgaaaaaatatcactattgtgcctactggaagaatagaattgtgaggattctattctcacaatatcctcctctgcgactagaggagggtgtaccctggacacagcactgatcacccagctgcctctggagatcccaaggccaaggccacaagagcagctgagcagggacacagttcttactctctcaccccatgaacccctcacagccacagaagcagagaatcaagccctaggaaatacctgagctaacaccctgactgcttcagaccagaccccaggagaggccagaaatcagcacccagtccacacctcaagttggctgcctagcctgggttccctgcctctccagaacttcccctttgacccttgacttcagagccctgcccagctctactccctccaggccctgcacagcagaggggagcccaggaaactgcagctcctactctcagaagccatttacctgcactgcacccactggtggccacagagaagaataacaggaagcagagtctggtcattgtcctctaaggaaaaacaagatgcacaaggtcactggctggcccttcctttgtcatcctctcgttcttacttcctaacctttctgagtcaggaatcctcaaatggaaagtgatgggctcatgagcattctaaaacctcctggaatatgccccacggctgtccaacactacaaatacccaaggggccatgggctcatttccctgaaactctaaatctctaaaactgagacctgagctggcatcattgctcccacacacatggatcaaaaacatttttctcaccagcatggacagcatccttacagatgccaggagctgatagttcccttcctgtggacactcggagctcccctgcagaggatcctgatgaagggtgaagtgctggtccctttatgtggagagctgtggagagccaaaccacctgagccctgcccagcccaaccctgagcagcctaggctgctagcccctccctctgaagcccttccctctgagggtacctgagcctgggaccgtggaaatgagaaaggacgtgcgactggctggaggagcagggagctgtgttcctggccacacaggtgactgtcgccatctgaggaggggcatcctgctttgccaaggcaggccatacaatgtagcagtatctaatcagattcgtggataggtcacaatcctcccctgcgttctccctctcccacctcccccagatgccctggccccctagacacaactctgtcaagaaatcatccttttagactgaggtgacacctcatgaaaaataaattaattaattaagaataataattggccaggcacagtggctcacacctataatcatagcgctttgggaggccgaggtgggcggattacctgaggtcaggagttcaagaccagccaacatggtgcaaccctgtctctactaaaaatacaaaaatttagctgggtgcagtggcgtgcacccgtaatcccagctactctggaggctgagacaggagaactgcttgaacccaggaggtggaggttgcagtgagccaagactgctccactgcactccagcctgggcaacagagcaagacttcacctcaaaataataataataataataataataaataaatgggaaaagaagacatcatccttccaatctttcctccaatttctctatgaggccttccctgacacccccatcaccagacaaagctgatggatccttcctttgtcccactatacactgtccaaacactaattattgcatgtatcctgctgtaattttattgttttattaactctgtttagaaacaatttgaaatttattaaatgttgcaaaaataacaataatataaagccacatatatgccctttacctagattcaactattgttaatatttcaccccatttgctttatctttcgtgttctctctctctctctatatatatatagatatatgtatataaaatacacccacacacacaaaatttttttctgaaccatttgaaggtaaggtacatacatcatgggcttttacctttaaataaatgtgtatgggtttttttttattttgttttgttttttgacacagagcctcactctgtcacccaggttggagtgcaatggcatggtctcagcttactgcaacccccgcctcccaggttcaagtgattctcctgtctcagcctcccgagtaactgggattacaggcacccaccaccacgcccagctaatttttgtatttttagtagatacggggttttgccatcttggccaggctggtcttgaactcgtgacctcgtgatccacctgcctcggcctcccaagtgctgggattataggtgtaagccaccatgcctggccaactgtgtgttttctaataataggaatatgtcatgtataaccacagtacaattatcaacatcatattattaaaaactctttttttgggctgggcgcagtggctcacgcctgtaatcccagcactttgggaggccgaggtgggtggatcatctgaggtcaaaagatcgagaccagcctgaccaacatggagaaacccggtctctactaaaaatacaaaattagccggtcgtggtggtgcatgcctgtaatcccagctactcaggaggctgaggcaggagaatcacctgaatccaggaggcggaggttgcagtgagccgagatcacaccattgcactccagcctgggcaacaagagtgaaactccatctcaaaaaaaacaaaaaacaaaaaaaactcttttctgtagaaacggggtctccccatgttacccaggctactccagaactcctgaccttgatcctcctgcctcagcttgcccaagtgctaggattacgggcgtgaaccaccgagccagcctgttaactctttttaacataactgatacttccctagagtatcatcagcccaggggtcatggtgagttagcattaatgagacaggaatttctctggctttcatgccctcccattgtaaggagacttctggtccccttttaagtccataatcccaaggggcatcttgtgtgtgctaacaaacatttctccattccacacatactcccagcccaccctgacttctttcagcactgcctactgaaaccacagtaggcacacaccacagctgaacaccaaccgtatgatttggcatccctgctgcctctgatgctggatctggtgtcgggacaagctgctggtgtttaaggcactgcttcctctcactcccaggcctccggcacatctcttgctattcaaggcatggaagtcatccacctcatagggtgctggagaagggaaacgcctcactgctcccatgatgggcaccagaccaggacatgtctccaggtgtctcagtgacctcagtgacactgttctttcagtgtctcttgcagtctgtctctctcttggactcagacaggaatctaaggagacgaggatagaggacaaacctggaagatgtcatactactctgatggacctttgtctctgaatactaagatactattattggaaagattttgtaagctccttctcctgaaacttttgaatttttttatttgagtatttatataggtatttgcttaatacctgtctccttctttatagagacagaatctatgtctgtggttgtccaccagatgtccaggcctatgcacaatgcctggcacacagtgggccttcaatatgcattagttgaatgaaagaaattgactccaggtggtactaaaaaacacacatgaacgcttcctccaatccaaaaaaattttaggaatgaaaatggccaatgcaaaattttacagttttctcccctttgttgtaattactctaagccatgtttccaccatcaaatactcaataaaagttagaatgcatgcaacagcttggtgtttaccaatgctttggaggaaaaaaggaagagatgtggtgtcctgtttgggaaagaacaacaggacaaaggaaaccagacaaaaacaatggcagccccaaacagatggatgataaggaatagatgagagcccaggaactggctgaaatgcagaaacacacaggagaaaaataggtctccttggcactcttcagttgaattgggtaattttctacagtagatttttcccgcagtaccagaactactgggaatggcaatgaaaacgtagctggaagaaaggggacctgaggcttccattacatattcataaatgtttattatccacttagtacctttctttgtaaattctggattttttttttaagacaaagtctcactctgttgcccaagctggagtgcagtggcatgatcttggcttactgctacctccacctcccgagttcaaacgattctcctgcctcagcctcctgagt

SEQ ID NO: 8731 - DNA, 103660 bp, Homo sapiens
  misc_feature (1)...(103660): n = A,T,C or G, or insertion/deletion polymorphism (see Tables 1-2)
gaccctgtcaaaaataaataaataaataaaaaggaaactgtaactataaaggtagtctgtctctttgtaggaaggctgaaaatacttgtttgtacatagtgctagaagagccttactgttggaatttacagagggagaagctgagatatttgctcaaagttgcttgctactcaatgggaatggtgtttgggctgaaacgcaagttttttgggggcaaaaaacttgcggtgagcactgtagcctcgacctccatggctcaggtgatcctcctgcctcagcctccccagtagctgggactaaaggcatacttcatcatcacacctggctaattttttttatttgtggagacgaggtcttgccgtgttgcccaggctggtctcctgaactcaagcgatcctccctccttggcctcccagagtgctgggattccaggcatgagacaccatgcctggcctactttatatattttcaatgtactatttctgcattacatattttatgtactttttaatatcaatagtatgtctgtattagaaataacaatgtaaaagtgaaataagcactgggagcgtccaaagctattttaaaggtgttgggggtggccaggtgcagtggctctcgcctgtaatcccagcaccttgggaagctgaggcgggtggatcgacttgaggccaggagtttgagaccagcttgggcaacatggtaaaaccccgtctctactaaaaatacaaaaagttagctaggcatggtggtgcacccctgtaatcccaggtacttgggaggctgaggcacgagaatcacttgaacccacgaggtggaggttgctctgtctcaaaaaaaaaagaaaaaagcgtttaggagaagctgcggctgataaattacaaatagatgggttttcgtctgacctgctaatcttccactagatggcgtcattgtcaagtgtctgtaatttcaaaagcgctagggaggaaagactgcccattaattgtttatgccttaacactttatttttattttcgcttgtttttcttttgagtcacttgaaattaaagaaaaaaaagctgaggccaggcacagcggctcactcctgtaatcccagcactttgggaggccagtgaggaaggatcgcgtgagcccaggaattcaagactagcctgagcaatatagtgagacctcgtctctgcaagaaatacaaaaaattagccaggtgtggtggcgcacacctgtagtctcatctactcaggaggctgaggtgggaggattacctgagcctgggagatgaaggttacagtgagtacagtgagccgagatcacaccactgcactccagcctgggctacagagcaagactctgtctcaaacaaacaaacaaacaaaacaaacagacaagaaacaagttgaagttcccttcagaaataccctcctgcttcaagcctatagagggtaaaccaaatgaggtgctcgttaaaagaatttagtccttacatgaaaaataccatcaaatgtatgtagagtttcttttagtcctgcagaaatgcatacctgataccttgattatcacagagaaaaatgtttttggctactttaaaatgttccataattctgagcaggctggcagtcctaccttttcaccatcaaaaaccccccattatttttattatgtatttatttattttatgttttgaggcagggtctcgctctgttgcccaggctggagtgcagtggcacaaccatggctcactacagccttgaactccagggcctcatcctcccaactcagcctccctaatagctgggactacaggcatgcaccaccaagcccagctaattgttttgttttgttttgttttgttgtttgtttgttttagtgatggagtctcactatgctgcccaggccagtctcaaactcctggactcatgtgatcctcctgcctctgcctcccaaagtgttgtgattataggcatgagccaacactcctggccccttcattatttgtattttataaatctcattattgggaatattttatccaaaatagcattaactaagtagtcaatgatttttctatttgtatttatatgtatatttgattaattaaagtccccagtagataagggacaaccttgctaaattgataaaactccatccctgccgggcgcagtgactaattcctgtaatcccagcactttgggaggccaaggcgggtggatcacttgaggtcaggagttcgagaccatcctggccaacatggtaaaaccccatctctactaaaaatacaaaagtaagctgggcatggtggcaggtgcctgtaatcccagctactcagcaggctgaggaagaaaattgcttgaacccaggaggtggaggttgcagtgagctgagatcacaccactgcactccagcctgggtgacagagcaagactctgtctgtctcaaaaaaaagagagagagagagagagaatgcatctccttccttcttgaaatgcccagattgccgtggtcatatcattgatgagctaagtaatgggattcttgggcttataagtttacagtggctgaagcctccactgtatggggcagtttttgtgaaatcctctagtaccggaatggcaccatggaagtggaaggaatagagtggaatgtcattgagtcttcctcattcaaaaaaaagagcccctttgcagatatagctgtccatatccatgggttccagattcatggattcaaccaaccgtggatagaaaatattcagaaaaaaattccacagtttcaaaagttgaaacttgaattttccacgtgctgagtactatgttgaatcccccacaaacgaaatgatgtgcagcatcttatgtggttttataagtaatctatagatgatttttttttttacttctccttatggagcagagctaactcataggcagtacacctagagttggccataagtaatctagagattattttaaatatacagaagggtgtacctaggttatatgctaatactatgccattttacagaaaagacttgagcatcctgagattttggtatctgtgggggtctggtacaatcccccatggatatcgagggacaacagtattcacaaagaaaaaagtttaattacaccaacagcacatgtaattaagtctccaagactccatctccgatgaggtgaatttaaagaatgcgttattatgattttggtagttggtcagaatttcgtatctggatagctgagagccagacctactagcaagtagctttgtgttgaccatggacaagtggaactgtgnnnnnnnnnnnnnnnnnnnnnnnnnnnnnnnnnnnnnnnnnnnnnnnnnnnnnnnnnnnnnnnnnnnnnnnnnnnnnnnnnnnnnnnnnnnnnnnnnnnnnnnnnnnnnnnnnnnnnnnnnnnnnnnnnnnnnnnnnnnnnnnnnnnnnnnnnnnnnnnnnnnnnnnnnnnnnnnnnnnnnnnnnnnnnnnnnnnnnnnnnnnnnnnnnnnnnnnnnnnnnnnnnnnnnnnnnnnnnnnnnnnnnnnnnnnnnnnnnnnnnnnnnnnnnnnnnnnnnnnnnnnnnnnnnnnnnnnnnnnnnnnnnnnnnnnnnnnnnnnnnnnnnnnnnnnnnnnnnnnnnnnnnnnnnnnnnnnnnnnnnnnnnnnnnnnnnnnnnnnnnnnnnnnnnnnnnnnnnnnnnnnnnnnnnnnnnnnnnnnnnnnnnnnnnnnnnnnnnnnnnnnnnnnnnnnnnnnnnnnnnnnnnnnnnnnnnnnnnnnnnnnnnnnnnnnnnnnnnnnnnnnnnnnnnnnnnnnnnnnnnnnnnnnnnnnnnnnnnnnnnnnnnnnnnnnnnnnnnnnnnnnnnnnnnnnnnnnnnnnnnnnnnnnnnnnnnnnnnnnnnnnnnnnnnnnnnnnnnnnnnnnnnnnnnnnnnnnnnnnnnnnnnnnnnnnnnnnnnnnnnnnnnnnnnnnnnnnnnnnnnnnnnnnnnnnnnnnnnnnnnnnnnnnnnnnnnnnnnnnnnnnnnnnnnnnnnnnnnnnnntatttcctattggccgggcgcagtggctcacgcctgtaatcccagcactttgggaggccaaggcgggtggatcatctgaggttgggagttcaagaccagcctgtccaacatggagaaacactgtccctactaaaaatacaaaatgagccgggcatggtggcccatgcctgtaattccagctactcgcggaggctgaggcaggagaatcacttgaacctgggaggcggaggttgcagcgagtggagatcgcaccattgcactccagcctgggcaacaagagcgaaattccatctcaaaaaaaaaaaaacgtatttcctaccttggtggcttctatgggttcctgggaaggtgggatggtttttgcagttgtattttgctagaggtgacagtggggaggaagtgcatggarggtaaagctgggggtttttttgtttgtttgtttttgttttctttgagatggagttttgctcttgctacccaggctggagtgcagtggtgtgatgttagctcactgcaacctctacctcccgggttcaagcaattctcctgcctcagcctccctagtagctgggattacaggcacctgccaccaggcccggctaannnnnnnnnnnnnnnnnnnnnnnnnnnnnnnnnnnnnnnnnnnnnnnnnnnnnnnnnnnnnnnnnnnnnnnnnnnnnnnnnnnnnnnnnnnnnnnnnnnnnnnnnnnnnnnnnnnnnnnnnnnnnnnnnnnnnnnnnnnnnnnctaccataaaactcacccattataagtgtacaattaattcagggtctcttagttaggcttgcacataaaatacaggatatccagttaaatgtgaattccaggctgggcacagtggctcacacctgtaatcccagcactttgggaggcctaggcaggcagatcagttgaggtcaggagttcgagaccagcctggccaaagtggtgaaacccccgcccctactaaacatacaaaaattagctgggtttgtgttgcgtacctgtaattccaactacttgggagactgaggcaggacaatcgcttgaaccagggaggcggaagctgcagtgagctgagatcgcgcacctgtaattccaactacttgggagannnnnnnnnnnnnnnnnnnnnnnnnnnnnnnnnnnnnnnnnnnnnnnnnnnnnnnnnnnnnnnnnnnnnnnnnnnnnnnnnnnnnnnnnnnnnnnnnnnnnnnnnnnnnnnnnnnnnnnnnnnnnnnnnnnnnnnnnnnnnnnnnnnnnnnnnnnnnnnnnnnnnnnnnnnnnnnnnnnnnnnnnnnnnnnnnnnnnnnnnnnnnnnnnnnnnnnnnnnnnnnnnnnnnnnnnnnnnnnnnnnnnnnnnnnnnnnnnnnnnnnnnnnnnnnnnnnnnnnnnnnnnnnnnnnnnnnnnnnnnnnnnnnnnnnnnnnnnnnnnnnnnnnnnnnnnnnnnnnnnnnnnnnnnnnnnnnnnnnnnnnnnnnnnnnnnnnnnnnnnctggtctcgaactcccaacctcaggtgatccacctgcctcagcctcccgaagtgctgggattacaggcgtgagccactgcgcccagcccagcaaatactttcttagtgtaagtatatcccatgcaatatgcaaggatgtcccatctgagacatacttatattaaaaatagtatttattgcttatctgaaatttaaatgggcatcctgtatctttattgacgaaattcgggaaccctacaatttgtgaagacagagttgtacaagcatcaccacgatccagttgagcacattttcttcacccccaaaagttccctcttgcccaatggcagtcgtcctccgatccctctccaagtcccaggcaacctctggtcggcatcctgtctctatagatttggagaagactgtatttttaagtggagagacttggctgttacataactgtttagcacccgagtatttgcatgaagagtttcatttcattttttcaagtggaaccatggaggagagtggctgcccaaggtggggtttgtcttttgctgtctgagtggcccctgggatgcaggtatgtccattatttaaatctcttggtgtttacagaccacatgggtaacccctgttgtggcaaggctgagggcctcttcacctgtcactgagtgtggggactcttttcaggcctgggcagggcaggaagtctggaggggatatcaggtgatcagagggccattcgagaatgctgcaggctacagtgacaaaatgctggtcctgggctatctgagaccagtcctggaatgacttaactaaattaaatcttatgaatcaaggtgcctagcaccgtgcctgttgcctaaagtgtagctggaaaatagtctcccacgaatccagagtgacatttgctccatacccagttgggcctaagcctctagatctagagatatccatgaagaatggctcttgctttaagaacttaattctttagtgactaatgtttctagagcattaaccgcaggcaagcattttctaagagctttacatatgttaatgtccaatcctcacagacacactgtgaggcagatgctcgcattctctccatcttgcctatgaagaaatcaaggctcagagaagttaagcaaatcccctgaggtcacacagctagtctgggcctagaagagccttttctcctactattactctgtgttgcttcataatatggtgtaagttctgtgggagcccagaaagcaaggcatctgagctactgggaaggagggatgagacaagtaccctgaggagttagctgaccaaggaagcagggaacagcatttcaagcagaaggaacagcacatgcaagggttacaggcaagagaccgtggcctgcataaagagtggctgatgacgtttgggataaacgacttcccagaacatttcaaaaaaactcaaatgttttctttggggaaaatagtctgattttggcaagagaaagaatctcagaagagagccttgagaccttcaggagctattgttaacttggtgaattgtctctggtgcatctctctccctcacaaggcctgtttgttcttctgtgataaaagggctaatagcacctgtgctgtgggctcatttaatagaacacagtcgtgtgtagggcgtaatagaagagaatggaatggaataatgtaggtggcatgcatcgagagcttcgcatgtggtggccacccaggtgtggcacagccctgggccccgacgcatccgctcgggcacccatgccttactgacacattgaagaggagctgggaatttgttttccatctggcagagccccttccgtcttcctctacctgcggttctgggggctcagtctggagaggcgccaggcggctaactgactctggcattgggaatgcgtttgcagggagccaggggaagggagaagtcttactgccggctccctccaggctcccttcctcgtgatttatcactatggaaactgagctcctttcctcttcgcgctgccggctggtgggggtgcacattgttgatgccgttgccccacagatcagaagttccttcctctttcctgctgcagaaatgccacagtaacctacgtggcccaagaactgcagctcacacctgaagagcccagtcttgggaaaaacaatctcatcggattccccaggggttacgggggccttctgggtaagcagagccggcctgagaacaatgtcaggggagaacaatgcagccagcgggctgagctggtggccctgctgttcctcttccttcagcttccctagttgggggttaaaaatggatttacaggcagtcgcaagtatatcatgttaggcggcagaaaactgaaactcagagtctcttagtgtgggcaaagtctcccgcgacaacccacttgctgcaggtgcccagccctgcatatgcccacccatgacatatgcccacccactgcatttgcccactcactgcatatgcctacccatcacatatgcccacccactgcatatgcccacccactgcatatgcccacccactgcgtatgcccaccccctgcacatgcccacccactgcacatgcccacccactgtgtatgcccacccactgcgtatgcccacccactgcacatgcccatccactgcacatgcccatccactgcgtatgcccacccacagcatatgcccacccactgcacatgcccacccactgcacatgcccacccactgcatatgcccacccactgcacatgcccatccactgcatgtgcccactcactgcatatgcccactcatgacatatgcctgtccatttcatgtgcccacccatgacatatgcccacccatgacattcccacctagtgcgtgtgcctatccactgcatatacccaacccctgcatatgcccacccattgcatatgcttgcccattacacatgcctatccactgcatatacccatccactgcatatgcccacccaccgcatatacccactcactgcatatgcccatccactacatatacccactcactacatatacccactcactacgtatacccactcactacatatgcccacccactgcatatgtcctcccatcacatatgctcacccactgcacaggcctggtgagagctggctctgctggacttggtctggccctccgtaaccattccttagaggccagtgcctggattacagcaccctgggcatggcatcacatgtacctgtgccaggtcctagactcaaggacacagggcaaggggggattccagagacaacaaaggaagctccctggccaggaagtcctgagacactgccaggcccagcagtccccttgctggccacacagacaagacatggccaacctcagggcctcagggtccttctctgtaagttgacctaagggattcctctgtagcctcatcctatgggggatgggagagagggagctaagagcacctcctacttgcccatctctctcttaagagaggttcatctaagagtagctttctggggaaactggccttcaaacgacctgggagaaaaacatttcatttaggagctgaggcttgtcaatgcatctcacaatgatttgcagaaatcccctttacctccctgaatatacaagatcttttctaggtgcaaaatgttcctgtttgttttccgtttagaatttccccttattgggagcatattttctccctctcaccctcagagaaaatttccaggttccttccacattctaaagagcaatgtgaaaattcaaggttttctgttttgttttgttttgttttttttgagactaaatctcggtctattgcccaggctggagtgcagtggtgcaatctcrgctcactgcgacctccacctcccgggttcaagcgaattctcctgcctcagcctcctgagtagctgggcccacggmacgtgccaccacacctggctaatttttgtgtttttagtagagacagggtttcaccatgttggcaaggctggtctccaactcctgacctcaagtgatcctcctgcctcagcctccaaaagtgctgggattacaggtgtgagccatggcatccagccctattttttaaatagaaatatttttattgagataatagtacatttgcatgcatttgcagtaaataatacagagatatgtgccagtttcccctaatggtaacattttgcaaagctacagtacaccatcacaaccaagttttctgggttttgtttatttgtttgttttgtttttgagacagggtctcgctctgttgctcaggatggagtgccatggcccaatcatggctcacagtagcctccacctcccgactcaagcaatcctcccacctcagcctcccgagtagctgggaccacaagcatgtacccccatgcctggctaattaaaaaacaaaattcatgtagagatggggtgtctcactatgttgtccaggggggtctcgaactcctgggctcaagtgatcctcccgcctcagcttcccaaaatgctgggattacagtcaccagccatagcgctggctgcaactggtccatttttaaaaagctctaattaaagcacgtccttgacatttgggaggtattcatccacaagcccagatgtgttctcacattctgagtattaggaatgtttacacaggctcctgacgtggtcctaaatcacatgaatctcatttctgtctagaagcaccatttcctgtgcatattctcataccccaacttggctgcctttttgatttttacgtatctatttatttcaattgtgtttaatcaggtaatgaagctctaaagaaacaggaaacatggagacagtggtatagaacaaggtgaaggattacatccttgcataaccttggtgaatacatatgttacattcagtgtatttcaactgtttcagactttgatcccttccatctttgttctagaccaaagatttttctattgtggagtatttcaagaagtcctgaaatgtttttctttctgttttgtgtttttttttttttttgagacagagtctcactctgtcacccaggcttgtgtgcgatggcgtgatctcggctcacctctgcctcccgggttcaagcaattctcctgcttcagcctcccgagtagctgggattacaggcgtgcaccactatgctcagctaattttttgtatttttagtagagatggggtttcatcatgttagccaggctagtctcaaactcctgacctcagrcgatccacctgccttggcctctcaaagtgctgggattacaggtgtgagccaccgcaccgggccctgaaatgtttttcttccagaggccctgtgtgaggaattagggctcagggctgaaggcaggcagccagcatcaccacttcagctgtgggatcgtggacaagagtactaacctctctgagagtcttgtttctctcttgtaaaaagagggtaataacagtaactgactcataggattaaaggaaacgtgagaaatatgtaagcactcaataaatattagttattattatttaaataaaagctccatagcggagtcttataatttttaggagtaaaatcataactctcatgcaaatataatatgaacatgtgtcaaatattttatttaacttatcaattaatgagtgaaccagtgaaatgctataacttactcaaaggagaatcaaagaggatatgtatatatgattagattgattgaccaattgatcattagatatgcagatatctaccatcagggatgctaaaatgagttggcttaaaagatgtaaaactggttgggtgcggtggctcacggctataatcccagcactttgggaggctgaggcgggtggatcacctgaggtcgggagtttgagaccagcctgaccaacatgaagaaaccccgtctctaccaaaacatacaaaattagctgggcgtggtggtgcatgcctgtactcccagctactcgggaggctgaggcatgagaatcacttgaacccaggaggcggaggttgcagtgagccgagattgtgccattgcactccagcctggacaagagcgaaactccgcctcaaaacaaaagatgcaaaattgctcaatatcattaggggaattatcaactgcatcatccccactggtcacaacttgcatttctctggacaacctggaaaattataagatatctcaaagacaatgaaaggcacagaaacctcatagagtcagataagctggaagaatgtgctagattgcctctactttttgttgaagacacccaggaatgttttaggcctatttcaaaccctttcacaatttttcctgatgcttgttcatttgatatgaggtcaaaggacaatacttaacgtgacccatatccctatagagttttatgatattgaggcccgcagtggccttatgaggagcaatctacaggctggtgagctgaggcttggtagacttggctcacatgagttcagaagtccacaaacctcccccagggcagctcatcctccctttcttttttcttttcttttctttttttttttttgagatggagtctcgctctgtcacccaggctggagtgcagtggtgtgatcttggctcactgcaacctctgcctcctgggttcaagtgattctcctgcctcagcctccctagtagctgggattacaggtgcctgccaccatgcctggctaatttttgtaattttagtagagatggtgtttcatcatgttggaccaagctggtctcgaactcctgacctcaggtgatcctcccgcctcgtcctcccaaagtgctgggattacaggcgtgagccaccacaccccgccagctcctgctccctttcatggtgggtggtgcaaagcaggattgctcttggcccctcaaggccaaactaatgaaactgtgctacgtgcaactgatgcagggcaggtgaactccagaattggggcttagcctggcagggttcttggctttgcccaggaaagaattcaagggcaagctaggggagccggtggtgttagacagcaacttttattgaagcggcagtgcacagcagcagcagacagactgctccttgtggagcagggctaccctataggcagtgtgcccagagcaccagctcagggcagttctgcatcatatgtgtgcccatctagttatatgcaaattaagggccagactatacagaaatttctagaaaaagggtggtaacttctgggttgtcaggtcattgccatggaaaggggtggtaacttccggtgttgtcatggtaacggtaaactgacacggcacactggtgggcgtgtcttatggaaagctgctttctctcagtccctgtttagctagtcttcaatttggtccagtgtccaagccctacctttggagttgagttccgccgcctacctcagaacatttgtagagccatttaaaaaggaaaactctctaatgtgaccctttgtagatccactttatgtctgataaggaaaggttggaattctttctgctgtgtaggcacaggttcagggccacacagcccttcccttctttgaacaccggattagtgcatcagggagccccggcgtggtggattcaggctcaaacactggaaacagtccagcaaaaccttgacctatagagagtgaagggcacagggccaggggaggggagctctttgcggacacagagtgacttctttctctaacctgccttttgggtttccttggcttttccttcctcctcctctcggatgaacttgtgagaatgaaggtgcatgtctgtggcccatgctgggtcctccaggcatggtgggctctgggagggccatggctgaggagcccaaggaagccaggcccgttgctttctcacctgaggattcgtctcagaaccatgacacagtcaaatgagaacagaaaccccactctaaggccgggggcagtggctcaggcctgtaatcccagcacttttttgggaggccaaggtgggtggatcacttgaggtcaggagttcgannnnnnnnnnnnnnnnnnnnnnnnnnnnnnnnnnnnnnnnnnnnnnnnnnnnnnnnnnnnnnnnnnnnnnnnnnnnnnnnnnnnnnnnnnnnnnnnnnnnnnnnnnnnnnnatctcaaaaaaaaaaaaaaaaagaaaaaagaaaagaaagaaatcccacttcaaatctctactagaggttgcttgaaggttgctggaagggagatgtgagagcagacttacaccactctgcacagagaaaaacccatgaaaaacttgtgtctccctcagagtcatggtagtggccccagcgtccctgacacccctcccaaagtcaaccagtcagtctctccctgtttccctcacccccagatcagctcctttctgcctcatcctgggccttcatccttctgttgtccccagacgaccccaccgcccctggggatagactaggctgcattttgcttttctttctgtttttggggtccctgtcattctaaagtttgtccagccaatctgcttaggtttccacagtgggaacacagacacctttttttttttgagacggagtctccctccgtcacccaggctggagtgcagtggtgcaatcttggctcactgcaacctccgcctcctgggttcaagtgattcagcctcttgaatagctgcgactacaggcttgtgccaccacgcacggctaatttttgtatttttagtagacatggggtttcaccatgttggtcaggctggtctcgaactcctgatctcaagtgatccggccacctcagcctcccaaagtgttgggattacaggtgtgagccaccgtgcccggccagatgctgtttttttatgttgtctgggcagtcatttgtgcgctccatgaacagttgcatggtcctttttagcatcagactagagctatgattcccagcccacagtgacagaggccacctagccacctttgcaatggcaaccacattgacgatgacagtcttccttccttttcctttgtcttcagctgtggcaatcagcgggacactgctctgacccctggcattggttttgacaaatacttggctccttgttagctttattaataagatgaagagatatttgacagctacattctccccctaaaagaagaaggagtggcccacatggcttctggagttcttgggaactgacacaaaacttgcctcttggtggaggctgggtttgcctcaggtgggcccagaggagactccgcagctttaggaatcacctccctctctctcagctggctttttcttttttctttttttgacagagtctcgctctgtggcccaggctggagtgtggtggtgcaatctcggctcgctgcaacttccgcctcccaggtttactcgattctcttgcctcagccctctgagtagctgaaactacaggcgcatgccaccacgcctggctaatttttgtatttttagtatagacggggtttcaccatgttggccaagttggtctcaaactcctgacctcaagtgatccacctgcttcagcctcccaaagtgctgggattacaggcatgagccactgcgcctgacctttttgtatttttttaatagagacagggtttcgccatgttgcccaggctagtctcaaacccctggcctcaggtgatccgcctgctgtggcctcccaaagtgctgggattacagacatgagccaccatgcccagtctcatctggccttttaaaannnnnnnnnnnnnnnnnnnnnnnnnnnnnnnnnnnnnnnnnnnnnnnnnnnnnnnnnnnnnnnnnnnnnnnnnnnnnnnnnnnnnnnnnnnnnnnnnnnnnnnnnnnnnnnnnnnnnnnnnnnnnnnnnnnnnnnnnnnnnnnnnnnnnnnnnnnnnnnnnnnnnnnnnnnnnnnnnnnnnnnnnnnnnnnnnnntctttcatataaaacaatgcaattatttaggctgtgcaggatcggggtgtcaggtacttttcaggtctgaggtgaggccgtgggcagggcagcttctacccacctcatctcaactctcccttttcttgctcagtgtcacatrtaggaccagttacataatttgtgggtctagtgcaaatgaaaattcaaaattatcaggaatttcaaggtggcgacagcaaggcatcaaaccaagcatggcagcttctgagcacagggcccctgtgacggcacgggtcacacatctatgaagctggctctggtctcatgactcatgtgtgtcaggtcagggactgggtctgagccttctgcccagaaaggtgctgtaaaaggtcagtcacagaagccttgtagcaagccaggcagacacaggcaggcagatgtggtgctgggaacttggttgatgtttcacctcctggccctcagctccccatctgtaatatgggtcatgatacccctgtggtaggctgctgatgacccccaaggatatcaggccctgacccctggaacctgtgaatgttgccctatatggtgtcttagtttgtttggactgggtgccttagaaacaacaaaaatgggccgggcgcggtggctcacgcctgtaatcccagcactttgggaggctgaggcaggtggatcacctgaggttgggagttcaagatcagcttgaccaacacagagaaaccccatctctactaaaaacacaaaattagccaggcatggtggctcatgcctgtaatcccagttactcagctggctgaggcaggagaatcgcttgaacccgggaggcggaggtttcaatgagctgaaattgtgccaytgcactccagcctgggcaacaagaatgagactccatctcaaaaaaaaaaaaaaaaaagaaacaacaaaaatgtatttctcacagttctggagtttgggaagtccagcatcaaagctccagcagctccagtgtctggtgaggcctacttcctcatttatagatggctgtctctctgctgtgtcctcacatgatggaaaggactagggaattcttttcttgccttttttttttttttttctgttttgagaaggagtcttgccctgtcacccgggctggagtgcagtggcgcggtctcggctgaccacaacctttgcctcctgggttcaagtgattctcgtgcctcagcctcccaagtaactgaggctacaggcgcgccaccatgccagctaatttttgtatttttagtagagataggattttgctacgttgtccaggctggtctcaaactcgtggcctcacgtcgatctgcccaccttggccacccaaagtgctgggattacaggcgtgagccaccgcaccgggcctagggatttttttatggtccctttcataagggcaccagtcccattcatgaggcctccaccctcatgacataaccacctccaaaggctccacctgcaagtactatcacactggggagttggttccaacatgtgaattgtcgcggggatgcaaacattcagtttgtaacatgtgggagaatgggatttgcagatgtgattaagttaacagttttgagttggggagattatctggatgggctccaaatgcaatcacaagtgactttaccagagaggcagagggaggcggggcacattggtttatgcctataatcccagcactttgagaggcccaggcaggagaatcccttgagctcaaaagttcaaggccaacctgggaaacatagcgagacctcatctttacaaataattaaaaaattatctaggcatggtggtgtgtgcctgtggtcccagctactcaggaggctgaggtgagagaatcactggtggtcaaggctgcagtgagtcgtgattgaaccactgcactccagccttggaaacagggtgagaccccatctcaaataaataaataaataataaataagggagattagacacacagaagagaggtgatgtgaagattgagcagagatttgaagatgctggccttgaagactggagtgatgcacccacagaccaaggaatgccagcagccaccaatctgctcctgtaagaggccaggaacagattctcctcccgcagagcctctgcagggagtgtagccctgctggcagcttgattttggtccattcatacttattctagatccagaatggggaaagaataagtttctgttgttttaagccaggaagtgtgtgggtatttgtcactgtagccacaggaaatgaaaacataccctctaaaatttttaaaataacagattcattgagatatagttcacatgccataccatttacctatttaaagcgtgcaattcaatggtgtttcatatattcagagttgtgcaaccatcaccccaatcaattttagaacattttcattatcycaaaaagaaacctgtattctttagctatcttgcctaatcccccagccctagccaaccaaactactttccatctccatggatttgcgtattctggacattgcatagaaatggaattatataatatgtggcctttcatgtgtagcttcttccacttagcatgtttttaaagttcatctatagtgtagcatgtatcagtatttcgttccttttgttgttgttgtttagagacagagtctcatgctatgacctgggccagagtgcagcggtgcaatcctagctcactgtagcctcaaagtcctgagctcaaacaagcctcccatctcagcctccagagtrgctgggactaccggggcacaccaccacaccaggctaatttttaaaaattttttgagagaagttggtgggaggtgaaaaaaaaaattttttttttttggtagagccagggtctggctatgttgcccaggctagtctcaaactcctggctttaagcgattctccagcctcgggctcccaaagtgctgggattaccggtgtgagccaccatgccctgcccagtactttattctttttattgccaaataatattccattatatggctataacacattttgtttgctcattcatcagttgatgaacatttgtgttgtttctatattttggctattgtgaatactgcttctataaacatttgtgattttttttttttttgagacggagtcttgctctgttgccccaggctggagtgcagtggcgcgatctcggcttactgcaagctctgcctcccgggttcacaccattcttctgcctcagcctcccgagtagctgggactacaggtgcccaccaccacgcctggctaatttttttgtatttttagtagagacaggatttcaccgtgttagccaggatgacctcgatctcctcacctcatgatccacccgcctcggcctcccaaagtgctaggattacaggcgtgagccaccgtgcccagccctataaacatttgtgtgcatgtttttgtgtggacgtgttttcagctctcttgactatatccccaagggttgaattgctgctggatcacatggtaactctatttttaattttggggaaccaccaactgttttcaaagtggctgtatcattttacaatgccatagtagcatatgggcattcctgtttctctacatcctcatcaatatttgttgtctgtctttttggttatagttatcctagtgggtatgaagtggtatctcattgtagttttgatttgcaattccctaatgactaatgatgttgagcatcttttcatgtgcttggggtcattttttttttttatcttcttaggagaaataatctgctcaaatccttttttttttttttttttttttaagatggagtctcattcactctattgcccaggctggannnnnnnnnnnnnnnnnnnntctcattcactctattgcccaggctgggagtgcagtgacatgatctcagctcactgcaacctctgcctcctggggaacaagcgattctcctgcctcagcctcctgagctcctgagtatctgggattataggcatgtgccaccgcccggctaattttttgcatttttagctgagatggggtttcaccatattggcccagggctggtcttggaactcctgaccttgagtgatcctcctgcctcaggctccccaagtgctgggattacaggcgtgagccaccacgccctgcccctttgccaattctttaaaatggttgtgtttttgttgttgagttgtaacagttctttatatattcaagatcctagacccttatcagatatattatttccaaatattttctcccattctgtgaattacctttcactttcctaatgctatcctttgcaataaaaacatttttaattttaatacagtctagtttatctgtttttgttattttgttgcttgtgcttttgtggttttgagaacagaatgcacaaacacctgttttggcttcagtgcctgggacatggtggtgctcttcccaggccagcggccaggccactcagggtggaagacagtaggtcccttaaccccttgggctgttgtgtgcctgatctgttgtcaggcccttcttcattaggtttagaagatacagtcatcagaagaataaaaccactgtctaggtaaaagaaatttttaaatatataatatgaatatcttcttatttataccagtacagtttcaaaatgtaatttttttttttttgtggaggaagaggtctacaaaggcaaaaatgcctatggttatgagtcataatacaaccatgtcagccaggtgcggtggctcatgcctataatcccagcactttgggaggccgaggcgtgcaaatcgcttgagctcaggagttcaagaccagcctgggcaatgtgacgagaccccatctctacaaaaattaccaaaattagccggatgtggtggtgcatgcctacagtcccagctactcgagaggctgaggtgggaggatggcttgaacctgagaggcggaggttgcagtgagctgtgatcacaccgctgcactccagcatgtgcaacagaacaagaacctgtctcaaaaaaaaccccaaaaaatcccaaaaacaaaacaaccatgtcccttgtaactggagggggcctcctgcaggggatggaatagcacagactcctccacaatgtccctgcctgcctcccttttgcccagctgcccaactttgtgaggggccagaccggggtggtgagggcagcatatggtgggtgtggaagaaaaggcactgagcgctgccccttgggttcactaagtcagctgagctccagagcagcgattcagatgtggcaggcccagccaaaccagatcaacaactgttgttattattgttcaatcataactattgttttttttaaactttttaattaattattattactttttgagacaaggtcttgccctgttgcccaggttagagtacagtggtgtgatcgtggctcactgcagcctcaaactcctgggcttaagcrttgctcccacctcagcttcacgagtagttgggaccacaggcatgcaccaccgtatgcagctattttttatatttttttgttgttactatgttcttactgtgctctgctggttaaatgtgctttcaaaggctagctcttgtttgatcttcctaacaagcctattcaatgggtagatgggcacattattcccattatataggtgaggaacatgagcctcagagcatttaagctattaagctgcagagaacagacagggaacccaggcttctgatttacgcattagtgcacgttcactcccaggctggggtgtgtcccaaacccagtggatgggggctgttgagtctggctcatcaactctccaagactaatgagatctgaggctacaggtgggggaaatggaacggccggtgaatctcatttccaatcaccattgtcatgaaataggtggttggcctgctgtgccctccgacatgtctgttgcccacctgcctccgccttcctccccccactccacctccagttgctcagaaaaaccacttcctgaagtttattccagcagacagctttttctgtgcagttaacgagtcgctatgtttcggatctgcgttacttccccggtatttgaaggcaggagcactgcaggtaggaataactgtgtgtctgtcctccttcaattctgcttggctgagaagaagcgaacaacaccatgggagaaacagggtcctgggtgagtttgttaagcctggtgggaactcctggggtcccttggttatgtaggagtcagtctcttgatcagttaccaagaagccaaagccgtgtgggaacctttgcctcaacccaatcaaggaatccaccaaggtcaaggggaagaagtgaggagaaaggagaggcccacaaacgaataaaaacccattcaatttactatattgaaaaaggccaggccaggcatagtggctcatgcctataatcccagcactttgggaggctgaggctggaggatcttctgagacaagaagctggattccagcctgggcaagaccctgtctctacaaaaagtaaaaaattagctgtgcgtggtggtgcacacctgtagtcccagctacttgggaggctgaggtgggaggattgcttgagctcaggagtttgaggctgccgtgagccatgattgtgccactgcactccagcctaggagacagagtgagaccctgtctcaaaaaaaagatgttggctgggtgcggtggttcatgcctgtaatctcagcactttgggaggttgaggtgggcggattgcttatggtcaggagtttgagaccagcctggccaacatggtgacatcccatctctactaaaaatacaaaaattagctgggcatggtggtgcacacctgtgatcccagctactcgggaggctgaggcaggagagttgcttgaacccaggaggcagaggttgcagcaagccaagattgcggcactgcactccagcctgggccacagagcaagaccctgtctcaaaaaaaaaaaaaaaaaaaaaaaaggccaggcgcggtggctcacgcctgtaatcccagcactttgggaggccgaggcgggcggatcacgaggtcaggagatcgagaccatcctggctaacacggtgaaaccctgtctctactaaaaatacaaaaaataagccaggcgtggtggcaggtgcctgtaatcccagctactccagaggctgaggcagagaattgcttgaacctgggaggtggaggttgcagtgagccgagattgtgccactgtgctccagcctgggcaacagagagagactctgtctcaaaaaaaaaaaaaaaaagaaaaagaaaaaagacacaccaaagataatgataataataataaaaggtacatactgtatgaatctttacaaaattccagaacatggaaactaatcagaaagcagatcaatctttgcagtggggagggtgcagagggcaagggagacgaggggcataggaaccttttgggggtggtggatgtgtctgcttccttgattgtggaggttgtttcatcagtatacacatgtcaacacttttctgagtgtatactttaaacacagcttattttatgtcaattatataatacttcataaagctgaacagaaattcaatttcttaattaaaattttaaaggtaatactgccgggcacggtggctcccgcctgtaatcccagcagtttgggagaccaaggtgggtgggtggatcacccgaggtcaggagttcaagaccagtctggccaacacggtgaaaccccatctctactaaaaatacgaaaattagctgggcatggtggcacatgcctgtagtcccagctactcaggaggctgaggcaggagaatcacttgaaccctggaggtggaggttgcagtgagctgagatagtgccactgcacaacagcctgggcaacagcgcaagactccatctcaaaaaaaaaaagaaaaaagtgaaagggtaatacagtcacatgatttaaataacaaaagtacagaaagctttacaaagaaaagtccccaactgctcagtttctgccacccacccctctgccacagataataagaatcctttgcatccttactgactttctacaagttaatgtttaccctcccctactgattgtaaagtattctagtctactgtaaatagcaagtcaaacaaacgttaataaccttagagtgtgaggtaaaccctggacaggcatgcagtactcatttttgcctatttccaatttcagatactttttcttacattatggaaactatctgttcatattctttgcccatttttctattggattgttggtcttttctttttcttcttctcttttattttctttcttttaatcaggcagcctcccaagccagagtagcttagacagactcccgaactttttcttcttaatttatgagtgttcttcacacactagggaagttagctctttgtccgtgatgtgagttgcaaacattttttccagttagtagtttttctcttgactaattttttttttttttttttttggcaaaacagaacttttttttcataaagtacaatttatcaatcaattttatggcttctggattttaagttttagttaaaccagcctctgccattcaaggttgtaaggacttcttttcttcttttgtattttcttctagaactttttttttttttttttttttgcgagacagagtcttgctctgttgcccaggctgaagtgcagtggcatgatcttggctcattgcaacctctgcctcccaggttcaagtgattctcctgcctcagcttcccaagtagctgggactacaggcatgtgccaccacgcctagctaatttttgtattttttagtagagacagggtttcactatatgtgggccaggctggccttgaacccctgacctcaggtgatctgcccacctcggcctcccaaagtgctgggattacaagcatgagccactgtgcctggccccttctaggactcttatgggtttatttgtacattcatatcactggtccatttggaatgtattctggtacacagtgtgaattatgggatacaatttttcaattttctaaaaaaaacatttatttttgaaataaagctttattttatcatggtatcctgaaaatattagaatcatttatgaagcaattgccacattttagaaatttactttggaacttgagggcacggggtctggggtcttggcatttatcactatcatttgaattgttgctctgcaaaaggtgcttactctgcagtgtctaaaaattaccattgaagccaaaatttattttattaatcatggtgtttccttttctgttcccacatcaaaatttggtagatgggtgagggtaatttccagtaggttgccaaagaagatagcttatagtggggaatggcgagcacaaaacaacagcaaataacgcaatggaaaacattcctttagaaataaatgggtaaagtgtgtattgctgttcaaggctcttatcaaaacttccactgaaccataggtcagagagaggaattgttttctagctggaagccattacttcttggttcttgccctgaggtagaggaatctggttttgactgtggccagtttgtatctgtcttagctttaccatggggaagtcctagagggtggcatttcagaaacaatatggcaccctcaaggcagtgatcatctgattcagacaatacagtagtttgtcttcatccatctagacaatcatccattgcactaatgctttttcatcatctactaggttccagacactgtccctgtcatcaaggagattgcagtccatttgggggaggacaggccattatgacacatcctataataaaagtgtctggctgggcgcggtggctcacgcctgtaatcccagcactttgggaggctgaggtgggtggatcacaaggtcaggaggtcgagaccatcctggctaacacggtgaaacccgtctctactaaaaatacaaaaaattagccgggtgtggtggggggcgcctgtagtcccagctacttgggaggctgaggcaggagaatggcgtgaacccgggaggcagagcttgcagtgagccaggattgcgccactgcactccagcctgggcgacagagcgagactccatctcaaaaaaaaataaaagggtccgacagctgggcccggtggctcacacctgtaatcccagcactttgggaggccaaggtgggcgatcacctgaggtcaggagttcaagaccagcctggctaacatggtgaaaccccgtctctactaaaaatacaaaaattatccgggcatggtgacgcatgcctgtaattctagctacttgggaggctgaggtaggagaattgcctgaacccgtgaggtggaggttgcagtgagccaagatcacgccaccgcactctagcctgggcgacagagcaagactctgtctcaaaaaaaaaaaaagtatccgacagagggaaaaccagggaggtaagrgggttgcagaggaagggcagctcagtctggggaagacgaggaaaaattctggagaaatggattcctgaactgagttaggaaggatgggtaggaatttgcttggaaagaagtggggaaggcattccaagtaggggagcagccccgacaaaggcacagacagatgaagagtgctaggaactagaaattctagcagccataatgtaggtgcaaggaaggaagtggtgagagactaggcttgaaaggtaagcaaaggctgtattatggcaggctgtaaattgactttttctggtctcaaacagaggagtgaaaggaaatgatgtatatcttttttttttttgagacagtgtttcactcttgtcccccaggttggagtgcaatggcgtgatctcagctcactgcaacctccacctcccaggttcaagcgattctcctacctcagtctcctgagtacctgggattacaggcatgcgccaccacacccgattaatttttgtatttttagtaaggacggagtttctccatgttggtcaggctggtctcgaactcctgacctcaggtgatccgccygcctcggcctcccaaagtgctaggattacaggcatgagccaccacgcccagcagaaatgatgtatatcttaggaagctcccgcatagtggcccagtagagtacgcatttgtttaggggtgcatgctggggaggggcctctcatagggctgcgtatgtcacccacaccaaaagctgaggagagcttcctagttctgttaccagatggtgccgcgcagctccaggctgttggtgccatgaacaaagaattggacatgacacacgtacaaatagcgaagcagcaaatgattaagcacagcgacactctcggagaggggtgagtgggctgacctgtgagtggttatcagtgccggtttgttacatttcacggccttttacatgtttttcctcacttgcttaatgtcacttgcctttctcttatagtgccttcaccctactttatttcttgtaagatagttgttcaaccttgtttacccccactttacctcttctgaccaaattgcccatctttacttttattttttgcgaccaaatagctactggaagtccttccaacttacttctcttaccatgtcccaacttactgcttactcccttatctattatattactttttgtggcaatatttgattgatgttttaaattacagactataaagaaacaccataaaatattaagacagtctgagagattttgatgtgttattaatatccacatggtttgcttcttttccaaagcatcccataacgtttgactctatgactgtaacaagttagatttttagaaactgatgcaaaggatcagattctagtagtttctttctctttttttttttttttgagatggagtttcacttctgtcgcctaggctagagtgcagtggtgccatctcggctcactgcaacctccgccttctgagttcttctgcctcagcctcctaagtagctgggattacaggtgccggccttcatgcccggctaaggctaatttttgtatttttagtagagacgggtttctccctgttggccaggttggtcttcaactcctgacctcaagtcatcctcccgccttggcctcccaaagtgctgggattacaggcatgagccatcgcgctctgccagattctagtattttctaccatcaaaatatctattacccaatgaaaagtctaaaggccaatcttttttttttttttgagacaaagtcttgctctgtcaccccaggctggagtgcagtggttcgatctcggctcactgcaacctccgcctcccgggttcaagcgattctcctgcctcagcctcttgggtagctgggattataggcgtgtgccaccgtgcctggctaatttttgtatttttattggagacagggtttcaccatgttggccaggctggtctgaaactcctgacctcaggcaatcctcctacctcagcctctcaaagtgctgggattaccggcatgagccacgactcccggccccaaaggtcaatcttaaagctacaaggtatcttttaaaaggagtaggaataacgtattttgaggcttaaaggagtaggaatagtgtatttttagatttgaagccatcttctaaagggtacgatatttggttaacatgtcactccttatcgccatggaagaagttaattctattcttttttttttttttttgagatggagtctcactctgttgcccaggctggagtacaatggtgtgatctcagctcactgcaacctctgcctcctgggttcaagcaattctcctgcctcagcctcctgagtagctgggattacaggggttctccaccatgcctgtctaatttttgtatttttttttttagtagaggtggagtttcaccatgttggtcaggctggtctcaaacccctaacctcatgatccgcccgccttggcctcccaaagtgctgggattacaggcgtgagccaccatgcccagccgttaattctattcttactgcttactcccttattttgtatgttcttcttctatcttacatcttttgcttttgctattgcttaagctagcctacgcccaagggtgctctttgccccctacttcctctgctattctctcgcctcagttccgctgcattccaagctcagcctgccccagcagcaggtctctttgacaaacctgcaattttggggaaaagtcagcccaagaaaggcagggggcccagacttatgctgtgtggcaaaagccctctttgatgggggaaggggaggactggaaaagcagagagatctttctggatgtcctgggagagcagccctttgggtggtgggtggaggctggaggcagggaggaatcccctcacagtgccatgagaagggcccccaaacccaggcgagacagagggagggtcaagaacgccaaggcaaatgtcacttgtgccttgttttttccctaaagaaactaaacaaagcggccgcgttcggtggcccctcaggaaggccggtcatttcctgaggagatatcaggccagcccaggccccattgttcccggtttccagccatggctgccattacctgaccagcgccacagccggtctctctgcaggcgccgggagaagtgaccagagcaatttctgcttttcacagggcgggtttctcaacggtgacttgtgggcagtgccttctgctgagcgagtcatggcccgaaggcagaactaactgtgcctgcagtcttcactctcaggatgcagccgaggtgggcccaaggggccacgatgtggcttggagtcctgctgacccttctgctctgtgagtgtttactctgtttccacatcactttaactccatgagcatcgaagcttctggaatcaacatgtttcttatgtttcttgcaggttcaagccttgagggtcaagaaaactgtaagtctgatgtttccactgtaacagatgtttctacctggcttcctcctttctcttctgtgatgcctaaaacgcacattaaattgctggggtttgatacttctaacaattaaggaaaagaatccaattgagaactaaagtttatcccatgtgggcatttttagaaaggcttagatctaagccaagttctggtcagtgtgttttagaagtagcacacgtttccttggctggtctgaaagtagtgggttatcttgatgaattgtttagtcagttacagatcaaactccatgttcttttctctgttctcacgactactcttgactagtctaaaaatatattaggttgttgmaaagtaattgtggtttttgccattacttttttaaaagatggcaaaaaacacaattataagtagcacacattttcttttttttttccttttttttttgagacagagtctctgttacccaggctggagtgcagtggtgcaatcccggctctctgcaaactccgcctcctgggttcaagggattctcctgtctcagcctcctaagtagctggaattagaggcgcatgccaccaggcccggctaatttttgtatttttagtagagacagggtttcaccatgttggccaggctggtctcaaactcctgacctcaggtgatccgctggcctccacctcccaaagtgctgggattacaggtgtgagccaccrygcccggcctcacattttctagatttcagtgcattgctgttttttgggatggggargtgatttttttattttaatgagcaattccataattagttttttgttgttttaccataatggcttatttgaatattgtaacctatccccaactgtttttatttgcaaatgagatataattgatttgttagacatatgaagacagatcctagtttaaattgttgctactttttttactcctaaatgataaaaatcacacactggagctcattttccattcacctgtgaggctacaagtrtatctgtaatattttgtgcttgtacaaagggaagtggggtgctgcctatctttgaagcctggtttatcttccactttacagctaattttgaacctttgtcttgagatgagagggttttgttctgcttcttctgggaccacatgaatgagggggctcagtagtgtcccggggctgtgaatagagggagagcccacagaacactatttccttgtcagaagtcactgcaatcagcaaagaatggaggtgactgggttgcaggcaaattgcacagctctttggaggtgaagtccatgggcaaggctagctggtgagtcaagcctcggagcagtggccccaggctggggagggctagttggccactggcaaagcccctctgccaggcttctctgctcaactgtaggtgcttccttgggcatttgatccccatggcaacccacggaggcaggatatccataatcttcataattatcctgctggactgatggtgtcaccaagcctcagaaataaccgattttaccagccgygttggctcacacctgtaatcccagcactttgggaggccaaggtggtcgaatcacttgaagccaggagttcaaaaccagcctggccaaaacagtgaaaccccgtctctactaaaaatacaaaaaattagctggacatggtggcacatgcctgtaatcccagctactcgggaggcaggggcatgagaattgcttgaacccgggaggcagaggttcggtgagccaggattgcgccactgcactccagcctgggcaacggagcaggactttgtctcagaaaaaaagaaagaaagaaagaaagaaccgatttgtccacgagagaggcagttggctgggcactgggactggaacttccactctctgaagctgcaccatttgtctggagccataggcctgactcaagtcttttagaccagttttacttaagctctttgatttgttttcccaatctgtaacatggggatgataagagaacttcgtgggcatgaagtgggtgtgaggttgagactggataaaaggaggtgattaattggcccccgcctcgaggtgattgataaatgacaatggtgtttactacacggtcctagcccccctttacgactgtgactcctgccctacccactctccctttgtccactccagccctcgtaccctcccagaccacaccctttgggccagaccctgccctgcagacactcacgctttggggtccctctttttcttacccacaacatcctgtttcccaaaaccgtggtgctctcccctctccccctccacaccacatggaagtcaattgctccctcctttgggttcctagagaatgaatgttctttgtaccttcagggaagacgttggaactgcagcacatggcacagggagcgactctcccactgcctcctcaggcctctgccttgttttacactcaaggaaacagacccaggggccacaaggcaccaagcaagcagggtcaacactgggggtgggcagggcggcggctggaaccaggtctccattccttaggccccctaggccagcatttgcagtgcgtggcctgcaggcttgctctgagtctcccgctctgcggctggggtcctgggacagcctcggccctttcccttccttccatctcaggcctctttgttcccctccagcccgcacctcactgcagctgcctcacctcaggaggtgacggctgctccrtcttcacctagaaaacagtcatctggagggaactccctcaacttcccgcctgggcctggctgcaggcttatcagcctctccacccatcctctcggtttccctcccggcctcggaggacacatgcaccctgctcctcagctgatgggggccagccaggcacttaggctgagacccttcctcacccccaggaccccacgcctacgtgcattcaagtccctctcccctaccaccacttctagaatctctatttctgcttctggctctgttctctcagtgaatgggaactcttttttttaggaaaaagaaaaatcacaagcagacacccacccccaccgtttatctggtgtccccctatctggcctttctagtttcctttctcagtcgaacctctctgaaagttagtttataatctgtgcctacccccctcacctctcagacacgcctcgcctcccagcagcctggcctcaggccccacttctccggctgttgggtctcctcttgctgaggggtcaccaaggaccacctgatgccaaatgcaacggacacttccagccctcggctccctgtacccctttcctgcctttgacttttgatcgtgccccaaagcctcgctccttgaccttttccatcctcttccctgctttgtctcctcactctctaacaaaccctcttccttctcccccatggctgactttggacttactttgtcttctcctggagtctgaaccctgtcctggtctctgcgggctcctggtcttatcctccctggagaccagctcccctctcaacacctccacattcccccctcctcccctaagttcacactcctcccaccttcacagtccagccctggcctctgccctgagcctccagttaacacaggctgacctttgatgtctcctcccagtcctcctactggcccctcacacgcagctgcaccaccatcactttgtcttccttccttatctttttctgtttgtttgtttgtttttgtagagactggggtctcattttgttgcccaggctggtctcaaactcctgggctgaagccatcctcctgcctcggcctccgaaagtgctgggataacagatatgagccaccacacacagctgcgtgtggcattttctattttagtttggtggcacacacatcctcctgggaatctaatccaggaagtttatcttccattctttcaaccccatatccaatcaaacaaagtctttttttaaattgtggtaaaatacaaataatataacatttattattaatgacatttagtacattcacggtgttgtgcaaccatcaccattgtctaattctagaacattttctttctttttctttttttttttttttttgacagagtctcactcttgttgcccaggctggagtgcagtggttggatctcagctcactgcaaccttcacctcccagattcaagcaattctcctgcctcaccctcctgagtagctgcaattacaggcacgaaccaccatgcccggctaatttttgtatttttagtagagacaaggttttgccatgttggccaggctattctcaaactcctgaccttaagtgatccacctgtcttggcctcccgaagtgctgggattcattctagaacattttcaacaccccagaaacaagtcctgttgagtccactcaggagatccccagcctatccttccctcatccccactgcacccgcctagctcaggcctcatcagctttcacctgaaccacttccaagctgtttactggccttgggtgctgtcacacccctcctgacaccctcaggacagggcccagcttgtcagcacagcaggccagccctccattctggcacgacagacccagccacctggcctctctagccccacactctggtttctgtaatgggccatgcccagaaggcacggatttctcacaccctcgtgtcctgggacacgctgttctcttacctggagcaccccactgcctgtccttggcctggcaggctcagttcagtggtcacttccttcagactccttgacctctcctgggcagcccttcctcttggtgcttactgatatcactggagtccagctatgtgggccccagcaacctttgctgtttgggacagcaaggatgatttcttacttactctgtcagcccagcacctggcacaggttctcgacacatgtctcatggatgggaacttgaactgaacttggagatgcttgagattcgggtaggaagatggctcagcatgctctctgatgagcacagaagttcatcagggactctatgcttcgtggctcccagtaattttcctgacgagggtgggcagcccctccttctcctgcaccctccactttctctctgagtcatttccaggttgagggccagggggctggctgactcatggtgccgcatgtttccagggagcaccaccatccactgatgagtggccttgaggtcaaggtcccactgtttttagcatgttggggtttggcactgtggtcactggctgttccgtggtgactttccaaatttagatccttctccgtcaaccttcatctccccgggttgaaaagatctgacctctttaggctgtcccacagccccacccttcatcacaatagtcctgaaactttttgggttcagtaaggaaatctgtgggccttctctccagaaaaagcacacatttgcacacaattggaggtagttgatgagcctcctaacacccacccatgcacctcccaggggctgtgtmccccaggttgtgaacagtcactctgtgtaaatagtgagacctacaggcagtaattcagtttggctgtgcttggctggtttatttagaaagaygataatgttttccatattatcaaaacaagaatcaggcagagacttttgaagtttggttgcgtggtatatttgttacctattgctgcwtaacaatttacctaaaacttactggcttaagataacacagatttattatcctgaagtttctgagggtcaggaatgcaggagtggctgagttgggtggtgctggcaccgggtctcattagattgcagataaattgttggtcagggttgcggttatctgaaggcttgactgagtctggggaatctgcttccaagctcactcctgtggctatgggctggaggccttagttcctcatcctgggtaccttccacagggctgcttatgctatgactgctggcattccccagaatgagggatcccagacaggagagagagtgatcaggataaaagctgcattgtcttttattacctgatggagtattttgttggttaatgttaaygtgggaggtgaccacgtgtaagtgtgatgagcagagggcaaggaycattgrggggggcatcttgaagggcttctatagcaagggaggtggtggtggttgtgscggtaaaaactaggtcactgtttttgttgttttgtcgatgatatttgtgttaagatgaagagctgagactcatatctcaacagagtttataaaatgcttttcttttttccatcctgccctctcttctcccttgtctgttygagctagccatgggaatgtggtgttcctgccagtgcatccattgagttcgtttattgttaatttatttattttctgagwtggagtttttgctctattgctcaggctggagtgcaatgatgtgatcttggctcactgcaacctctacctcctggattcaagtgattctcctgcctcagcctcctgagtagctgggatgacaagtgcccgctaccatgcccggctaatttttgtatttttagtaaaggctaggtttcaccatgttggccagcgggtctcgaactcttgacctcaggtgatccaccgacctaggcctcccaaagagctgggattacaggtgtgagccgccacaccctgccgagtttgtttatttgagcagataatgtgtgttagagttgcttagaaaaacaagatggtggacgggccccatgctagtgggtaccatccctactggaaaaaccactgcttggtgcrttagccaaatttgctttaaaattgttttttaaaaagggagggcttttataaaaatcaaatgaactaggactggtyagtgggaggctcacgcaagggttgtgctgaggctggaaggcccagagtaggaagagttgtggagtgcagaatgagctctccaagggcagacactgccagcctcactgttctctgaacccccagtatgggggacagtgcttggcacrgaaaaacccccttaaatgtttgctatgaatggtgctaaggaagaaggcagagaatgtcaaccagaggccaggcactgggcaatatatacacggccccttctgtgccctcagccactttggcgcagtcactgtttaggttaaagataccagagaaggcaggtattcatgttcctacttcgtaggcagagacgtggtggcccagagaggttaaataactcccgagatcacccagctaagcactgtgggatcacgggtttgaatctggtatgtctgactcccttctgtacccagcactgtctgctggtctagggcataaccagccagggatgggcagctcgttcagtaaacaggagagcagatgaatgactcgtgtggagagcacgcagtggagtgagcaaaactgggaggctggagaagtcgctttaaattaacctgaaaatgtttaatatgctttttattttgtttattttttttgagatggartctatctttgttgcccaggctggagtgcagtggtgcaatctcggctcactgcaatatccacctcccaggttcaagtgattcttctgcctcagcctcccgagtagatgggattacaggcaactgccaccacgcctggctagtttttgtatctttaatagagatggggtttcaccatgttagccaggaggctggtctcgaactcctgacctcaagtgatctgcccagctcagcctcccaaagttctgggattacaggcatgagccaccacgcccagccttaaatatggtttttatttgaaaaaaaaaaaaatccctagaaacatgtagtggagacacagctttaaagctctgaatagttgattttcagctcatgcctgtaatcccagcacttggggaggctgaggcgggatgattgcttgaggccaggcgtttaagaatagcctggacaacatagtaagaccccatctctaaaaaattaaaattaaaaaataaaaaaagagtcgactttatttctgtaactggaagaatctagctaacatttctcaagcactttataggtgccaggaactctactttaagtaattaaactcaggttctcatttatacttacattccttgtgcctattgtatggataagcaaactgaggctcagagaaatttagggacttgccaaaggtcacacagctttgttagtagcagagatgagatttggcccaggtctggctccgtgcacttgatttctgctctttagtatctcctggttgagtcactggaatacacagcatagcttaaaatgaaggaggaagtactgaagaggtaatggaaggagacctaactgtctctgagagggaagagagtggttgggagggaactatattaattgaggagtgcagagaaattaatatggtccaaaggaaaaaaaggtttttttgagatggagttttgctcttatttcccaggctggagtgcaatggcatgaccttggctcactgcaacctctgcctcccaggttcaagcagttctcctgcctcagtctcccaagtagctgggattacaggcgcccaccaccacacccggctaattttgtatttttagtagagatgaggtttcaccatgttggccaggctggtcttgaactcctgacctcaagtgatccacccgcctcggcctcccaaagtgctgggattacaggcataaaccaccgtgcccggctggtccaaagaaagttgtgtgtcgagagctcatccagcaggcttcttaaatcaggagcttgtaagttgcatataaagacaaaaaagggagttccaaagagtaatgctgtgggaaatgacttgaatttaaaccgtcaccttgtttcatctcatggactggtcagacaccatttttgttgtcgttgttgttgttaaattaattgctcagaatatagcagcaggcgcaaattgtagtactcgttttaaaattgaagattaaattttaaattacccaacaaaggcctaactttgttaaaagagagggaaaggacaggttctgccagtatctctggccagctagctaactaacttttttcttattccaaaaaaatgacttgggaccacttataaaaattatgtattgttcaaygagatacaattaatgaggaaatcaggatgagagaaaaataaaggcagggaaataaagctatggcccatttagcacaaacrcatcccaaagattgctagaagcagaggtgaaatttttgctgtgtgttaacaatcaaagcaaaaagaggaacaaggtccattagaacattctcagaatccacaagatagaaatgaatcagttgttcagcataaacacagtgtttcctggtgctgttggaacactttgtgaaattagggacaatatctcatcaacatcccagaccaacatcccaaaagaccatttaatagcttgcatctgtgcttctccctaccccatagcccctccctccagagatgaccactatgctgacttgtaaaatattaatcttatatccagccacctttctttttcgtttgtttgtttgtgtttttgcagacagagtcttattctgtcgcccagtgcagtgttgtgatctcaacttactgcaacctgtgcctcccaggttcaagtgattcccctgcctcagcctcccaagtagctgggattacaggtgcatgccacaatgcctggctaatttttgtatttttggtagagacggggtttcaccatgttagccaggctgatctcgaactcctggcctcccacagtgctgggattacaggtgtgagctgccattcctggccttatccagccacctttctaaactcacatttatttctaataatttgtctgcagactctttgaggtttttacatatcatgtcatctgtctttgagagttttaaacattggactgctccattcactcaaaaattttaaaaaattccatgattgcattattcatacttcatggagatagatggggggctaagaaagcataccagacatagtcactttcaatcccaggtccaaatgctggataggtagcttccttgagaatgggcatggtagaaatttctggggggacgtgtagggatttgggaaaaacacctggttttatggtcatggactttcagtacatttttttccaaatcccctacagatcaattactttttctcttttttatacttatttaattttttttagatggagtttcgctcttgttgcccaggctggagtgcaatggcgcgatctcagctcactgcaacctctgcmtcccgggctcaagcgattctcctgcctcagcctactaagtagctgggattacaggcatgtaccacacccggctaattttgtatttttagtagagacagggtttcaccatgttggtcaggctggtcttaaactcctgacctcaggtgattcacccaccttggcctctcaaagtgctgggattacagccgtgagccactgcgcctggcctcttttctttcttttttttttttttgagacaggatctcactctgtcacctaggctggagtgcactggcatgatcatggctcacttcagcctcgacctcccaggctcaggtgatcctcccacctcagcctcctgagtagctgggactacagacacatgccatcatgcccagctgattcttttgtatttttgtagagtcagggttttgccatgttgcccaggctggtctcgaacttctgggctcaagcgatcctcctgcctcggcctcccaaaattctgggattacaggtgtgagccactgcacctagcttcatccatattttttttagccatgtatagaacatgagatgtttgaagttgttttctgacaggaatttggagagtgaatattttatggtgctgattaaacccagattcatgtgcttggaaaagacaaccacagggaagctagtgagtgctttgagatatgtcaaggggtaaaactaagaccacaagtgggctgcagaagcacctacaggcattgccaagaggatctccaaaaagcagttcaccctggtctgctctgaagtttggatacaagtcctgacccatgggcatggttcaggatcttctagcctggaaaattttcagggcagttgcccacaaccaaccaactgacaaaaacacagcaatagctagagagcacccaattttaagcaatccacccttccgtcagcctgctactgtgaatgagcctcaatatgtgatctgtagttagctgaattctattgacagcctatggttactggatataagccaattctgttctggggacttgccagaaatgacacaattggccagttgacccacagcctagttcctagcagagattggatagctgattgagcrttgtggctgttttgaggcttgaccagagattcctgccgttggcagaggggaatctgtagtctttgcttcttggtagcaggtgaggctgaaaacgcaagtagcaggctaaaaactggtttcaagtcctcaccatctggtgaaacctcagagcccatcagatagaaaatgccagctgggactgtgctaattcggtaaggcctgggtggagaaggagggcctgggcacgaccatctggtttcggaatggaggtagcagtcatttattaagyacttaatgtatatcgggcactgtacaggagacgttctggctgttctcctgtacatttcctgcaaagacctaatgagatatgattactccatcctacaggtaaggaaactgagctcagagagtctagctgcccagggtcacacagtaaatgatgagccaggacttgaacacttgactgcttgaatcctgtactccctccaggggccaagatgtggcagctcacagaatgcctatatctttttttttttttgtcttttgagacagtctcactctgtygcccaggctggagtgcagtggtgagatctcacctcactgcaacccccgcctcccaggttcaagtgattcttgtgcctcagcctctcaagtagctgggattacaggcctgcaccaccaaacctggctaatttttgtatttttagtagagagggggtttcaccatgttggccaggccagtctctaactgctgacctcaggtgatccacccaccttggtctcccaaagtgctgggattataggcgtgagccaccatacctagctctacatctttatcacactctgttcctttgccttggtgggaaaagttgcagcttagtaccaactgcctcctgcttgagccactgtgcacagttactatcagcctggccctgtaggcacgtagaacccctggactcaatactgcataggatgggataagaccacatctgatgtggtgaaggtcaccgggatgatgttgtttctgagataacaggtatgtctgccttccttccctttgcatttagctttcacaatcaacagtgttgacatgaagagcctgccggactggacggtgcaaaatgggaagaacctgaccctgcagtgcttcgcggatgtcagcaccacctctcacgtcaagcctcagcaccagatgctgttctataaggatgacgtgctgttttacaacatctcctccatgaagagcacagagagttattttattcctgaagtccggatctatgactcagggacatataaatgtactgtgattgtgaacaacaaagagaaaaccactgcagagtaccagstgttggtggaaggtgagtccttggaactgagcacaggcaagcagatggagcawagcacacagtggcgtgaataacagctgtgaatgaatagtgacactggacttaactctccacccatcaccctctcattcatctgcctggcattttccttacctgaatacgtaagcactagacatattcccaataggccaggcccttccttccttccttccttcctttctttctttgatggagtctcactctgtcacccagtctggagtgcagtggtgtgatctcggctcactgcaacctctgcctcccaggttcaagcgattctcctgcctcagcctcccaagtaattgggattacaggtgtgtgccaccacacctggctaattttgtatttttagtagagatggggtttcactgtgttggtcaggctggtctcgaactcctgacctcaagtgatccacctgccttggcctcccaaaatgcttcttcatctcgtctcataaattaaaatttcttcttcaagactcaactcaatgatgtcttctctttccaaaacaaaatgggtctaccccagggtgccagtcagtacagctctgatgctctctctacattcaatggtatttgtgtgtataaaggccacagcggtgtgttaagacacctcgttctgcagtcactctgcctgggtttcaatctgggcaagtcccttaacagctctaaacttcaaaatcctcaccagtaaaaggaagataacaacgatacccatttcaggcaattattgagagggttaaaagtgtcatgtgggtagagtgcttagcaaaatttccagcacctagtgagttcctaataaatagaaatgtatttatttattttgagacagagtcttcctctgtcacccaggctaaagagcaatggcgcgaccttggctcactgcaacctctgtctcctgggttcaagcgattctcctgtctcagcctcccaagmaactgggattacaggcacgcgccactgtgcctggctaattttttgtatttttagtaaggatggggttttaccatgttggccagcctggtctcgaactcctaacttcaagtgatttacccaccttggcctcccagagtgtcaggattacaggtgtgagccaccatgcccggtccacaaatattctatttcactcagtattgccatccgttcttacacatctgtctgctcttctggatagtgaaattgtaaagacagagatggtgtttggtttattcttatatcttgaacaatgaatctggctcatagtaggcattcagtcaatgttcatggaataaattaaagtcagtcctagcctgtggctgcattcaataaagggtaacaacaatcacagtgacactgacaaatactggctacctttcccctctaagcatcatctgttgggaatctgattgtgtcctcttcccaataggattataaaycattgaaaacaccaagtacatcttgaccatattttattttttaaatttatttatttatttatttatttatttttagacagagtctcactctgttgcccaggctggagggcagtggcacgatctcagctcactgcaacctctgccttcggggttcaagcaattctcctgcctcagcctcccaagtagctgggattacaggtgcctgccaccatgcccggctaattttttgtatttttaatagagatggggtttcgccatgttggccaggctggtctcaaactcctgacctcaggtgatccacctgcctcagcctcccaaagtgttgagattacagatgtgagccacctcgcgtggccttagtggtgattttggtggacccatcacccgagcagtgtacactgtacccagtgtgtagtcttttatccctcgctccctcccactctttcccctgagtccccaaagtccactgtatcattcttatgcctttgtttcctcatagcttagctcccattgagcatattttatattttttcctttcttttcttctcttttttgagacagggtctctgttgcccaggctggagtgcagtggtgggatcactgctcactgccgcctcaacctcctaggctcaagtgattctcccacctcggcctcccaagtagctgggactaccagtgcacaccactaactacccctggctaatttttaatttttttttttgtagagatagcatttcaccgtgttgcccaggctggtctccaactcctgggctcaagagatccacccacctcagcctccagattttatatatttcaaagtgcctagtactgtgctgggcacatacctgttcatttattacctggtaggtcgcactgggtgttcagagaacaaaaaagagccctctcatgggtcaactacagtcactcagcggagggaggcttgtgtctctcaatcaggctgatactgacagactttctcttcaatcaggctgatactgacagactttctctttccccrtaggagtgcccagtcccagggtgacactggacaagaaagaggccatccaaggtgggatcgtgagggtcaactgttctgtcccagaggaaaaggccccaatacacttcacaattgaaaaacttgaactaaatgaaaaaatggtcaagctgaaaagagagaagaattctcgagaccagaattttgtgatactggaattccccgttgaggaacaggaccgcgttttatccttccgatgtcaagctaggatcatttctgggatccatatgcagacctcagaatctaccaagagtgaactggtcaccgtgacgggtcagcatcctgctcccttcctcatcgttctttgtggtttctggtttggtatggggagaaagaacccagaactgggaaggggctgctgttctcaggacttaagacctgttcttaatcattttaagccagtatttttcaagcttttttgactgttatacagttaaattgcatacaatttttcagacaagagtttcaccaacaacactttactcttaatatatatgatgctttttgtttgtttggcttggtttttggggtttttttttttgagacagagtctcgctctgtcgcccaagctggagtgcagtggtgcaatcttggctcagtgcagcctctgcctcccgggttcaagcaattcttatgcctcagcctctggagtagctgggattacaggcatgcagcaccacacctgactaatttttgtatctttagtagagatggggtttcgtcatgttggccaggctggtctcaaactcctgatgtcaggcgatccacccgccttggcctcccaaagtgctgggattacaggcgtgagccaccaccccaaccttgtgtgtgtttttgagacagggtcttgctctgttgcctgagctggagtgcagtggcatgatttcagctcactgcaacctccgcctcccaggttcaagcgattctcctgcctcagcctcctgggtagctgggattacaggggcatgccaccatgcctggctaaatttgtatttttagtatagacagggttttaccatgttggccaggctggtctcaaactcctaacctcagatgatctacccacctcggcctcctaaagtgctaggattacaggcgtgagccaccgtgcccarcctatttcagtctttaaacactggccatgacacactacactgatgcattatgtgatctgtagtttggaagccactgctttaagccatcgagggtcagacaccaggaagytgggtttggaggggatcgggaggaaagaggggccaggtcctcagccttggcctcctgttgttcaacgtagatttgcgttggacaaacagcaaacaaatgaggtggcctgggaaatgctcccaggagagaaggaggcaacagcagagggaagctggggagtgtccaggacatacagggctctaggacaggtagtcagccactcccaggacccggtctcatttgccaagccgggagaagtcaggggaaggcacacccatgtagatatttgcaaatatttccaaaataggaaacttacattttgtcataaatggtccccttcttttggcatcccactttatcctgcccattgtgtgtatgtgtgtctgtatgttctattatctgattataaaatcatgtgtgctctgggtagaattttcagacaaaagagcaggatataaagtatgtatataaagtgacaatcatttataatgcctctacttagagaaaaccacacatgatcctctagactttttctacatatatttatatatcatatacacacccagccacacacacacacacacacacacacagaaaaaacatcttttgtttttacaaaagatggggacctatcacactattttacagctttttaaaaaccagacaaaatcttatggacttttgtccatatgaagaaatatagatctatctcattttagaactcagaacttgactgtagggatgggccatctctgcaaccctcaaactcctgggcttgagtgatttacctcatcttctgctgatggatatttaggtatttttctcagtgtttgctattacaacaatcctgcagtatagatatttgtacttgtaacttgtgtactttggcaactattttactattattatttatgtggttaattcttagtagtcaaattgttgaatcagatgttttgtgcattttcttttttatttatttatttatttatttatttatttatttatttatttatttgagacagagtttcactcttgttgcccaggctcgagtacagtggcgcaatctcagctcaccgcaacctccgcctcccgggttcaagcgattctcctgcctcagcctcccgagtagttgggattaggcatgtgccaccacgcctggctaattttgtatttttagttgagatggggtttctccatgttggtcaggctggtcttgactcccgatctcaggtgatccacctgcnnnnnnnnnnnnnnnnnnnnnnnnnnnnnnnnnnnnnnnnnnnnnnnnnnnnnnnnnnnnnnnnnnnnnnnnnnnnnnnnnnnnnnnnnnnnnnnnnnnnnnnnnnnnatcaggagtttgagaccagcctggccagcatggtgaaacctcatctctactaaaaatacaaaaattagccaagcgtggtggtgggcacctgtagtcccagctactctggaggctgaggcaggaggatcacttgaacctggaaggtggaggttgcagtgagccaccgtgtcactgcattccagcctgggtgactgagtgagactccatctcaaaacaacaacaaaaacttcagtatgaaaaacttatcgtaaaataaaaagacaaatgacaaactggagaaaatatttgcatagtacctttaacaaacagctaattcctttaatttataaaaggtttggctgactgtgcctggctcgatgttgccaaagtgctagatattgccaaagtgctcttcaagatggttgaacattttcatcagtagtgatgctagtgtttgttttcccrcatccttaccaacaaactttttctttctttctttcttttttaaatagagattagggtcttgctatgttgaccaggctgttctcgaactcctggcctcaagtgatcctcccatctcggcctcccaaagtgctaggattgcaggcatgagccactgtgcctggtcctaacagagtatttcaatgttttattatttttgacaatctagttgaggtatagtgatatatatcattgttgtggtgatttgtatttctttagtttttagtgaggttgagtttgtttattcatctattacatttttttcccgtaaaccacctattcatatatgccttgtcattttcattgtgaatcacaaaactccagtgccacaaagaaacaagataggtaaatttgactaaagtcatttttattgttcctggttggatttgttcaagccctttattttatttatttatttatttttgagatggagtctcactctgtcgcccaggctggagtgcagtggcgcgatctcggctcactgcaacctccgcccaccaggttcaagtgattctcctgcctcagcctcctgagtagcyggcattacagggggctgccaccacgcccagctaatttttgtatttttagtagagacggggtttcaccatcttggccaggctggtcttaaactcctgacctcgtgatccacccaccttggcctctcaaagtgctgggattacaggtgtggagcaccgtgcctgacccctttattttattttaaaaaatattttataatatgttttttgagatggagggtctcaccattgtttcccaggctggtcttaaactccttagctcaggcagttctcctgcctcagcctcccaaagtgctggagttgcaggcgtgagccaccgcccctagctgagcctttaataaattgattagctatttgtcagtgatattatgcaaatattttctctagtttgtcatttttctttgagttttttgataagttttccatgctgaagtttttaatcttcatttagtcaaatttacctgttctgtttctttatggcgcctcagttttgtgattcatacttaaaggtcttctgcatgtcaagattattaaaggaaaaaaacacacccatgttttctattcctgtgctatggtttcatttttttccctctgcatttaaatatctggtgcatctggaggtgatttgggtgaaagaaaaacacccttcagctattattaaggttccccagaagacctaaaatttgagagtcctaaagcatgtaaaggatgccttccccttttttacttttatttgagaaggcaggctattattttatgataacttctaattatgaattgactttataatgttaaaaatcactaatgaatattaaagcattagnnnnnnnnnnnnnnnnnnnnactaatgaatattaaagcattagagtactctaagttcactattagcattttaaagatatccctaatctatattttacacagttggaatctgtgtatatattccagtttatgccctgggcttgtttttttgttgtaagtggaaacgaaagcctaggacctatccctacttccctgaagatcctatgccctggttggtatgtgatctatacttgattaaaactatttttctttttaaatagagatagggtctcactatgttgcccagaggctgttctagaactcctgggcttcctaagtgttaggattacaggtgtaaggccccacactcaggcaaaattgtttttcaaactgcatgagtcatgaaatcagtttagtgagtgatggccagcattttaaaaaatgaaatagaaaagactagaagccacttttttggaggcatgcgattatttaaatattcatttccatgaagcagcacgtttcacagagctgaacttttgaaagctatagtatcttcatgctgaaatgccaagcttccatgaagtgctgagaatagcctagaaaactcgtagtgggcaggaggaagatcatttctaaatactgtggttatttctgaagtcctctgaaggcgagatctagagaaggtgtttggcctttgggaagcttcagaaacccagagaattgcagtgaagaagcctgaagatgcaagagtgagcgagaagggagggagtatgagagcagccaaggcaaaagttctagagaagaaaggttgaatttttaaagttagttaggaacaatagaagtttgaaaaggggaagcagcaaaaagagcagaagaggctcctcttgcccaggtttgcacctgagtccaaccaggttgtcttcctctcttgcagaatccttctctacacccaagttccacatcagccccaccggaatgatcatggaaggagctcagctccacattaagtgcaccattcaagtgactcacctggcccaggagtttccagaaatcataattcagaaggacaaggcgattgtggcccacaacagacatggcaacaaggctgtgtactcagtcatggccatggtggagcacagtggcaactacacgtgcaaagtggagtccagccgcatatccaaggtcagcagcatcgtggtcaacataacaggtagggctgctgctgcgggagggtgttggcatatggcgggctcaagaggccaccatgctgcaatccagcatggccaaagagagctgatacatttcctgcccctgcttatctgaatgaatgtgctcagatggggctttggtgctcgtgggargaaaccactgcagagcgagttaacagtctactgtgcgtgttgagggtrcaggctccggcaccaaagctcaaccctgccgctcactgcttctgtgaccttgggtgagttattgaacgtgccgcagcgctgtgagatggtgataatgaccttttaggactgctataatgattaatgagataactatactgtaagcatgagctgagagatttgtacagagtaagactctgaacactggttaatgttttcattactctgttatatttctccatcccctgtgacaagcactatgctagatcccagacgtgggtcctatgacagggccacaaatgagaaagcattagtaaactcaaaaataatgataacatggctgggcatggtggctcacgtctgtaannnnnnnnnnnnnnnnnnnnnnnnnnnnnnnnnnnnnnnnnnnnnnnnnnnnnnnnnnnnnnnnnnnnnnnnnnnnnnnnnnnnnnnnnnnnnnnnnnnnnnnnnnnnnnnnnnnnnnnnnnnnnnnnnnnnnnnnnnnnnnnnnnnnnnnnnnnnnnnnnnnnnnnnnnnnnnnnnnnnnnnnnnnnnnnnnnnnnnnnnnnnnnnnnnnnnnnnnnnnnnnnnnnnnnnnnnnnaaaaaaaaaaagaaatgacaattaccctttgttgaacattgcatgatgggtttatatacattttcttttctttttttttttttcttttttgagacaaagtctcactctgttgcccaggctggagtgcagtggcacgatctcggcccactacaacctctgcctcccaggttcaagtaattctcctgcctcagcctcccgagtagctgggattacaggtgcatgcgccaccatgccctgctaactttttgtattttaagtagagatggggtttcaccatgctgtccaggctggtctcaaactcctaacctcaagtgatctgcctgcctcggcctcctaaagtgctgggattataggcatgagccactgggctggcccaggtttatatatattttcatttcatgctcataacaattcaaggagataggcataagaatgtccactttatggatgtggaaactgagactgtgaggttagtaactcaaccaaggattacagggttaccaagggggtagaacaagagtcaccctcaggcctgtttggctttcaaatccatgaacttgaaagttccctcagactcctaaccctccttacctggctttatttccctctaaagtacttagcaccaaaaatatactctacctttcttgtttattatgtgtatgcagccactagaatgcaagccgctgagaacaggaacattattttgttcagtgctatatccttaacacctagaacagtgcccggcacacaggaggaattcaatacatatttgttggatgaaggaatgagtgttagatgacaatgtttcaggggacagagacagtcagcacttcttggttgcacggtgaaggggttctcatgtgtctgcattcataacgttcattcattcatttgttcagttatttactaaaagcctcctatgtgtcaagcattgagtgtgcagtgtcagcaacagtctccagcaccataggtaggctaccaactacccaactggtatattggcatatacattgggtcctgctggtctatagtgtgtgctagcaatttagttaagtattgatcatgacttatattttgatggctcatggtatttttttactgatacaatttatattatctcattaaagaaaagtaccagttcaacacatattgagcattttctgtatgctgggcaacttactggggataaagagctacctaagacccggttttacctatgaagaattcatagacataactagaccagtctacagcattttgtggtagaagcccagatggactgagacattctgtctcagatactttccctggataactttctccaacaggcctttccatgattcccaaggctaggttcagtgtcttttttcttttcttttttttttttttttgagatggagttttgctcttgttgcccaggctgcagtgaagtggcactatctcagctcactgcaacctccgcctcccgggttcaagcgattctcctgcctcagcctcccgagtagctgggattataggcatgcaccaccacacctagataatttttgtatttttagtagagacggggtttcgccatgttggccgggcttgtcttgaactcctgacattgtgatccrtccacctcggcctcccaaaatgctgggattacaggtgtgagccaccacgccctgccagttcagtgtttttcctatggggtctgtgacaaataatgcatctgaatcaaccactaaatgtaagcactttgaagtcagagactgtttcttattcactgctatctctcagtgcctagcaaggggcccgccacagagagaacctgcaataaatacttgtggggtgaaatgagtgagtgaacaaatacatgagtgaatgcatgaatcattatttgctgcattacaagctgcaaaacttttcttttgttgcttttttttttttttttgaaatggagtttcagtctctttttttattattattatactttaagttttagggtacatgtgcacaatgtgcaggttagttacatatgtatacatgtgccatgctggtgtaccgcacccattaactcgtcatttagcattaggtatatctcctaatgctatccctcccccctccccccaccccactacagtccccagagtgtgatgttccccttcctgtgtccatgtgttctcattgttcaattcccacctatgagtgagaagatgcggtgtttggttttttgtccttgctatagtttactgagaatgatgatttccaatttcatccatgtccctacaaaggacatgaactcatcgttttttatggctgcatagtattccatggtgtatatgtgccacattttcttaatctggtctatcattgttggacatttggattggttccaagtctttgctattgtgaatagtgccacaataaacatacgtgtgcatgtgtctttatagcagcatgatttatagtcctttgggtatatacccagtaatgggatggctgggtcaaatggtatttctagttctagatcccygaggaatcgccacactgacttccacaatggttgaactagtttacagtcccaccaacagtgtaaaagtgttcctgtttctccacatcctctccagcacctgttgtttcctgactttttaatgatcgccattctaactggtgtgagatggtatctcatagcggttttgatttgcatttctctgatggccagtgatggtgagcattttttcatgtgttttttggctgcataaatgtcttcttttgagaagtgtctgttcatgtccttcgcccactttttgatggggttgtttgtttttttcttgtaaatttgtttgagttcattgtagattctggatattagccctttgtcagatgagtaggttgcaaaaattttctcccattttgtaggttgcctgttcactctgatggtagtttcttttgctgtgcagaaactctttagtttaattagagcccatttgtcaattttggcttttgttgccattgcttttggtgttttagacatgaagtccttgcccatgcctatgtcctgaatggtaatgcctaggttttcttctagggtttttatggttttagktctaatgtttaagtctttaatccatcttgaattaatttttgtataaggtgtaaggaagggatccagtttcagctttctacatgtggctagccagttttcccagcaccatttattaaatagggaatcctttccccattgcttgtttttctcaggtttgtcaaagatcagatagttgtagatatgcggcgttattcctgagggctctgttccgttccattgatctatatctctgttttggtaccagtaccatgctgttttggttactgtagccttgtagtatagtttgaagtcaggttgcgtgatgtctccagctttgttcttttggcttaggattgacttggcgatgcgggctcttttttggttccatatgaactttaaagtagttttttccaattctgtgaagaaagtcattggtagcttgatggggatggcattgaatctataaattaccttgggcagtatggccattttcacgatattgattcttcctacccatgaccatggaatgttcttccatttgtttgtatcctcttttatttcattgagcagtggtttgtagttttccttgaagaggtccttcatgtcccttgtaagttggattcctaggtgttttattctctttgaagcaattgtgaatgggagttcactcatgatttggctctctgtttgtctgttattggtgtataagaatgcttgtgatttttgtacattgattttgtatcctgagactttgctgaagttgcttatcagcttaaggagattttgggctgagacaatggggttttctagatatccaatcatgtcatctgcaaacagggacaatttgacttcctcttttcctaattgaataccctttatttccttctcctgcctaattgccctggccagaacttccaacactatgttgaataggagtggtgagagaaggcatccctgtcttgtgccagttttcaaagggaatgcttccagtttttgcccattcagtatgatattggctgtgggtttgtcatagatagctcttattattttgagatacgtcccatcaatacctaatttattgagagtttttatcatgaagggttgttgaattttgtcaaaggccttttctgcgtctattgagataatcatgtggtttttgtctttggttctgtttatatgctggattacatttattgatttgcgtatattgaaccagccttgcatcccagggatgaagcccacttgatcatggtggataagctttttgatgtgctgctggatttggtttgccagtattttattgaggatttttgcatcaatgttcatcaaggatattggtctaaaattctcttttttggttgtatctctgcccggctttggtatcaggatgatgctggcctcatcatcctgagggaggattccctctttttctattgactggaatagtttcagaaggaatggtrccagttcctccttgtacctctggtagaattcggctgtgaatccatctggtcytggactctttttggttggtaagctattgattattgccacaatttcagatcccgttattggtctattcagagattcracttcttcctggtttagtcttgggagagtgtgtgtgttgaggaatttatccatttctcctagattttctagtttatttgtgtagaggtgtttgtagtattctctgatggtagtttgtatttctgtgggatcggtgatgatatcccctttatcattttttattgcgtgtatttgattcttctctctttttttctttattaggcttgctagcggtctatcaattttgttgatcctttcaaaaaaccagctcctggattcattaattttttgaagggttttttgtgtctctatttccttcagttctgctctgattttagttatttcttgccttctgctagcttaaggagtttcattcttgttgcccaggctggagtgcagtggagcaatctcggctcactgcaatctctgtctcctgggttcaagggattctcttgcctcagcctcccgagtatctgggattacaggcgcccaccaccatgctggctaattttatatttttagtagagatggggtttcaccatgttgcccaggctggtctcaactcctgacctcaggtgatccacccacctctgcctcccaaagtgctgggattacaggcatgagccaccacacctggccacaagttgcaaaacttttctaatccttgtcattgaaataaattggattaacaagaaaggaaaacctgccattggaatcctaggcaaagaatgaaccctagctccttactggggtgatcgttaggtacatgagaagcaaaggaaaactttttgctggaagttggaagttggttctgccaagagcacctgagccaagggcctctccaggaagggtctttagggtggtggccagacacatctcgctccattcccactcactgtttttcagaactattttccaagcccgaactggaatcttccttcacacatctggaccaaggtgaaagactgaacctgtcctgctccatcccaggagcacctccagccaacttcaccatccagaaggaagatacgattgtgtcacagactcaagatttcaccaagatagcctcaaagtcggacagtgggacgtatatctgcactgcaggtattgacaaagtggtcaagaaaagcaacacagtccagatagtcgtatgtggtgagtatattgttgctgactcagaggacatccggggttgaatgggagaaaggaaatttatctgcagctgccgccctctccggtctgagcagactcaggcagggtaagaactagagggagagaagtgcgaaatcaaaggccaaagaaacaaggaggtattcctgctcagaacactgattcactgatgatgatgtggcctctgacttgctaagattctggcaagattctgcctcctggagcaagtacccacccaaaagttcaggaaggaaacactacttagtcaatgttaaacttttcttttttttttttgagacgtgtcgcccaggctagagtgcagtggcacgatagctcactgcaacctctgcctcctaggttcaagtgatctcctgcctcagcctcccaagtagctgggattacaggtgcccaccaccacgtctgcctaatttttgtatttttatttttattacttttatttatttatttatttatttttttgagatgcagtctcgctctgtcacccaggctggagtgcagtggcacaatctgggctcactgcaagctccgcctcctgggttcacgccattctcctgcctcagcctcccaagtagctgggactacaggcacccgcaaccacgcccggataatatttttttgtatttttagtagagatggggtttcaccgtgttagccaggatggtctccatctcctgacctcgtgatctgcctgcctcggcctcccaaagtcctgggattacaggcctgagccaccacacccggccaagaatatcaaaattccattttttaaatctgtatcctggctaacccaaaagggtcagacttccagtggacagaatgtaggtatttgaccaccaggagctgggcttctcaggcctgaatgtgcatgcaagacctggttaaaatacaggttatgattcagtattttaggcccagatggggccaggttctgcatctctaactagcattttggtgatgtggatgctgttggtctctggaccacactttgggtggcgagattctggttgattatagaactccagtcaagttgtcactgtcactatattattcagtcacgatcctttcatttaacctgtggctgtgttttatccagctaagattttattatagcttcaactgaaccaggattttagcctatttttaatgctctaaccacctaactcaaaaggcaggaatgcaagagacaaatgtgtgttataacgttttattttattttttgttcttgggaggaggaaatctcattgtataaggtttaaataaactaatgcctaaataatgacctaatataattcttatctgttaagaggctgaagcactaagaagactttttttatctttttttttttttttttttttttgagatggagttttgctcttgttacccaggctggagtgcaatgacatgatctcggctcactgcaacctctgcctcccgggttcaagcgattctcctgcctcagcctcccgagtagctaggattacaggcatgtgccaccatgcccagctaattttggatttnnnnnnnnnnnnnnnnnnnnnnnnnnnnnnnnnnnnnnnnnnnnnnnnnnnnnnnnnnnnnnnnnnnnnnnnnnnnnnnnnnnnnnnnnnnnnnnnnnnnnnnnnnnnnnnnnnnnnnnnnnnnnnnnnnnnnnnnnnnnnnnnnnnnnnnntattggctggacctggtggctcacacctgtaatcccaacaatttggcaggccaaggtgggtggatcacctgaggtcaggagtttgaggccagcctggccaacatggtgaaaccccctctctactaaaaatacaaaagttagccgggtgtggtggcacatgcctgtaatcccagctactcgggaggctgaggcaggagaatcccttggacccaggaggtggaggttgtggtcagctgagattgcgccattgcactccagcctgggtgacagagcaagactcggtctcagaacacacacacacacacacacacacacacacacacatatatgctcagccaggtgtggtggctcatacttataatcccagcactttgggcagctgatgtgggaggatcacttgagtccaggagttcaagaccagcctgagcacatagtgagaccctgtctctacaaaaaataaagaattagccaggtgtggtgtgcacctatagtcccagctactcgggaggctgaggtaggaggattgcttgattctgggaggttgtagtgagctgtcatcgcaccagtgcactccagcctgggtaatagagtgagaccctgtctcaaatacacacacacacacacacacacacacacacacacacattttgttggctacttgttgtactttttctatgttttctgtgtctttgctcaacacaagaaaagtatattatgtgtgcatgtgcgtgtgagatatggtaaaatatgaacatgtatttctggggatgtaatgttttccttgaatttctgtcattctctgttttgcttattgtacttctctttccctttcccttctcaccacacacacacacacacacacacacacacacacacacacacacagcctgtcagtctcataggtgtcctataaaggtaaataaggcaggcaggcatttgaaattacagcagggatagaaagcaaagctcaggctttggaggaggaacctcttgtgctggatgctttgcttttaccttcagtgccttttggattgtttctccctctgttctagaaatgctctcccagcccaggatttcttatgatgcccagtttgaggtcataaaaggacagaccatcgaagtccgttgcgaatcgatcagtggaactttgcctatttcttaccaacttttaaaaacaagtaaagttttggagaatagtaccaagaactcaaatgatcctgcggtattcaaagacaaccccactgaagacgtcgaataccagtgtgttgcagataattgccattcccaygccaaaatgttaagtgaggttctgagggtgaaggtgataggtaagttgctgtgctgtgagaagaaatcatgtgggcttggggcattctttcacccccagggactgtgggracaataagagaagtagggggccaggtgcggtggctcatgcctgtaatcccagcactttaggaggccaaggccggtgaatcattgaggccaggagttcaagaccagcctggccaacatggtgaaaccccatctctactaaaaatacaaaaattagctgggcatgrtggcgtgcgcctataatcccagccactcgggaggctgaggcaggagaattgcttgaacccaggaagcagaggttgcactgagccaagttgcgccattgcactccagcctgagcaacaagagcgaaactccatctaaaaaaaaaaaagcgagagaagtagtgggtgcttatgcaaagtccatatactagatatgcaccaaagcagggccaaggttcagtaaaggaggctggaaaatatttgggggctattgatgaggacaatgtaatctctttccagaacctttcaacaaactgctaaaatatgataagcatgaaagtgtcctgactgcaggaagcactgaagttgtgcatatgggctcccttagcactttctccttttcagatacactgttctgagaattgtagatcaggactctgctgttgtgactcctagccgggcaaccctgccttgtgtgaattctgcagcagtgagagctacaggctgtggtctcatggcagttactaacatttgcctgggattctcatcatactcaagagaaatataccattgtcttgggggtggacagtttcccttaagcctctatctcatgcctctcagaaggcctcaggagtgccattgcttgcatgtcttagatattttgcatcctgttgtaaaaagtttaataaggcttcctcctctttgtccttcttgtttagtaactgcctatctacatgggctgctggtggatgtgaataggagagagggattcctgcttctattcatgtatagtctaatagtagccataccttttcaattaacattaacataggctggttgaggtagctcacacctgtaatcctagcgctttgggaagctgaggtgggcggatcacctgaggtcaggaattcgagaccagcctggccaacatggtgaaatcctgtctctaataaaaatacaaaaaattagctgggtgtggtggtgggcacctttaatgccagctactcgggaggctgaggcacaagaatcatttgaacctgggaggcagaggctgcagtgagccaatatcattccgctacactccagcctgggcaacggagcaagactccatctcaaaaaaaaaaaaaattaacattaacatagactaagcacctaatggtgtgaggcatacaaaaaagaagacatattctttgtttcaatgctgtggtaagaaacacaagctctcctaattaaatgatggagaaacatctgaatcataataccaataagcatagaaaaaatgttaggggtcatgtttggttgtcacgtgaactatatccttacagtgatggtgatagtaatttagggtatgccagacttcatctagcttaagtgggtaaacattgtgaaaaagctgggctaggtgccagggcttgagaatgggtgggcagagaaggctgaagatggctgaacatctccagcaaacacatgagccaaaaggtcccatggggcacttcaaaagactgtgcgcagccaggtgcggtggctcacgcctataatcccagcactttgggagaccgaatggggtggatcacttgagcccaggagtttgagactagcttggccaacatggcaaaaccccgtctctactaaaaatacaaaaattagcccagcgtggtggtgggtgcctgtagccccagctactcaggtggctgaggtgggagaatcacttgaatccaggaggcagaggttgcagtgagccaagatcgtgccactgcactccagcctgggtgacagagtgagactctatctcaaaaaaaaaaaaaaaaaaaaaaaaaaaagactgtggccaaatcagatggctggaaacaaaggctggagtttgggaatggagaatcaccggatatgagctgaaaaagtggctgagcctaagcgtgacaggtgtcaggtgccagtmtcaggagtaggcaattgtcctgcatgcagtgaaaagccagaagatggaaggaaggacaggatgcaaatgagttctcggaacgatccacctggtggctgggtcagggagcaggcatggtgacttcagacctcatggtacgttagaggctaatgtgaagcccatgtgaagctgttggtttaaactgggtcgatatcagtrgcwcacatttactgaccatgtgtccagccctgtgtgaagtactgtagtaaattgctccaatggaaactcacaataaccacagaaggccagtaacagcattgtcgttattttatcatgacgcaactgaggcttagggcagacagctggtgggtggtgggactgggatttgagcccactggtgtcccaggccyrgagcttggcttcttccattgtcttaccacagcctgcactcacaggagagtgactcataagttmcaataccatctgctgaccatctgctctcacactagaaggaaagtctacttgggaagacaatttaggatccgaattttggtagttgaggatggagctaggaaaagcggatacaggaggtagccaagttctgcttggacctgcagggagtgaggctggccgggctccaggtggaaatgcccaggtgaaaagggagacttggagttcaggaaagtaacctggactggagccataggtttaggtgtcagtggctcagagacagaagctcagcgtgtaggtgaaatcacccaggaggagaatggggatggaaaactgaggattgaattttgcaaaatgttcatacttccggggaaaacaaagaataaccagtgaataagaaaggggtgccaggtaagaagggaagagaatcagagtcatgaggaagcccagaagcccagaaaaagctgagttccacagtaagacctgggcaacagtgaagtatggagagcccaagattgggagcgtggaggaagagcatccaccactgaatttaatcagcaggggactcagggacgttggttggggaatcaagtgaccttcccagtttcttcaaaacttgagagagagtgcagtgtcacaagattgtgactacaaaagagtgcagtcagatttcaggggtaacaagaaagtgtgaaataagggagtcaaagcataaaggaaaaaggagaaaaaatggccgatagctagagaaggcagtgggtcaagattgtctgtggcctggcatggtggcttatgcctgtaatcccagcattttggaaggccgaggtgggcaaatcacctgaggtcaggaattcaagaccagcctggccaacagggcaaaacccygtctctaaaacaacaacaacaacaaaaaaatccaaaragttagctgggcctggtgggcgcacctgtcattccagctactcgggaggctgaggcaggagatttgcttgaacccaggaggcacacgttgcggtaagctgagattataccactgcactccagcctgggtgataagagcgggactctgtctcagaggaaaaaaaaaaaagttgagcagtggctgtctcatgttcctcttcctctgcccttctttkctcagtgtgaatccttttcctgsttttcagccccrgtggatgaggtccagatttctatcctgtcaagtaaggtggtrgagtctggagaggacattgtgctgcaatgtgctgtgaatgaaggatctggtcccatcacctataagttttacagagaaaaagagggcaaacccttctatcaaatgacctcaaatgccacccaggcattttggaccaagcagaaggctadcaaggaacaggagggagagtattactgcacagccttcaacagagccaaccacgcctccagtgtccccagaagcaaaatactgacagtcagaggtgagtcagggtctccatagcaagctgtgctgtgggctcccaagggcaagaccagaaaacacaccccttgtaagagggagttgggggggagtctagcttatgtgactgaaggctaggagagtaatgtcctccaggctcttggttgcaagtgacagaaacccactcaaattaagtaaaaaagagaaatcgattattataaggaattgggagaatgtcacatcgttccaattacaaattgttggcagactcaccattgagtcatcttgggtcaaacatccaaccacagaccacctgtagccaaggggattgggtcacgcagaacagacatgattggggaacccacttatgtgggtgggggcggtttcctggagaggaagagggctgaaaacacatgccaaaaaggagtctactccacttgagccctggagttggagaccagcctgggcaacatggtgaaaccctgtctctacaaaaagtacaaaaataggctgggcgcagtggctcatacctgtaatcccagctactcgggaggctgagacatgagaatcacttgaacccaggaggtagaggttgcagtgagcagagcttgctccactgcactccagcctgggcaacagagcaagactctgcctcaaaaatcaaaccaacaaaaaatagctgtgtgtggtggtgtgctcctgtagtcccagctactcgggaggctgaggtggaaggattgctcaagcccaggaagttgaggctgcagtgagctgtcatcagcctctagcctgggtgacagagtgagaccctgtttcaaaaaagaaagaaaaagaaaagagtctaccccagcaaagctggtttgttccctccttgaggaccacagctgacctctatttgtagcagaaacaatcatttctgcaccagctctgagtgcagaacccctcagaggtagatggatgctaaggcaagctgccagttacaagagctgtgagaatcagactgacttttgttgcttaagcctgatattatttcttcctggcagaggaagagcctatatacaaaaaaaattttttgttttgttttgttttcagtcattcttgccccatggaagaaaggacttattgcagtggttatcatcggagtgatcattgctctcttgatcattgcggccaaatgttattttctgaggaaagccaagggtgagcatagttctttccttccatactgactggtcgtccttgccaggaaaccagccagggatgcgtggtgcttttctgacccctggattcagctaggcaaaaatgaaagctattattttcctcattgggcaaaccagaaaagataaatttggggggaaattrcatctttgtgtggttagaagaagccatttctgtagatttgtccacacctagtcctgtaatgygtgtagagtggggtgcaagcgtcttggagacacacaaacatgcgcataacacccacatgttgcacacacacattgaatgctttgtaattaacctggtggttgtgctgtgacttctaccctatgcttggggttagctaagtaagcccggctgagcagccaggaccacctgctgataaccaggaatcagagtcagctgtccaagactcaaggaaaagggcagagcatcagtaaatcctgcaaaaatttttttgtgggataaggtaggttcttttggagcctctggtgctgctgcccaggatgggaggggaagatggggtgaggaggggccctggtttttgtcaggaaagctgccacccatcaaggaagatagagcacaccctggcgttgatcttaggccagcttcgagttacaaacgcagggattgatttcgcctttactttttgtaattatctggaatcaaagagagtggtcaggcacggtggctcacacctgtaattccagcactttgggaggccaaggcaggcagatcacttgaggtcaggagttcaagactagccgggacaacatggtgaaacccccatctctactaaaaatacaaaaaattggccagacgtggtgatgggtgcctgtaattgcagctactcaggaggctgaggcaggagaatcacttgaacctgggaggcagaggttacagtgagcccagatcacatcactgcactccagcctgggcaacagagcaagactctgtctcaaaaaaaaaaaaaaaagagagagagaggaagagagctgcctgcttatctggctaatctggttcccatatcattgtctctttttccatcatatttcactaacaaaaatcacttctggctaaaatagtcaagatatcatgtttctggggaaatatcttggtataagaccaagagaatacctctttcttttctgtcttttgtaaaagagtgaatatatttggcttctttttctctctttttctgggtattcaatcttctgggaagtcaaacgtagctgaaaagagtgttccttcacagcttactaggagtaaaacaaaaagaaaagaaaagtgttttctatctattaggttagtgcaaaagccattggcgttttggccattatagtggtatggatgtgggtactgtatactgactttggtttttcgttttctgttttaaagccaagcagatgccagtggaaatgtccaggtgagtgtatttgtaagaagggggcggctgctctgtgagcacggtggacatgtctggagggagattctggtcattaggaagttttcagtggctcttggcaaacttagaaaaatataggccttccttgagtgtgagttgtgtgtgtgagttgtgtgtgtgtgtgtgtgtgtgtgtgtatctccgtggaagaatgccaattgtcctttcatgggaaggaatggcttttattctgagatcatgtccttcctacatgattatttgtgaaatctccctttctttatgaaattataatggtagtagataaattttttaaaatttgacaaaatagagttggcctttaaaaaatggttttactacctttactgttgttgaaatcccaaatccaaaagtatagaaatgattgctctgttccagagagaaacagtagcgtgggataagaatttcaggggcttggtagtagcctgtgaaggactcctggtattcatgtgtgctttggtcctgatgtttattttaataggaaaaagttttatcaccgccaagcatggtggctcgcacctgtaatcccagcactttgggaggctgaggcaggcagatcacctgaggtcaggagttcaagaccagcctagccagcgaaaccccatctctactaaaaacacaaaaattasccgggcgtggtggtgcatgcctgtaatcccagctactcgggaggctgaggcacgagaatcacttgaacccaggaggcggaggctgcagtgatccgagattgcactgctgcactccagcctgggtgacagagcgagactctgtctaaaaaaaaaaaaagtttttttacataatccttggagctgccaaaaaatatttgttttcccaaatgagagagtaaagttttccttaccttggaaaactcttcctggttttctcatgatcttcccttgtttactttggtggtttggggttagaacaataacaacaacaaatatatctatatattgttttctgtttttatatttcattttaaggccagcagtaccacttctgaactcyaacaacgagaaaatgtcagatcccaatatggaagctaacagtcattacggtaaagtcatgttctcctgccatttctaatttcccccaacttgctacatacttccttagccctctcagaagcagaatatgtaagtggtgggattacagttggaagagaaaccctggcttcaacagggtacttcatctcatcagccactgggccatgtaatatacrgaaacgtaaaaggaaaggtaacatattttattctaactttgycaccttccaaactccccgtagaagaaakatggagaataatcataatgccttcaaagactttgaacattgctcyagcgtaatattataattctccattttcaagacagagaccagrtattgaatgaaaacattggtaaaacatcttctcagatggaattattacaagcacaagacagttttacttcaaatttgccacaaagggaawgcaatttcaatattctctcagtaaaggcataaataaagtgttccaactaagaaatatctattcataaggctcatcagtagcttcagggtcagctcagctgaatgagtagccagtcctaggagttcttaatcccaggttagtaagaaaattgctcaagcatttcagcagggatgctacttacttcccagagggggctataattacatcacaaaargtcctgtcccagaccaaatttggaacactcttcctcttttctttctttcttttttttttagacagggtcttcccaggctggagtgcagtggtgcaatctcagctcactgcagcctctacctcccaggctcaggtgatcctcccatctcagcctcctgagtagctgggatcacaggcatgtgccaccatgcccagctaatttttattttttgtagagatggcactctaccaatgctggtttcagactcctgggcttaagaaatccttctgccttggcctcccaaagtgctgggattacaggtgtgagcccctgagcccagccacttttcttgctttatcagcaggtttggtcatagaatgctcatgttcttttctaattctataaatgtctcacaaaataagaaatttttaggatatactttttacagagacatattttgcttgagaaatatgttttaagaattgagtaattcatatagtactgaatcataaactttaaaaaaggaaaataaaatatttgtagtaataaaagtaatgtgtcagtaaatagaaacgagcaaatatattgtttaagaaactatattctaggctgggcgcggtggctcacgcctgtaatctcaacactttgggaggccgaggtaggtggatcacttgaggtcagcagttcaaaaccaccctggccaacatggtgtaaccctgtttctactaaaaatacaaaaaattagctgggcatggtggtacatgtttataatcccagctactcagcaggctgaggcaggagaatcccttgaacctgggaggtggaggttgcagtgacctgagatctcaacattgcactccagcctgagcaacaagagcgaaactccatctcaaaaaagaaagaaagaaagaaactatattcaggccaggcatggtagttcatgcctataatcccagctctttgggaggctgaggtgggaggatcacttgaggccaggagttggagaccagcctgtgcaacaaagcgagactaggagaatcgctggaatctgggaggaggaggctgcagtgagctgggatcgcaccactgcactccagcctgggtgacagagcaagacattgcctcaaaaaaaaaaaaaaaagaaagaaagaaaaaaagaaaaagactacacagcaggtcaaatggagcccacaggagggccaacgaggggacccaggacccagagacagtgctggttgtcactacactgaataaatcaggcttgactttgttaggggtactgaatttttaaaaggttttagaaaactagaatttcccttgtcactcaccctaattgttatttttcaactaggtcacaatgacgatgtcrgaaaccatgcaatgaaaccaataaatgataataaaggtaattatctaattacatgtttttattagaaccaacttttacattaaaaaaaagactcataggaaaagaaaactaaaacttgaaggactgtggataatttcccacctctcttaatgaccctgtacccagccgatgtgtcaatgaaggtagctagctgctttcaccagagatgctatctagtgtcctcagtgggaaagtcacctaaatcaaagtagggaagaactgggttatactcaaaaaacaacttcctgactcataatgagctactgggtaaggcagtgggacctcttttttcttgagcattgaggtggtgatttttaaagacaatggacaataaattgctctcttctgcctgaagcactgagggattggactaaatcatttttcaaaattcctttcgctctgggctgctgccatgggagctaaggctcctaacaaagagaaaggattctgttaaggtctcttcctttctttcttttttttgtttttttcttgagacaagagtctcgctctgtcagccaggctggagtgcagtggtgcgatctcggctcactgcaacctccacctcccgggttcaagcaattctcctgcctcagcytcccaagtaactgggactacaggcgcctgccaccacgcccggctaatttttgtatttttactagagacagggtttcactgtgttggccaggctggtctcaaactcctgaccttgttatctgcccaccttggcctcccaaaatgctagaattacaggcgcgagccactgcgcctggctcttttttttttttttttttttttttgatacagagtcttactctgtcacccaagctggagtacggtggcacaatcttggctcactgcagcctccgcctctcgggttcaagccattctcgtgcctcagcctcccaagtagctgggattacaggtgtgtgccaccatgcccagctaatttttgtatttttagtattggtggatttttaccatgttggccaggctgatctcgaactcctgacctcaggtgatctgcccgcctcagcctcccgaagtnnnnnnnnnnnnnnnnnnnnnnnnnnnnnnnnnnnnnnnnnnnnnnnnnnnnnnnnnnnnnnnnnnnnnnnnnnnnnnnnnnnnnnnnnnnnnnnnnnnnnnnnnnnnnnnnnnnnnnnnnnnnnnnnnnnnnnnnnnnnnnnnnnnnnnnnnnnnnnnnnnnnnnnnnnnnnnnnnnnnnnnnnnnnnnnnnnnnnnnnnnnnnnnnnnnnnnnnnnnnnnnnnnnnnnnnnnnnnnnnntgaaatgtatctttgactgcagaatcattgttttggtagctgatgagaatccctattctttagggctttaaaaacaaaacagtaatgttatttttgacttgaagacaaactacttttctagctttcaccttagtaccctgagtgatttcattcacgtgtatgcctcacactctccaagtatttttagggtagtgacccctgttccccatttcccgaaatcctctcagtcttggaggtagctttgtttgcctgtggctgtggagaaggcttccagcatcttgagtgagactgaattgggagaactgctggggctgatactgggctgttttctgtctctactgacctgttccaagtccccccactgtagaaacagggacctaggccagagggtccctccacatcctggtaacagaggagtcagggaggaaaccatgggccccgaggccctgtatctgcctctgggaccagtgcggggttcgtactcccttcctcatcccgaatggaattaagcctgtgtctggctgccccctcaaaatacagaatactttaataacctgaatgaaaatctagccgggggcagtggcttatgcctgtaatcccagcactttgggaggctgaggtgggcggatcgcttgaggtcaggagttcaaaaccagcctggccaatatggtgaaaccctgtctctactaaaaatacaaaaattaaccccgtctctactaaaaatacaaaaattagctgggcatggtggtgcacacctgtaatcccagctactcaggaggcttaggcaggagaatcacttgaacccgggaggtggaggttgcagtgagctgagatcacaccactgcactccagcctgggtgaaagagtgagactctgtctcaaaaaaaaaaaaaaaaaagaaaagaaagtctctacttctatgatctgaggtgcccacaagagattccacctaaacaacaagctgctgtggtttctttgagcagagcctctgaactcagacgtgcagtacacggaagttcaagtgtcctcagctgagtctcacaaaggtaagtgccactcgagtgagtccccaggcattgcctttggcttgggtttaaaccccagtggtggcgggggtgctgtgttcagtgagaagagtctgtgcaccctcagtcgctccaaaggaagtgattagcagacctaccggcctgctaagactggaaggagcaaaggcccctggccctggccctgtctctgagctgtaaaatttcaataatttaaaagaaaaaaagaaaaggccaggcactgtggctcacacctgtaatcctagcactttgggaggccaaggcgggtggatcacctgagatcaggagttcgagaccagcctgaccaacatgataaaaccccatctctactaaaaatacaaaaattagccggctctggtggcgcacacctgtaatcccagctactcaggaggctgaggcaggagaatcgcttgaacccggaaggcagaggtggcagtgagctgagattgcgccactgcattccagcctgggtgacagagtgagactccatctcaaaaaatatatatatatatataaaatatataatatatataatatataaatataaatacatatataatatataatatatgttttctttgtgtataatatatattttataatattttatatatttttattttttatttttatatattttatatataatatttttatatttatattatttatatattttttattttatatatatatatattttttttttttctttgttgagacggagtctcactctctgcccaggctggagtgcagttgcgaggatcccgtcgacctgcaggggggggggggcgctgaggtctgnnnnnnnnnnnnnnnnnnnnnnnnnnnnnnnnnnnnnnnnnnnctcactgcaacctctgcctccgggttaaagcgattctcctgcctcagcctcccgagtagctgggattacaggcatgcaccgccacagccgggtaatttatttattttttttttgtatttttagtagagatgggatttcaccatgttggccagcgtgaactcgaacttctgacttcaaaagatccacccccctcagcctcccaaagtgctgggattacaggtgtgagccaccacactcggcctcaataattttaaaaattaattaaagaaaaatagagacagggtttcgccatgttgccctggctggtctcaaattcccgggctcaagcaatctgcccacttttgtctcccaaagtgctgggattacaggcgaagccaccacacctggccatttttgataattattcgttatgatactactaataataggtaagatttattgagcacttactaagtgccagggaattaggaagtactgagcaatttgtcccttccagaggtagaccccctgccaaacccagtgtgttcctaaagttgcttgtgcagactgaatgtgtgtcaatcaaatgcatgtttcaagatatcgagtgctttgccatttagagggacacttaggtaaaggcttttgaaagcacaagatccctgtccgtgtgagcagtggcactgattttacaccttgggttttgtttttgtgtatgtggttctctcaagggcaggctggcctggaagtccctgtctctggttctatgctggggaaatggatgcagagtgggctgctccatagaaaatgctagaacatcaatctcgtttgttttgggcaccataaaaaacatgcatctcctggccaggcacggtggctcacacttgtaaacctagtactttgggaggccaaggcaggtggatcacttgaggccaggagttcgagaccagcctggccaacatggtgaaaccctgtcttccactaaaaatacaaaaattagctgggcgtggtggcgcatgcctgtaatccatctactggggaggctgaggcagaagaatcgcttgaacccgggaggcagaggttgcagtgagccaggatcaagccactgctctccagcctggrtggcagagcaagactccgtctaaaaaaaaattaaaaatgcatctcctaactgtcctcctcctttgygaacccarattgggcagtacacagtccccgggggtcactgcacmctcctgcacgctcaaaggaaacagtggctcctgcacrctcaaaggaagcagtctcagaaccttcctgcccagctgggaagctccctgggatcattgccatctgtctcccttcctctgaggctaaccccaggctgcatccacctagccaggcaggcctggggtagttttcctgactgtgcaggctgaatgsgtgcagttttccaggccgtgccagccactagccagaccacatggcaatggggtcctgaaatcaccccttgctccatgatctgggaggagtcttggacttctccttgtcttctctttttgagcctgggctgagtgtcagcagctgtatgcacagaactttccttacagggatgccccgtagagccgctgggctgtgtgctgcaccactggggcacattcccatagcctaccaacagaatggcccccgggggttgtgtactgcccaatctgcacaactcacttccaagtctagactggacctgagaggggtggggaacgcggcaggcctgaagctctcttcctcattttttttttttttttttttttatgacagtcttgctcttgttgcccaggctggaatgcaatggcacagtttcggcacactgcttcctctgcttcccgggttcaagctattctcctgcctcagcctcctgagtagctggggttacaggcgcccaccaccatccccggctaatttttgtatttttagtagagacagggtttcaccatgttggccaggctggtctccaactcctgacctcaggtgatccacccgccttgaccacccaaagtgccgggattacaggtgtgaaccaccaggcctggcctcttcctctttatttcattgtagagtgattgactcgttgagataacaaattgtgattaaggccctacgcaggcagcacaagcacatacagaccctcccttgtggagggacagcctgagaggcagccaggaacacactgcagcaaagccctcctaaccttcagggatcacctaaccttcagtgatctgcccacctcagcctcccaaagtgctgggattacaagcatgagccactgcgcccggccctggttttctttttcttgctcaaaggtggggaagggttgaagggacaagaaggaggtattgtaatcccagcactttgggaggcagaggcgagaggatcacttgagcccaggcattcaagaccagcctgkgcaacaaagcaagaacttatttctacaaaaaatttaaaaataaggaggtatcgagaccctccaggattgggtgaagcagaggcggtcagcatgtgccctccttgccaagctgtgcagctgcagggatgccatcacctaactggtccctctttccccatttgcrcaaaagctgtgtgggctgcagaggtccaggtagacccgtaaagagggtcacttgggggcaatggagagctttttgggaattcaatttgagttttctagacccgtcctcctccttggcagctaaggagcagtgtgggaagtcaggcctgagcctcaggtgttccctctctgccttcctgtgggtggagagccaggtattaccaggtacgaaaaggggctttgtgggtacaaggccagtggtgagtacatttgacctggtcttgaccaagccagttccctgctctcaagacttcctcctcctatggaggaggggttgggaaccacatccagctctgaccctagtggcagccgaccaagtggtcacttggggtggaggaggggcaggaaggaactcagtaaatcctggtttgctgcatgtttgctctgagactaattgctgggaaaaccccatgacgttgaagccatctccttctctgttaacacagagaaaaacagaagccaaaataaagccccatccggaaacatccctgacagcagagacaaagagcctgccagcctggtttactcattagcaagcagctgctgccgtggagtgggtggggaggagaggtagtgatgagctgcaactctgcctgcccacccatcacttaactgggcagatttgggggcagctgcaactctagaagctccaccaagaagcagaaacccccaggcccaaacaccaagccctctccctccatttattcctcacctgccccagcccccactgtgggcctgggtcggagggtgagctggccgtgaccaccccaccatgcgcctggtatatggtgtttgatagcatttgttgcagtgtctgcgttgtttgtgcacctgtctgcctcrcagcctggagctcctgaaagctgggaccaggcccgatcacctttcctcttccacagtgcggggttcacactaggtgtctaggattctgctgagtgagtgatttggccaggcctgacatcaagcagagggtgtcttggggatgtggaggatcccccaatagggttggggatccctacagcttyccttgaggcccccacatctggtgccacagaaagagagtgaggggtgtgtgggcatctctgctgtcccagcagtgtggtgccctggtagctcagccactctactgagttccaaatcctgtttggtgccctggggaagtcagtgtaaggccctagtcaccccaaatgccccaagttcaactgtagggatctgacccacccccaggctttctcctcacaaatggttcctgacacaggagccaccaccattactgtcacttcaaacttggacaggtgcccccaggcagctgagcaagcctaggaatgggacatgtccaagaccccagctgtcaccccataggaggtcggggtctgccagggagacggacttgggaacaagtcacatcggtgtgttgtggacaaatgtcaccaacatgctgtggagctcagggggccctgtaacttcccagggcacagagggagagtgagtgtgggtgtgttggtacatgcgtgaagctccaccagggtcgtggggaaatggggcaaggagaaagggcagtgctggctgtggaggagtgtgtgtggggccaggaagtgagagtggggtgtccctggagcatggtgagacaagggcatctcagtgcaggtagagtccagggtcacaccccagccattcactccaaggagggaaatgcactgaccatggcacaggaagccccttaccctatctggggcttcctttccccatctgtaaaaggagaacagtggcccacacgacatcaggctcttttctacagtgaggcttcctgggcctttgtgcaggtgacaggagctgggaagtggccaggttccatcctgtttcctcagggttggtgggtatgtatgtgtgtgcacaccctgtgtgcatgagtgtgtgcacacccagattgcatgtttgtacatacagtgtgtatacaatgtgtgtagacacatcctatacactgtatgagggtatacatagcatgtatacacattgtgtgcatgagtgtgcgtgtgtatatgctgtgtgtgtatttttgtatacacatcctgtgcccataccccagtgtaaggtaaacagatggcaggaagggcgcccttgagtctcctccaggtatacgccacaccctgggtcagtcatcatgctgccatattgagagggtctagcccagaggatctcagccctgtctgcatattagggcccctgaggagatcctaaaaaaccagcaccagggacccccccagaccaatccaaccagaagctgcagtgaggcccaggagccagcagtgaaaacagccagcccagctgtctatctctgtaagagttctcagtcccagctattcctagggtcactgacaacccccaggctctaacccagacctcaggatctygttctggatcccggggtctgggctctcaggtgattgggaggccatagcccaaccctgcgttgagggacctggcagaatgtctggacaagggtcacggtggcaggggaagaggagtggggccagcaagctggaggctgcaggcccttgctgggggcctctccatccgtggcccctcaggtccagggttcctctggtgcatgtggccctgctccacaatggcctgctgacctcctattcccagactgggagtgacgctcgttagaccaagaccttcttcttcttcttcttttttttttttttgaggtggtgtgtcactgtgttgcccaggctggagtgcagtggcgcaatcttggctcactgcaacctctgcatcctgggttcaagcgattctcgtcccttagctctcgagtaactgggatcacaggcacgcaccaccatgcccggctaattttttgaatttttagtagagacggggtttcgccatgttggccagaatggtctcaacctcctgacctcaagtgatctgcccccctcaccctcccaaagtgctgggattacaggtatgagccaccttgcccagccaggatcttctaacatcagaaatgacaaggtctctgggtgcttctggacctggttctggtggggtgcagtggtggggtacagccttgcctgcagagcctcagaccttttcctatgactgcagtggactgacctcgttcccagaggcagctactaacttatgcctggtcctttttccagatctaggaaagaaggacacagagacagtgtacagtgaagtccggaaagctgtccctggtgagtgagggtctccagtgccccagcctgggggatgccccctagaatcwctgatggggccttgggagtgggcagagaaaagaagaagcaaagaaggccaaaaaaggggtgccacctcttacaccagcgctgtgggcttcctctctcccaccacccttaaaaagtcacctcgggtcacatttactattcatgtagtcaacgagcgcttcttgaatgcttactgaccccagccggtgacccttacctgctccccacacaggccctggtggctggggttccccaaggtcttggacgtcgagtgttttgctttggagacccccagtagcttcagcctttcttcttgttttcttttttctcttttttttttttggatayggagtctcgctctgtcactcaggctggagtgcagtggtgcaatctcgactcactgcaacctccacttcccggatttaagtgattctcctgcctcagcctcccaagtagatgggattacaggcgccygccaccacactcagctaattttttttttttttttttgagacagagtttcgctcttgatgcccaggctggggtgcaatggagcgatctcggctcactgcaacctccgcctcccggttcaagcgattctcctgcctcagcctcctgagtagctggaattacaggcatgtgccaccacacccagctaattttgtatttttagtagagacggggtttctccctgttggtcaagctggtcgcaaactcccaacctcaggtaatccgcgcgcctcggcctcccaaagtgctgggattacaagtgtgagccaccgcgcccagcagcttcagcttttctgacagtagactgactttgggagtgggtgtgggtttgcggatctgctctatttcctttggttcggctggccccacttcgcttcccgtgacgacccactgcttactcatgaaagggcttcccccagagctgagcacagagcttaagcagacccggaactgggggagctcaacaagtcctttttttcggtgggggggtataataactgtattcaattctggtgaaatgaaatacacaatgacaacttttaaattctgaaggtaagtcagcaatccgaaagacgtaaacattgtgggggaaatagtgactgtgtgagtatctcgctttgtacagcagacctctatttaagtgggttcttggaaagggaatcattaaaatggtccaggacatttctgcaaagggtggctactcaggctaggcgtggtggctcattaagcactcagtaagtgctttatttatttattcaaaataaataaataaatataaaaggatgactcctccgagtacagtcggcaaaccagcagcagcaatctcgggcccagcccagacccacaaaactagtctctggaatctgaacttagccagcttcagatgtttctgatgctgccaatatttgagaagcactgtttgtgttttgttttgtttttttgtttgaaacagagtctcactctgtcacccagactggagtacagcagtgccatctcagctgactgcaactccgtgcaacaccccccggcccctaaggcttaagcratcctcccaagtagctagaaccacagacacacaccaccatgcccagctaagtttttgtatttttggtagagatgaggttttaccatgttgcccagactggtcttgaattcctgagctcaagcaatccacccccttcggcctcccaaagtgctgggattacaagcgtgagccactgtgccaggcaaaaagcactgttttagaagaaccatccaattctctgaggaccctgctttttatctgaaatagcgatcacttcttaattcacttttaaaagttggtatatctacaagaagaatagaaactcaacccttgtggaacttgaccctgaataatttttgaaaaaccaattctctggggaatttttagctcaaatacctcatttcacaatctccatatattcagagctaacaaaatgcaaatctgacaataaayagccgttctctatttgtctagtgtaagggaaagttataagygaggtagggttcaaggttgctcccattgtgcarttgtacaaaaatgccccttctactttcttggtggtccctgagagtgttcgctttcttggacactgctgaagagttcactttcagttgctttcgttaagcaaaatctcctatttgagcacttattgtatgtgctaagtggtctaagtacatcgtgtctttcaatgggatttgtccatgggattcaccacaaatcccattttacagttgaggatactaaggcatagagaggttaagacgcttgcccaagatcacgcagcaagcmagcccctgagaatcgttcctccccggagtggactccacgctcttgatcactgaggtgtactgtcttcggtttgggaaagtcgggtggtagaaggtggaagctgcagggatcctcgctgcaggaggccagctccttaccacctctgcctcgaggcctccagcgaagtctgtgatcatctgaggctactggttggaggcccttttataggtggtgaggggcaccttagtgtggattctagggaaaaacttaactttttttcctttactctcctaagtgctctgactggggccctgcgaattggacaagcagattaacaagaggaaaacagagtttattaacatacataacgcaaatcacacaggagaaacatcaatgatgagtaactcaaaggggtggttagcacttggggtctataaagcatcttaggctgatcgcagtggctcacgcctgtaatcccagcactttgggaggccgaggcgggtggatcacctgaggtcaggagttggagaccagcctggccaatatggtgaaaccccgtctctactaaaaatacaaaaaattatctaggcatggtggcatgtacctgtaaccccagctcctcgggaggttgaggcaggagaattgcttgaacccgggaggcagaggttgcagtgagccgagatcacgctattgcactccagcctgggcaacaagaatgaaactccatctcaaaaaaataaaaataaatataaatatataaagcttcttaacaaagagcaataaatttgtagacaaatgacaagacaaaggaargatggtttttggcttyccagagtggcaaactgagaaagtcaatcaagtggccacaaatattttatgggggcatttacagcaggtgtgttttcttaggagtttctgcttttagggctgggcatggtggttcatgcctgtaatctcagcactttggaaggctgaggtgagagaatcgcttgagcccaggaatttgagaccagcttgggcaacacagtgaggccccatctctaaaaaaaaaaaaaaaaaaaaaattttaaaaaatttaaaaaaccaatataaaaacaaaaattagctgggcatagtggtgcatgcctgtagtcccagctgctcaggagactgagacaggaggatcgcttgagcctgggaggtggaggctgcagtgaactgtgattgtgccactgccctccagcctgggtgacagaatgagactgtgggttccaaaaaacttaattttcttcctttactctcttaggttttctgactggggccctgcaaattacacaagacagattaacaagagaaaaacagagaccctctttgtttttctcttgttaatctgcctcaaaaaaaaaaaaaaaggaagaagtagtttctgcttttagtcagataaacaagctctgggaagacttccttctacatctgaaccagctcaaaacaatccttatgccaaaggggcatattttgtggtggcatattctgatttccttcatctgctttagggcagctggctgttcaagtgggttctctcggggtctccaggttggttctagattactcagtccgggctgttggaacctgacccctcaggcagaaactataggcatcgtagaacccactcttgtaggatttgaggcggtgtagagcacaggctttcctgggagacatcccagtccccgttctgaggcagcccccaatcagctgagttactgtgaccaagatgtcttacccctcagagactcagtttcttcaactgttaaatgcaaatggggttaaatgagatagaatcatgggagatggtgctggttatccccacagtcactgtattatccctgccacagagtgagcacttaatcaatttcagtttaaaaacacaggaggaacttgagccctataragttcagtgtcttgcccagggtactactagagcagtcccctgactccgagaccaggaccctcccacagcaccacctgggccacctggagtcaatcagggctctgtcgctctacaaccttgtctctaaactggcagaccattagggaacctgccaggtctctaacctgcccaggggtgaaggtagagagagccctggttcttgcacaggctgtagccctyggggcctgcagctgcctgcagctgtgcctccaacccacctggaagcctctggtcctggaagccaaggggtttcctgtttgtcagtgcttccttgaggagaggagcctgcaggacatggctgatttcttttctttctctstttctctctctctctttctttctctctcgctctctctttttctttttcttcctttctttcctttttcctttctttccttttctctttcctccttctttctatctttctctctctctctctctccttccttccttctttcttttcttttctttcttttttgtaagacagagtctcactgtgtcacccaggctggagtgcagtggcacgatcacagtgaacagcagcctccacctcctgggctcaagcgatcctcccgcctcagcctctggagaagctgggattacaggcacgcaccaccatgcccagctaattcgccatgttgcccaggctattgcccaattcctgggctcaagtgatctgcccgccttggcctcccaaagtgctgggattcaggcgtgcgccacctgaatgctcagcttttctttcttttcctcttactggttgctaaagagcaggcatcccatttgaggaatttctctcctaaattctctgggacttccttaatagaaaacatcttccaagtaatctcttttccttcactccctacataaaatcagagagattccctcctctctgcctggggggagttagatgattctccaaagagccagatccttcagccagcagtaacccacccgcttaggcttctctcacactcatcctcagcctctctttgttcaagtcttccccagagcccagagctgttaaggatcatcatttctttctttctttctttcttttttttttttttgagacagggtcttcgctctgtcacccaggctggagtgcagtggcgcgatcgcagctcactgcaacctccagctcccgggttcaagtgattcttctgcctcagcctcctgagtagctgggamcacagctactgccaccacgcccgggtaattttttttgtatttttagtagagacggtgtttcaccatattggtcaggctgatctcgaactccagacctcaggtgatccacctgccttggcctcccaaagtgctgggataacaggtgtgagacaccacgcccggccagatcatcatttcttattcatcatcataaccatccccagattcttcatcattgccaaattcttcagcagctctttcctctggatattattccacctctgtagactgcagatttcttttgttccatgttgattgttttctccctatactctaattatcttgcggttgggcgggtcccttcctcctctgtcacagttaaagctaatatgtattgagcactccctctgtgtgagacacttggagccctaccttaatccccaagatcatctaacagttgatgggggttctattattattcttgctctgcakatggggaaacgggcccagaggttaactaatttgtccttgttccacagccagtggcagagcaaggactgaacccagggggcctggctgaagccatgctcttcaaagccttcctgttccctctctttttttctcttaattggtttgttaccaattgctgtccattgtttgttgccaaaccaattgactgcattcttttctgttttccatctttcttagtttaggcttcatgttatcggcataattggagaacktttgtctmcttttttttttttcagacagggtctggctctgtcactcaggctggagtgcagtggcatgatcttggctcactgcaacctctgtcccccggcctcaagcatcctcccctctcagcctcctaagtagatcctatctactttaaacatgaagagtaatattctactgtggcctgkgtgaccctgggcaagtcataragcctctcaagaccttggtcaccttctctgtgagatgaggtatgggctggaggcaggtcagtggtcctcgggctttattaaaacatcaatagtttggcgcaccccactccctgtgaatttcccattcactaggtctggagcggtgccgaaaacgtgcatttctaacaggtgtccacacgcagctgctgccgtcacgctggggcccgggctttgagaaccactcttgatgcagcatgttcctttctgattgtgccacgctaaggctctgcttcttgttggaaggagtagggtctttctcaccctccagaaatcctggagggatctttcagcattggtgggcaggtaaaacccagaaacactgtgcttattagagggaaggtggtattgagtgacccccaataaaacagggggcccagggccgcgcgcagtggctcacgcctgtaatcccagcaatttgggaggctaaggcgggcggatcatgaggtcaggagatcgagaccatcctggctaacacggtgaaaccccatctctactaaaaatacaaaaaattagctggacrtggtggcgggcgcctgtagtccagctacatgggaggctgaggcaggagaatggtgtgaacccgggaggcagagcttgcagtgagccaagatcgcaccagtgcactccaggcctggcgacagagtgagactccatctcaaaaaaaaaaattggggcccagtgtggggtaggtttgtgagatcagtgagccagctgggtgcagagcggagtctttgctgacctttccccttcatgttccccrtcatcttctagcatgcagcatttcaggactgcctattttgggaaatggcttaaagggcacagttctggcccttaaaccccctttcaccccctgagtaatacaaaataagccctcccctagataagcaatagggcatggggcaggcctgcctccaaggagcagccccagggccgaggagagagagctgggcgctggcccaggggacttgagtttgatgggaaagcttgcagacagtgggggagctgcctggtctttccagtcttggcttttggctctaagcacagcttttttttttttttttttaattgttgtatcatgaggcgccttccactcagctgcctccccacgttaggggatggacacagcactggcagggatccctgtgtgtctcagtttccctattgactctctgtggcctagagatgtatggtagaattccacactatgctttttttccaccttttttttttttttttttttttttgagacagggtctctcctctgtcacccaggctggagtgcagtggnnnnnnnnnnnnnnnnnnnnnnnnnnnnnnnnnnncaacctccacctccccaggcaggcccctctgactcagctgggactacaggcatgcaccaccgcacccagcaaaatatttttgtattttagtagagatggggtttcgtcacattggccaggctggtcttgaactccagagctcaagcaatccgcccgcctcagcctcccaaagtgctgggattacaatgcccagcccacttttttttttactttttacaattttattcttaaaattgtggtaaaacacatatcacataaaatttaccattttaactctaagtatccagctcagtggcactaagtactacacttttggttgtcatagcgtggtgaacagagaagagaatgctactgcgtctcgtggagagaggccagggataccgctaaacatgcgacaatgcacaggacagccccctccccaccacaaaacaccacccagcccaaaatttcaacagggccaccatggagaaaccctggccagaggaattcacctcctgcaactcctccaacaggagagctggttttcctctccagtaccagcttttgcctgccctctgtcttgggaggtgacttaaggcacatcccacctgattactgtggctctggatgggtgctgagtcttgctctgggcaccagccctacctgttgagccagaggcccacctccccatcacggaatctactcactcaatggtccatcttctacttttttgttgctattttttgttttttgagactaagtcttgctctgtcactcaggctggagtgcaatagcacgatcttggttcactgcaacawtcgcctcctgggtccaagtgattctcatgcctcagscttccaagtagctgggattggaggcayrcaccaccacgcccagctaatttttgtatttttagtagagacggagtttcaccattgttggccaggctggtctcgaactcctggccacaagtgatccaccggccttggtctcccaaagttctgggatgacaggcgtgagccactgcgcccagtccaccttctactttctatttgcctggaattcagacttccagggtgtttcttagggaggcagaaaccctggtcctcaccgcatcccctgccacccagtataccaagactagctgggccgagagtagccgtgacaggaaatggctgagaaagaaccaaagaaaaggaggcctctgtgccaagtctcctatgggaggaagagaagagcacttgaggatcagtccccacccatcctgtgaggcccagagccagtgaggccagagggcactgccaaccctgcccctggggaggcatttcctacttcagcgtgcaagatggtgaaaaagtatccccatgaaaaaatggatgctacctccaattcaactttggtgatgattgctctgttaccaaaaaaacaagaactgcaagtgtgcatggagtaagtgttccatccgtatttgagtttttcacattttgtcttcagattgctttagaaaatgcctacttgaggttctttygctgttgggagaggttccagagcccttaggggactaggagggtccaggaatcacggggtcctttgggtccttgcaggtcagatttgcattgggggtgctgtcctcaacctcactcaatgcatggaagttgacacaatggctcaacattascgttgggctgattcatcatttggctgttgacaccagcctctggcccagccaggacagaaaaagggcccctgaggaacttctggctctgttccctctatgggggaggggcagtggacttgtgataagacagggtgttagggtgaggtggacttggggaaacaggatatttctaaattagagaaacagaaggattgtgacccccgctgtgacagacaggccctgagcctgcccgaggtccaggaggaactgtatgtgagcttggggctgggtctatactgaggccccttggcrtacttttctcgataagactgaggacttatggccctcccaccattccctccaccaccttcgagaacagcaaccatccccaatgcccacatctcctcttggggtctcccccaggcagcaggtgaggtccccatgacttctctgtcttcaagtcagggtccacagtcagctgtttggggatctgccccagcatgtgggccactgaccattgggtggggtcctggtcctttccagaagggcaagccatacccgtcacttgcctctcataggaaacaccatctctaatgaatgcaggcagggatcacccaccacctatgcagagcttcctgctctcattggcttttctcascctcactgtcctcttgctgacatccggttgggaccatttgcgcaactgcagactggcagggccaggcaaacacagcatggcgcctgccaagaaggtggtgtgagactgggcacagtggctcatgcctgtaatcccagcactttgggagactgagatgagtggatcacctgaggtcaggagtttgagaccagcctggccaacatggcgaaaccccatctctactaaaaatacaaaaattacccggctattgtggtgggcatctgtaatcccagctacctgggaggctgaggcaggagaattgcttgaacccaggaaatggaggttgcagtgagccactgcactccagcctgggtgacagagctagaccccgtctcaaaaaaaaaaaaaaagaaggtggtgtgggctcccacacagttgagaggagactcctgaggggaaggggaaacagttgcccagatctgctaagagcgttggcaatgcttctgcctcctcctctgttgagcctgctcctggaagggattgacaaaatagtatgaaatctagaaatagctttattcccaaagaggataccggtggtgttattgaaaagagcaaaaacttggaaagcacctacatttttaaagtaaggaattggtgaagtcaatagttgyacatccatttaacaattatttagtagctaattggacaattatgcttaagaagttttcagaaaaagtttataaagccatgttatatgaaaaagttaagttataaaatggcatatactgtataattataactgctccccacccccaaaaaagccaaatcgtagtggaaaatgactaggaaaaaaaaaagtatcaacagggtttggagaatgaggccagrtatcatttttatctgctacttcctactttccatagttttcatttttttcttaaaaaaatatgtgctactaatttttttttttttttgagatggagtcttgctgtgtcrcccaggctggagtgcagtggcgcratctcagctcactgcaacctctgcctcctgggttcaagcgattctcctgcctcagcctcccgagtaactgggactacaggtgcccaccaccacgcctggctaattttgtatttttagtagagatgggatttcaccatgttggccaggctggtctcctggcctcaggtgatccgcctgcctcagcctctccaactgttgggattacaggcatgagccaccacacccagccgtgatactacatttctaaaaaactgtttaaaatgttaaatgaggccagatgtggtgactcacacttgtaatcccagcactttgggaggccagggttggcagatcacctgaggccaggagttcgagaccaccctggccaacatggcaaaactccatttctacaaaaaatacaaaaaaaattagccaggcatggtggtgtgcgcctgtagtcccagcaacttgggaggctgaggcaggagaattccttgaatctgggaggcggagggtgcagtgagccgagatagtgccagctgaggcaggagaattccctggaggtagaggttacggtgagccaagatggcgccaccacactccagcctgagtgacaaagcgagactctgtctcaaaaaaaaaaaaataaagaaaattttaaatgaagtgccagggactttatgcgcatgtcatgtggagctagagggtcccggggaagctgtcttgcacaaaggagccataaacctctaagggcacctgccggctgatgtctcctggctctcgcctcctccctcttttctcgacctgctcctgaccctgtgatgttgttggggcagttgaactgggttatttgcgttgctcactgccatgtyatcctttgttttgtagatgccgtggaaagcagatactctgtaagtacacatttcatatacattatatttaaaagtactccactgaacagtgraatatttccagactcacccacgtcctgcattcacaygaattcttccccgctccctagtctgtttcagaccagaagccctgggcttctctgactagccttggccagttctgatttcgaatattctctcctgcaatttccatcattacatctcagcccacacgtgaagggattgggactctggggtgcttagcgccaaacaagcaaagcacacatttcgtttaacgccaaagtctaggctctggaagtgaggcagatctagggtgtatgcttggaggagtggagcagctgacagctcattgcaatttagccgatwctaattaccccctacacaccaggccatcagctgcaggagacacccaagcttcttgacctcagttcaccttctgatgagggaatcagacatgtgatcacttatcataaagcaaagtgagctatgccagagcctatgggaacacagaacagagacctagctagtggcctcttccccaaggaatcatttggaatgggccatgaagaatgaatggagtgatggcagcattgagggagaaagatcagcaggagcacaagggtgagggatgaccagtttcaagcagtgtgggatgggaaaagaagagtgtgacagtgacaagtgacgggagaaagataagtcagggcttaaatccaaaggatttacatgccttgttaagaagcttcattctgtaggaaatggagttaggaatctgctatttggcagatgggagggtttatgaaagacacagaggcccacgttcaacttttgcaaagacgtgtcttccaatcccaacctttttgtgagctacccagcaatgcaggagttaactgggcagctaatatctgaagaaatgaggcatttgccgcataaacttcttttaggtctgggaagaactttcagcaagatttctggtagctcttccagtgggcccctggcttcctttgttttgcccatgtctggactcttgtaaaacagagctcattatgcctttgacagacaggaagccactgacattctttttatggaagaaagctatgaatttaaggaaaagaggaatgaaatgaatggttgttttttttcctagccaaaacccactcagactcctgaaatcagagactatcgtgtcactgggacaaggagcccaatttacagatgaggaaactgaggcctgcactggtagaatagcrtgtctggggtcacctggatggctaatagagtgaggaacagagcccaggcctctatactctgcggccagtcctctgtcacgacagagactccctccaagatgtgaagttgctgtcccagcaataatggctttgagagagtggaaaatgaggtctttgctccctgggcagtgcgggacacaratgtgtystcctgaagcgataaacatggctgggtccacccaaaacaccctgtaggaccaacttatttactttgtcttggatccaaagggtgtctctggacaaaggcttggagctccaggccagacagaactttacccagaagctggcccttgggcctcaaagtctgctcccaggatggttctgagagctcacccatgactggtcctgtccccccagaaaaaagaatagagtcatttgatgggagcacagggtttccagccrttgggaaaggaattttgaacctttaagcaaatgggttttgtttataaaagaagcaggtatagcttccctaataatcagctggtgtgggtcaggagaaaattaattgaattgcccagtggggaaatgggaggagatttccttcctgaaatcaaacctggcgatcattcccagttgtttaatggccgttgcctctgaaaacattggaggaaatatcttaacaatgagatagccacgtagccaaagactaatttggtattgtttgacttgcttcaatggcacattctgacttcatttttcctctgccatttttaccttgtttataaattgtgtgtgtggccgacgcagacagatagcatggaagagaacaccctgtacttaaatgaaaggggtgaatctggacttgtgagagtcttgggatcttggaaaggaccctgccttcttacagaaagaaaggcaattggcagctatagctcgcctccccccttcctggaggccaggaggcagctgggctacagtggaaactgtccaggtgctaggatcaggggatgggaggggagctccagctttccagctgtcttttgggtgagcctgtcttcctcaagctcaagcttccttatctataaagtggagatggtgatgacaatgatgataagagcaacctattaggattttaaggatgaaatgagcaactgcaaccaccatataaaagctgcaagctgcaaaccaccatataaaagctggttgatctcaagctcttttcatcacttgggcaatagtaggtgtggatgggggacttaacttgatttggccatgaaatgaccctgccacatatggagaatgtagcagttgcttacccaaggcataggattcaaccaaggccaggctttgacttaggaatcagagacccacattaacayttgacttcccrcttcttagccatgtcaccatgggcaaatttcttggcctctcaagacctctrcttcctaatctgtaaactgggaatcataaactccctcacttggttgtygcaagggttgaatgagcacctggcatagacctggtctattgcaagtgcccacaggagcactttgtagaagcaggaactagagatcccagggtgtgttgaaatcaaaatgacctttgagggagaccacaccatattccgggtacaaggcagggcgatttcacaactgcacttgggtggctgatggctggcttctgatttaagcacagcaagcccagaccttggatgtgagcgtgttaacctttacttcaaaatccctaaggccctgttgattgtggcccagcccttcctgtctgtggctttggttctgcaatggtgccccaggcattggctgcccccacagagagagagcggaggtgtctggggagggacttggtctggggcccacagaaaggctggacaccagagtcatgtctcccccatccaggcagagcagaggaaatagggcagggtggctgccggcgctggcaggcctccagcctctggggccagcacggcttgcttggcccacttgcatggggctctcctggcagaggaggggccagagccttggctttctagttggggcacctcggccctgcatcctgttccccaagggtccttggacccagcagggctgaaacaaaatggagacactatcccagctcaccctcaggaagccagccaggctggctgtggaggtcccaagaccctgggtcatcctccatctccagcttctgccttgctgagttccacctgcagcagagtgtcctgtgcacatggagggtccagaatagtggacttaggtgctgcctgctcttcagggcccactgttgcccagggcccccctctactctggtatctcccagcaggccctgctctttttccctccaagggctccttccatttgtcaaaatccaatctttaggctgactccagagttgcttctgtgaatcccccactgcccagcccagagccctctcagtgcctctgaaccccttctgcagtttgttgagacctcttataccttctacttcrtagtggtgttgtttatcaataattgatacaatataaaattcttggggacagcttcttgcatccccagcatagagaacagtgtgggtcagataagggtccaggcactgataggtggataggtgacacaaataccatttgaagctgttaaagagcactacaggatggcagaaggaatccaggaatccttttgtgggtgtttttttgctttttttgtttgtttgtgtgttttttgagatgaagtctcactctatcacccaggctggagtgcaggggtgctatttcagctcactgcaacctccatctcccagactcaagtgatcctcccacctcagcctcctgagtagctgggactacaggtgcacaccaccatgtatgcctaattctttgcatttttgatagagatggggcttcgccatgttgcccaggctgttctggaactcctaaactcaggggatccacccaccttggcctcccaaagtgcygggattacagggatgagctaccatgcccagccaggaatccttttttttaattgtcataaaatatacataatattaagtttaccattttctttttttttgagacggagtcttgctctgtcrcccaggttggagtgcagtggcgcaatcttggctcactgcaagctccgcctcccgggttcacgccattctcctgcctcagcctcccgagtggctgggactacaggcacacgccaccacgcccggctartttttgtatttttcagtagagacaaggtttcactatgttggccaggctggtcttgaactcctgacctcatgatccacccgcctcggcctcccaaagtgttgggattacaggcgtgagccactgcgcccgcccggcaaattcaccattttccagtgtatacttaaccattttaaagtgtataattcagttgcattaggtccgttcacattrctgtgcaaccaccaccactatccatctccagagctttttctttttaagtgaaagcaagtttattagagaagtaaagaaacaaaagaatggctactccataggcagagcagccactgaaacactgtacccattaaacactaactccccattgcccctccagcaacccctagcaaccactgtctactttctgtctctatgaatttgactatttgaggtacatcacataagtggaatcatatatttgtcctttcatgtctgccttatttcatttagcataacgttttcaaggttttcctgtgttgaaaatatatcagaatttcattctctttttaaggtagaatcatatcattttaaaacatttcagttggaccatctaagttcagtccttcattttcaaaattaaaaaacaggcctcaaacgggtrcatctcacgttagctagagacagaactggagctagmagtcagatctcttacaaagttgcctttcttcttctgtgggtaagtggggcacccttgggacgctgtgctgggcgtacatgggtgcttgatgaagttacttggtggactgatgtgattgatgtccaacatgtatgcagggacagaggctatggtccctacagagcaggcatggagagaaggagaaatacatacgggcaggagccaggagagggagggtgtagtgagcagagaccgcgccactgcactccagcctgagtgacagagtgagaatccatctaaaaaaaattgcttgctaaagaagtggtctcctgaggtcttaagaygttcctgacaatgtcttgagtgggtgggagagaggctgcagtcattgtgctgtggaatttcagaggtgagaaccacacctaaccaaaattactttccctgtttgcctcagtgacacagctgcaggaaccctggtgggtgttgtattaagtaaatttgacctttattctttgcagatctgtgaaatgttgtcttctgaggggccacgtgtatctgtagtgctgaggactccttgggcctctgaagtcacagagagaaccctgcagggtgggggaccagtgtgtgacagccctgctttgcattttctttgagaagtgctgtcattttgcatttctctccaccagggcaatcttcaatcttgagaggtgtgatcataacttgccttgtttcttgtcgctacagagaacggaaggctcccttgatggaacttagacagcaaggccagatgcacatccctggaaggacatccatgttccgagaagaacagatratccctgtatttcaagacctctgtgcacttatttatgaacctgccctgctcccacagaacacagcaattcctcaggctaagctgccggttcttaaatccatcctgctaagttaatgttgggtagaaagagatacagaggggctgttgaatttcccacataccctccttccaccaagttggaacatccttggaaaytggaagagcacaagaggagatccagggcaaggccattgggatattctgaaacttgaatattttgttttgtgcagagataaagaccttttccatgcaccctcatacacagaaaccaattttcttttttatactcaatcatttctagcgcatggcctggttagaggctggttttttctcttttcctttggtccttcaaaggcttgtagttttggstagtccttgttctttggaaatacacagtgctgaccagacagcctccccctgtcccctctatgacctcgccctccacaaatgggaaaaccagactacttgggagcacckcctgtgaaataccaacctgaagacacsgttcattcaggcaacgcacaaaacagaaaatgaaggtggaacaagcacagatgttcttcaamtgtttttgtctacactctttctcttttcctctaccatgctgaaggctgaaagacaggaagatggtgccatcagcaaatattattcttaattgaaaacttraaatgtgtatgtttcttactaatttttaaaaatgtattccttgccagggcaggcaaggtggctcacgcctgtaatcccagcacttcaggaggctgaggtgggcggatcacctgaggtcaggagtttgagaccagcctgatgaaaccctgtctctactaaaaatacaagaattagccgggcgtggtggcgcatgcctgtrgtatcagctactcaagaggctgaggtgagattatcgcttgaacccaggaaacggaggttgtagtgagcggagatcgcgccactgcactccagcctgagtgacagagtgagaatccatctcaaaaaaaacaaaaaacaaaattgcttgctaaagaagtggtctcctgaggtcttaagacattcctgacagtgtcttgagtgggtgggagaraggytgctgtcattgcgctgtggaatttcacagatgagaaccacgcctagccaaaatcacttttcctgtttgcctcagtgacacagctgcagggaccctcgtggatgttgtattaaataaatttgacctttrctctttgcagatctgtgaaatgttgtcttctgaggggccacatgcatctatagtgctgaggactccttgggcctctgaagtcacagagagaaccgagcaggtctatgtttttgttttgttgttttgagacggagattcgctcttgttgcccgggctggactgcagcggcgcaacctctgctcactgcaacctccgcctcctgggttcaagcagttctcctgtctcagcctcccgagtagctgggattacaggcacatgtcaccacgcctggctaatttttgtatttttagtagagatggggtttcaccacgttggccaggctgatctcgaatgcctgacctttggtgatctgcccgccttgtcctcatgtgtgctccacaggcctttgggttgggattgcaggcgtgagccaccatgcccagcctagactcttttgacaatatgatgaaagctgttggttcctttccccaacacacacacaccgagttgtatcacgaaaatgtcatacaatttccaggttttctgagtggtgggctcagattgaggtcaaaggatcagacgacctctaacgaccttcatgtctctgttgatgatctggggacagccagatcccctgtgtccagggagttccttagtcccttgccaccaccagagaagggcaattgccacgggagctgcaaagaccctattcctactcctggtgccttacttatgcagcacgactgaattttttgttttgttttgttttgttgagacaggggcttgctctgttgcccaggctggagtgcagtggcacaacaatggctcaccgcagcctcgaacccctgggctcaagcgatcctcccatctcagcttcctgggtagctgggaccagaggcgtgagccgccatagctggctaatttttaattttttttttgcagagatgaggtttcaccatggtgcccaggctggtctcgaacttctgggctcaagtgatcctccctccttggcctcgcaaagtgctgggattgcaggcatgagccaccgcccccggcctgtggagcacacatgagtttaaaattactttcccttctgcctatatttccgaggaggaaacttcatgcgcagggatctttcttagtggatttaatggctaaaaggtctgtctgaatccaggacgctggctttagccttcctcggcagctgccgtaaccccggtgtctaaacctgaagcatcccaggagcacccactccaggagttttctcggccgcggaactcattagttagagcgccctcttgtgttctcatgtggtaatcggtcattgaaggacttaaaatggtccttagccaacacacagtagaacttttccctcttctgaccccaagaggtcagccacccatttcatgagcatatactggtcgccccatcagcgttctctgattggctaactgaacccactccccgacctagactcaagacaggcgaagtgacgcttaggtcaacattcactcactaaagcaacgactgtcgggcgattttgtctcccgctggttttggaatggtgtctggagacatttttggttgtcacagctgggtgggtgtgctcccggcatctggtgggtagaaaccaagcatgctcctaaacatcctacaggcacagaaccgtctcccacgaccaagcatgatcaagtcccaaatgccaataatggccaggttgagaaactctgcacagaagcatccagttatttgtctgtttgctcaacaagcttgtgctcatcatgctctgtgttcctgacgctgtgctgggtgttggcggtgggaagattacaagagtcacatggcagctgtcctcctggaaggtacaacccagtagagatgcagactaacagagagccaattacaaagcagtgtgacaagcgtcatggtggaaaattaaaagctcaaacaagggcacatgggaggggcttccaacacagactttgggggatccaggaaggtctaagaggaaagtgggtctcaccaaagccttgaccataggcagagggtaccagtggaaaaggtggggtgaagaacattgaggacaaaaggaagaagtgcaggaaggccctgaggcaagggagtggggggtgccctggagggatggcagcagggcagtctgtcagacccaagtggcctccagccctagaagccaattagtcctcctcaaaaagctgtcactgtcccctaagaattgctgccaggctcccactggcctgactcagtctttgagagtcttaaggaggaggtctctgaaaggtacacaccaagaactctccccagcacagctgtttttaagactctccaccagcgtcattggcgtgttgggaagaaaccctctgccacagaggccagcttcagcctttgcctaacaccgcaagggcaaatggaaaggtaaacgggaaggagatgtctccccagcaggctatttgaggacagtcttccctgcagaagatctcaacctggggtcaacagagtggaaatgttagagtagggagctaggcaaacatgagcaggacaggtgagggcccccacaggaatgtcaggctaccatcaggtgatggtcaggtggttgttaaactgtctctgtaaaataataattggttgcagccagctccaagcaaggacagtctctcaatagatacaaaacaccctgatctggtgatcagccgcttcccgataagatctcaggagctgggcaagcagcctggagcatgcgcaccaagaggcaaaatggcggaatttaaccagtatatgacctaccttcctctgggaacgcacgactggtaaggggaaaaatgcctcaagtgagcatgcgcgcaacttcagtaatcacactgtgcatgcgaccccttccaagtgctggcaggtcaccacatacgcggacagcctgctgcaagggaagaatcaggggagatgagacgtaaatcccagaactatgccaaatacataaaaccccaagttaagggtcaggcagggcacttagatctctcaagttgcctgcctgacccaagtgtagtgtacttccttttgttcctgctctaaaactttttaataaactctcactcctgctctaaaacttgccttggtctctccctgtgccttaagaccacttaaaaccacctctgcccctcagctgagttctgtctttgagaaggcaagcatcaagtttgctgcagacccattggattcaccactggtaacagaagttggggtaaggcgtggggcctgagaattctctaagagtaggtgcagccgggcgcggtggctcacgcctgtaaccccagcactttgagaggctgaggtgggtggatcagctgaggtcaggagttcgagaccagcctcaatatggggaaaccccatctctactaaaaatacaaaatcagccgggcgtagtggtgcatgcctgtaatctcagctactcgggaggctgaggcaggagaattgcttgaacctgggaggcagaggttgtggtgagccaagatcgagccattgcactccagcctgggcaacaagagcgaaactctgtctcaaaaaaaaaaaaaaagagtaggtgcaaaaggttatgagggtgtgcagttttctatgggagagaatccatagcttttatccatgtctttgtttgttttgagataaagagtcttgctctgtcacgcaggctggagtgcactggtgtgaacatggctcactgcagccttgacctcccgggctcaagcaatcctcctgtctcagcttcccaaagctgggaccacaggtgcccacgaccacacccagctaatttttaatttttttgtagagatgagggtgttactatgttgcccaggctggtcacaaactcctgggctcaagtgatagaactcctgcctcagcctcccaaattctgggattataggtgtgagccactacgcctggccttttatcagtttcttgaagggagatagggtccaaaaaagggttaggaacttctaaataattaaaaactcacatatgcttcatattatttgatgtcagttaaaaccccaaaatagtgatcaatacatttcttaccaaaggatctactttaaagacagttttacattcaatatccccagcaagactcggcttaccttcagaaaattgctcagaataaggaaacaaatggtgatttcaacatttgaagggggtagccctcatctctcaaaagtaataagctattagaatgttttggaataccagaccaggtgcagtgactcatgcctgtaatcccagcacttagggaggcagaggcagaaggattgcttgagcccaggagtttaagtcctgcctgggcaatatagcaagaccccattctccacaaaaaagaaaaaaaaaaagacaaaaaagagaatattttggaatatcaaagaaccagcagtaaatctattgaaaaacttcagagtccaaagtatttctaaagcccaaattgtcccttcatatatatttcataattcaataggaaaagaattctttcttcagaatgaactttggcaatagaaaagaaaccttatttccacattcagaaaggatgacaatgctggaaagcaaattaactttttttaacttttttgcttgtttagtttttgagtctcgctcttgttgcccaggttggagtgcagtggcaccatcttggctcactgcaacctccgcctcccaggttcaagcaattctcctgcctcagcctcccaagtagctaggattacaggcatgtgccaccacacccggctaattttgtatttttttagtggagatggggtttcaccatattggtcaggctggtcaaactcctaacctcaagtgatccacccaccctggcctcccaaagtgctgggattacaggcatgagccaccacgcctggccgcaaatacaattcttaaagaaaaataaaagctaaattggaataggggattggccaccagtcgattacatgaccttggatgtgtcacacatcctagggctcctctcctgcaaaggaaaatgtattcatcatttcccagggatgccataataaattaccacaaaccagctggctaaaaacagcagaaatctattcttgcacagttctggacacctgaagtccaaaatcaaggtgtcagcaatgccatgctcctccaaaggctctaggaaagaccccttctctgcctctcctggcctctgatggttcctggcaattcttgagattttctgggttgcagctgcactgctccagtcactgcctctgtcatcacagggcattctttcacatgcgtgtctgtgccttcacatggccttctgagaaggacactagagctgggtgtggtggctcatgcctgtaatcctagcactttgggaggctgaggcgagtggatcacctgcggtcaggagttcaagaccagtctggccaacatggtgaaatcccatctctactaaaaatacaaaaaattagccaggcctggtggcacacacctgtaatcccagctactcaggaggctgaggcaggagaatggcgtgaatccgggaggcggaggttgcagtgagccaagattgcaccactgcactccagcctcggggatagagcgagactctgtctccaaaaaaaaaaggacactagttatcggatttagcgcccacccgaatccaatacaaccccatcttcactaacattatctacaaagaccctgtctccaaataaactcacattctgaagttccaagcagatatgattttggggtgacactattcaacccagtacagaaaagactggactagacgagctcaggtccttgtagctctgacttcccaggtttctaagatgctcatgtaaatcggaaggcagaaagatggtgattttccttcagataacatcatcttctcagcatcatcttttgagccttctcaggccagtgttctctcactgtgctctgttctcttgtgctttgtgtctcggcatctctgaaatattattgttttcttttctattttatttatttattata

SEQ ID NO: 8732 - DNA, 32391 bp, Homo sapiens
ttaagatcctcttattctttcaagctttacaaagggaagccccacaaaaggacacaggtggcaaatccggggacctggatgctgggtcaccgacttcatgttcttgctgacttcctggcctcggttttcttctccttaaggctgggtgaatggaatgagtttagatccctggacctccaggccctcctgtgccccggggtggccctgcttcacagggatgcccgtaagaagacgttgcatgcgtaaaaatcatgccctgctccaccacagaggtgagatgagacaggaaatgagctaattggcgtgagaatgcttggcacttttagggaaaggagaaaccgaatcccaagagaatgacagtggcctttgtgtgaccctagtaccagggcccctgctttcgccatggcctcagatagaggccacatacagcaggtgctgggcccccagcccacccacctccctgctttcaccatggcctcggatagagaccacatacagcaggtgccggggcctccagcccgcccgcctccctgctgaaccatggaataaggagctgcagaggaggaaagattttggagtcgtgctgacctgggtctgaatcccagctcggagggcctgctgccacatctgtacgtgggcatcctcttttacgtgagtgtctcgggtcgggtcctcccagaagcaaatgctgagttggtggaaggaatgtgaaggctataggggagtggcacctgcttaaggagaaggaggccgggctgggcaggaggatgtggcacctggtaaggagaaggaggccgggccgggcaggaggatgtggcacctgtgtaaggagaacgaggccgggccgggcaggaggatgtggcacctggtaagaagaaggaggctgggccaggcaggaggatgtggcacctggtaaggagaaggaggccgggctgggcaggaggatgtggcacctggtaaggagaaggaggccgggccgggcaggaggawgtggcacctggtaagaagaaggaggctgggccaggcaggaggatgtggcacctggtaaggagaaggaggccgggctgggcaggaggatgtggcacctggtaaggagaaggaggccgggccgggcaggaggatgtggcacctgcgtaaggagaaggaggccgggctgggcaggaggatgtggcacctggtaaggagaagggcggaggccaggctgggcaggaggatgtggcacctggtaaggagaaagaggccgggccaggcaggaggatgtggcacccggtaaggagaaggaggctgggctaggcaggaggatgtggcatctgcataaggagaaggaggccgggccggcaggaggatgtggcacctggtaaggagaaggaggccgggccaggcaggaggatgtggcacctggtaagaaggaggaggccgggccaggcaggaggatgtggcaccttgtaaggagaaggaggccgggccgggcaggaggatgtggcatctgtgtaaggagaaggaggccaggccgggcaggaggatgtggcacctgcgtaaggagaaggaggccgggctgggcaggaggatgtggcacctggtaaggagaaggaggccgggctgggcaggaggatgtggtacctggtaaggagaaggaggccgggcaggaggatgtggcacctgcataaggagaaggaggccgggccgggcaggaggatgtggcacctggtaaggagaaggaggctgggcaggagtatgtggcacccggtaaggagaaggaggccgggctgggcaggaggatgtggcacctgcgtaaggagaaggaggccgggctgggcaggaggatgtggcacctgcgtagggagaaggaggccgggctgggcaggaggatgtggcacctgcgtaaggagaaggaggccgggctgggcaggaggatgtggcacctgcgtaaggagaaggaggccgggctgggcaggaggatgtggcacctgcgtaaggagaaggaggccgggctgggcaggaggatgtggcacctgcgtaaggagaaggaggccgggctgggcaggaggatgtggcacctgtgtaagaagaaggaggccgggctgggcaggasgatgtggcacagctgacacagccacaaagctcctgcccatggggcgctctgaggggcagactgcctgttggcggagtcttgtggggtggaaatggtgaggtcactgtgatgccactttgcttagtcatcggccacagggtcacctggagaagagcatgagctcagcataaaagcaaggcccaccctgcaggggccagcagctgggagctgtccactaaccactatccttgcagctggacagcgaggcccctccaaaaggccgtctccacctgccaccgggaaaggacccggagcgaaggatgtcgtgggcggtcagcccaggtgattgcccttcttttgctttggagccaggcagaacagagctcaaattccagctttgggacagtgtgtggcccagaaggctgtaactgcggagttaacactctccagtttccctagatggcccgacctggccggtgactcggggatgatgaagctcctggagcctcagcgtgctcacttgagaggtagggcagcgctttgtacttcacagggccatggggacaggctcagggcctggcactctagtgaccggcttcatgctgggtcactgactagggaatccacacacctttttagtccagactgagtaggtaaatcagacttaataaacatccagcttcctgctcgagctcagcctagttgtcctaagtctgacaagattgaactttattcacagcacgaggcataaatgatataaaggtaagcaattttaggggacccaaaaaactagggactcctacttgggtagcttagaaggggaatctctcttggagatcctggctttgctgcctcaaacccagctgtctcttcaagccaagtctgggagaatctcatgatcttatccttgctccaatttacttacaccccacatccacactaagctcttcctgcctcccgtggaatattaacttacacctgacttcagactcctgcccctatgcagacccagcagtatgcgggcctaggaggtttttcggccacaaggaactagagaagccactcattttgtcccctctcattcaccccattctgtccccatcggatgccttgggaggagagaaggaaggacaaatgggtgtcccgtgacccaacccagatgaagacagagccatttatcacagagacccagacgcatcctaactctggaaaatgggcatattgaggggagctggaaagcagaagggaaacgggcgtgggcagggaagaggtgaacaggagtgcgcacgcccagttctccaggatctcacgctcctaatcaggatcctataagactcaaaggggacgcaggaaagacctgggcctggaaattcacttccggactcctcctgtatcctggctggccctcgtttgtgtctccctccagggatgatgcccggatggaaggaggagccacgttcctccacaggtgtcctccacaacaggtgtcctcacaacaggtgtcstaacaacaggtgtcctcacaacaggtgtcctaatactcccgcagcccctcagcatctacaggctcactcccaccctacaacctttcagataggtgttatccccattttacaggtgaacgaggaaaacagctcgaagaggctgtgactttgtggtgacgcggtggcagagctgggatcaagcccgggtttgtaacgccctcctggagtctcggccgtcacagcagcttccggagagcgctgtgtgcctctggccttcctggcatgggaaagaggtcagctacctgtgttcggtcaacaagatgtccagcgcttagtttggtctcacctggatgctcctttctcctctagagatggaaaactgttgtcctgaaagcgtcaccaaacaaaacctgtggaaaggtaatggggggacccacgagcaagagctgacagaaaaatgaccacgggccgggtgcagtggctcacgcctgtaatcccagcactttgggaggccaaggcgggcggatcatctgagttcaggggttcragaccaacctggccaacatggtgaaacctcgtccctactaaaaatacaaaaaaaattagccgggcgtggtggcaggtgcctgtagtcccagctactagggaggctgaggcaggggaatggcgtgaacccgggaggcggagcttgcagtgagctgagatggtgccactgcactccagcctgggcgacagagcaagactccatctcaaaaaaaaaaaaaagtgcaaaatgatcacgaaggccaagctgggccttggtgtctgcgaattccctgcagtaggtccctcctgctgccccgtccaggcgcccacaggatgctccacatgactctttacctttatgattttcttacctccaggaaagaacagggtcagctcgtccacccagagctggagggactgttgggggaccacgccacttccccacrgtatccgcattattatggcgtggcccaggctttggcctggggccatgaacagactttcagcttctagaagcaagtggtcacagggcctccgtgaccctcggagacagcgccacagcgtcggttgcctactccttgctggacaaggctggctctgcttgggaatgcagaaaccctgagtccttgtcctgggccccacagtgtctgagcatcgaaggtccctgctctgggacgagtcaccccacagacaccccacattcgggaatcaagtcttgaggaatcagaagcagagattcacactgtggcaaagaggggagcggaggtatccccgttttcctttgcagagagctacaccaactgccctcttcgtctttacaaccctacttggggtccctttccctcctcgcttgtgcctgtgagttccaagaggtggaactggggtgagcagagcccccaggtctccaggagcagctccacctcctcacaggttacagtcgcttcctcctaccgaggttctgccttcaacccactgcccatgccagctccctcaggccagtctcccagactgtccctggctccctgcaccctggctccagctccctgccctggaaagaagaagtccaccatctggtgagggtctgccacgcatctggggtctgccatgcgtctgcactgaggttctgccacgagtctgcactgaggttctgccatgcgtctggagtctgccacgcgtctggggtctgccacgcgtctggagtctgccatgggtctggggtctgccatgtgtctgggatctgccgtgcgtctggggtctgccacgcatctgcactgaggttctgccacgcgtctggggtctgccacgcgtctggggtctgccatgcgtctgcactgaggttctgccacgcgtctggggtctgccacgcgtctggggtctgccacgcgtctggggtctgccacgcgyctgcactgagcagatattccaagcacaccacccctttccaaaagacggcatacagtgcatttctgttcctgcccctcacccacatggttccccgcttcccaattccttggggtctgcttaagtctcactctctttcccccattcatacagccccaaggtcgctccctctggggccctttcttccccattcttcccagcagcccaaagctctggtgggacaggggcagcccctggggagggaggagaggacccaggaacccggctaggagggtggcccacccatttccagtgtgacctgttcccattcccccatgtctcctcccatccctcccgccactcagctcaggctgatgagaagcagagcaacgggtgtatcggtgttttctttcctggtggggtagtggggtggggctgaggagagaaaagggtgattagcgtggggccccgccctcttttgtcctcttcccaggttccctggccccttcggagaaacgcacttggttcgggccagccgcctgaggggacgggctcacgtctgctcctcacactgcagctgctgggccgtggagcttccccagggagccagggggacttttgccgcagccatgaagggggcacgctggaggagggtcccctgggtgtccctgagctgcctgtgtctctgcctccttccgcatgtggtcccaggtaagtgatggagacagcagatgaggctggctgcggggagcacttgggggaggtgggagctgtcagagaaagaggtccggggagacagagagagagagagagagaataggggaaagggagacagcgaagaggaagagaagggagagaaaaagagggagagggaaaggagaaagagatgaatgggacaacatggggggaaggtggagagagacccagagagggaaagaagaggaagagaagagggagagagaaagaagagtggaggccgtgcgcggtggctcatgcctgtaatcccagcactttcggaggccaaggcaggagatcacctgaggtcaggagttcgagaccagcctggccgacatggtgaaaccccgtctctactaaatatacaaaaattagccggtcgtggtgggccccacctgtaattccagctactcaggagtctgaggcaggagaatcacttgaacctgggaggtggaggttgcagtgagccaagatcgcgccactgcactccagcctgggagagagagcgagactctgtctcaaaataaataaataaataaataaataaataaataaataaataaatataaaataaaataaaaaataagaagaggagaaaagtggggaagaggaggcatgaactggcagatacgggacaagatctgaggggaaagacagagggagaatgctcgaaagagagagaaaagagaacagagggccagagagcagcccggcgatgtctggaaggatccatggtgagagcccaggcttactcgcagagagaaagacaggcagagccagagcaagaggaacagagtcaaggagaaagatgtacacccttgtgtacagagctgggggtagaggggatgccaggaaagctgggtgatggagacggaagaaaactcatgtaaagctgcagggtgagaggacgagacaggtgagacgcagacaaactgaggaccctgggaatggagagaggagaagatcgggagacagcagcaagcaagggaagcgacaaggaggagaggggcaggccggccgggagggtggtgcggaggaggcggccagggcgcagagggccgggaggtgctggccgtgggcttcttacctctgagctcgggtttaaaagcctccatttgggtcacggccttgcctggggctcgtagccccggcattggccttgggctcctccgtgtacagagcygggaggggagggatgccaggcctgtgggagatgttccctcgggggcccccgtcctcttccccacactttccaggctgtccctctggcttcaggaccaagttttattctgtgtttctgggtgtctgagtctttgggggagagtctggggtccagagttcaagctggggttagagtctcagctcctgccctgcctctcagcaggctaagaacagtcgccgagggaaaatatttcttgggcgcatatttgaggagcttcctgggagtgagtcagaaggcgartgccgtttaaaggctgcaagagaagccatgctggtgaagcggacccttccacctcgggatgtttcaggactaggctgagggcaaaggaaactgccaccacctccctacacctccccaccctccagcacccccaccccaccctggccacacaaccccgctccagtgctcatcccaccgtgaggacgtggaggccggaaggagccgccacacggccctgccctgcagatgtggttgaaggagtctccacgggaatcatgactcccagagcgaggctggggcttggggcgccggggaggcagcttggatttaggagccccagkgccaagtctttgccgtgaactgttctggcccctgtgaccaggccctgccccgtgtctccccagggccccggtcccctgtgtaaaaagcagtggtgaacggttggacctcctgacgcccaagttcttgagtttccaaatctgtgatttaaagctgagcccaaatgtgctgggtaccagctggacactcagctccatgtggagccaggaagtggggtctgtggagaggagcgcagaggggcaagacctggggtgggcgtggaaaagcacgggggcgtgacccggagaaggagtgaaggactgttggtgtgcaagggcgtctccrtgacgacccgaagaagctaggcatgtcgtggagcgctgagtcctttgcgtcgctaaggggaccaagtggagctgggccaggagaggagatggtcgtggctgggagatggcacccacacatctgaccgggcatgaccagggccttggcaggaaaagcagtcaccaagggcgggtgggcagcccccacccccacagggcagctgctggaggactggcagccagccagccccgttccttttggctccctgaaggggtttacagatgacctgcctatacttgagtctagggtctgtttgcacacttgccggcaggaccctcacccaggctgggtcacactgaagcccaggccagaggaaaaacacagggtttccacaaaggagctgccgcaatgagggtttccttaaggaacagccctggctctcaagggttaaaggataagrcacagcagacagaggtgggctagacaaggacagatggaaatttggtgtctactggtcgccccaggcaggaatgactcagaaggaagcctggccgtcctggttccatgccacagggaaaggcaactgggtcgaaataggccttggtctccagcactatcagtgaccccagggaggtgacaggctggagcaagtgcagggcaggcaggggaggggacgccggccacagcgcactccacggggaagggtctttatgggcccctcctcggagaacccccggtctatctgtcagtctgggacaggccacctcaacttgccaccgaggacaccaaaactctccacagacccctctgcccctctgggaaaccccactgtgctccaggacactcaaaaggaaaggatccctggacaagaggtcctgccaggaamatcagccaaattttggccaacgaccagcaaggtgcacagggaagagcaggggctgaaactcagaggtccagcatcagcgacgcccttggcagcccagggaacacaggcaacgccttttggctctggagtcttaggctcttcatcggcraactgagcccagggggaaggggctactaygtagggttgtcatgaggatgaaacgagacagcatctggtgtaaagtagaaaaggcataaagggccgggcgcggtggctcacgctgtaatcccagcacttttggaggcccaggygggtggatcacctgaggtcaggagttcaagaccagcttggccaaccctgtctccactaaaaataaaaaattttgccgggcgtggtggcgagcgcctgtaattccagctactcgggaggctgaggtaggagaatggcttgaacctgggaggcagaggttgcagggagccgaaatggcagcactctagcttgggtgacagagcaagactctgtctaaaaaaaaaagaaaagccataaagacgtgtttgagaaagaggcctgggaagacgggggaaggagggtgattgaacccggaatggcacttgtgtcggcccagggtcatatcccttcatctaaggatcctcgtgcctctaaaaagccaccccgtgcttcctgtgggtttgcaagggctggcttggtgtattcagaatgtggcttgctgcatgaacggaccccgagggccatggccctagagcaggggctcgctccagcggacagctctgcctcaccgctccctgcctgtgagtcccgccacgcccttggtttctgggctcagccgtggaggcagaggctggcctggcagaggctggcctggcagtgcttgacacgcaagtgatttgtgtcttcattgctaaggacaagaggcaatgagaggacaagaagtggttggccttttgtacgctcaacgggtggttttgctactctgtgtcttttctctgatttcacggtgctgttaagtgcttaaaatatgcacatcgtgtagctcacagagccacttctctgaaggccaggacagagaccttataggctctctctccccctagtttcagccttttaccttaaatatacgtctttcttactgctaggctgagttcccgccccagcatgttctgagaaattgagtcaaaataactgagtctgttggcacctcatmgacgatttcttcatagacggtttttttattgttgctgttgttgttggttttttgggtttgtttgtttgttttttgagacagagtttctctctgtcccccaggctgcagtgcagtggcgtggtctcagctcagtgcagcctctgcctcccgggttcaagagattctcctgcctcagcctcccgagtagctgggattatagacgcccaacaccacagcggctaatgtttgtatttttagtagagatggggtttcaccatgttggccaggctggtctcgaactcctgacctcaggtgatccgctygcctcggctcccaaagtgctgggattataggcgtgagctactgtgcctggccctacttcatagaggtttaaatgccttttcacccttttcctggagaytctgaagaagtctcaggaactgggcatttgtgttgcacgtgaggccttgcaatggcggccctgcttggagraagggcactggcctgggttgcccgcagctccactccccgtgtatgtgtttagggaccacagaggacagacatcgactctctgtagagatgccgccccgcccaggttgcagtttaggttccaaaagtccagtggccagtggattttgggggaatttggaataagaaacagcctagactttggagttgttcattcacttgcagaatttctactcatgccagctgctctggacaggaagatgaatgcgtcacagttcctgcttttcaaagctctctaagttaagtgacttgtttaagatcatagaacccataagtgaggcagctgggactagaacccaggtctcctgactcactgcagcacacagcctttcggcaatctccaaaccagcccagcccaccgacggagggaagaacagaagcattcacacaccctgctgagacagccattcattcattcatttgttaattaaaccaccatttaggaaacgcctgccttaagttcctgacattgttctaggacacagcactggatgcacacagtgaagagtgaaacagacgtggcccagtctcttggcactaaaatcttggtgcagacagacatcaaataattacrgaaatgttctcaactgcacatgtggtaaatgcagtgtggaaaagtacagggtgtgctgagagctgcatttcgaatggccagagagtaggggaggtgcatctgactgacaagtcaggaagggccctgtgaggaaccgttctgcggggagctgaggcctgaggctgaggacagccaggtggagaaggtgccaggcctgagcaggcagaggcggagctcatggagaggcaggaaagagcttggccccttggaggacttgaaagagaaggcaggtgttagatcgcgcagggctttgcaagctgtggaatagattatgaattttatgttattttatttatttatatttttgagacagagtctcactgtgtcacccaggctgaagtgctgtggcgttatctcggctcactgcaacctctgcctccagggttcaagggatactcgtgccgagtagctgggatcacaggcacatgccaccatgctctgctgatttttgtatttttagtagaaatggggttttgccatgttggtcaggctagtctcgaactcctgacctcaagtgatctgcttaccttggcctcccaaagtgctgggattaccagtgtgagccactgcgcccggcccagattatggattttgagtaattaaaatgacagacaaggccaggcacagtgactcatggctgtcatcccagcactctgggaagctgaagcgggcagatcacttgaggtcaggagtttgagaccagactggccaacatggcaaaaccccgtctctactaaaaatacaaaaattagcaggagatggtggtgggcacctgtaatcccagctactcaggaggctgaggcaggagaagcacttgattccaactgggatcacaggcacacaccaccacaccaggacagcccgaggctaaccactgtggagaggcagccaggctcctgaggacagcgctaggctaggaggatgtgcctgccccagtgggagccaggagagatgggtggcaacaccaagatggtggagactggagatggcacctccgagaaggaggcgttggggaaaagagagttgagctggccggcgtgctgtgctcacagccggattttggtgcttcttggtttggtgctggagcttctgtggcgatcaccagagtggctgggtgctgccacaccagatgctgacagaaatgaggtcaaatgaccggtggtgggatccatgggttggggtgtgacttcggcggggatcgttggaaagaacgggtaaagttctcgccttggagtccactgtgaagggacttgaacctgggaggtggaggttacagtgagctgagatcgcaccactgcactcctgcctgggcgacagagcgagactccatctcaaaaaaaaaaaaaagataaagataaagaaacaggcaacgtcaccctctctccagcctcggctgaaggcaacaaaggccacagggcctgggatgtattccacagatgtgtaygaagtcactgctgtatgccaagtctcgtttcaggckctggagatcacaagagrtcwgttattccaagggtatcttgagttagtgtctttcctcatcttgaattctagggaartacccagtggacacaaccctggtcacagttgattctgggctgatacacaaatagcattagctccctgccaaaggcggtggggccagcggttcagcgtctgcgcgccttccgggccgcctgctgcctgtgtggggctgaatgttctcctcaaggccatccttaccgttgggcacttcccttgggcttacactgccctgcccgaggcagcctggcaaggggccccacccgtcaggaagtaattcccctccaggaaagtgaaacactgtggcgatacggcttacgggttcctcacctccagttccaggaaaaacccaagacaaacagaccagatgctaggaataagcctcaacccacagcacttagaaagccgcaggctttgtgtgtcttcagggagtggcttcacccttcttggaatctgtcttctgccagcgtcactcatactgctgccactccttctcccgagccaacagcacacctgtcacctcggcacacctgtggagtcaccagaggggccatctggggaaaacgatgcctactgccactcggccttcacatcctggagccctaacagacgtgaggcagctgtgggccgtctcccacctgacgtggttcaaggagagaaaagaactaccttgatgggagatctctggctgacgtgatggcagaggcttgacagagccttcaaggactcagatgtggggaacgtctctacctcagtgccaacgccagtgccctcctcgtccctggatggagactcytcctctgagagaatgtcttaaaaactatccgttttactcaatgacacacgtgtgtcttctcacagtgatcttgtcaccttaaggtgtcaacagccttcacactcactctaacatcatcccagaaaagagacaccaggaacattgcaaaaacaccccagtgtcacagcgtccaccccgagaatgtgcctggctcggcctcaggctcagagccctctgcatgtggcagtccaagaacttggggcaggtcagtgaccatttctccatctttgcctcagctctccatccactcggtggcagtcccagagctgarmagctcgcagcttccgagcaatggctcttaccccgagcccccggccctgctacttccaaggcatataatatcactcggtctcttcaaatctcaatttccctgcctgtgaaatggggccgctgaatctcgatttccccgcctgtgaaatggggccgctattaacaagataagctataaagcaccacatgaacatgagctgtgaacatttgtattattcatagagtcataacgtgcctacgagagaagtaaaaagaagccccacctccctggtgtgttcatcacaagtcagctgaccctcagtcactcgacccagcgcagatgcggaggctctcgctgcttgcagagagtttatattatattaaacggatagtttaattcataaggtctggtaggaagaacgtgaatttattaaccaaaactagtaaaggggaagcagccagatttctacttaaagtagctgctttaattttcagaggggaaagccttgataaggaaggcacgcaagaatcgggctgagtcctgtgtccgcatgtcttgttctggtggctcttctgggtcccagtccgtccggacctctggctgacattattttaacaagagctgtcttgaagtaatttctgggattttgcagctggattttcagatgtggtttgtctctctcaaggttttagcccctgcaacttttaggaagacatataattcgatcctcgcacgcagagaaatggaagggagtatatacagacagtaagaaaagggagggagtgtatacagatgacaagaaaagggagggagtgtgtacagacggtgagaagagggagggagtgtgtacagatcgtgagaaaagggaggggcgtgaagtctatttttaggctgaggaaaacggcctttgcagytgcctcaaggttgtatttggaaacccaagagaaaggggaaaacatgtttaaaatgcattttgaatttaagctgccggctacaaaactgaacaatgtctcccgcagaaacgagaaatcccttggcgtggccatttcttattacagaagccaccctgccacgcacacagacgcgctggaagtatctttcctcagtcacaaccagacgaaggtcattcttgcccagtggcctccctctgaggattctggtttctgacatccgtgtcacaatggcaatgccagtcaccagtctctgaccactagacccacgcccccgggacctacgcagacacccaggaccaatgccagtcaccagtctgtgaccccaggacctaccagacaccttccagggcaggcagggcaggccattttccaaagcaattcgagctaaggagacagcagcagcaaccctccctcctggccctcagagctgaggatcaacccacaggggtgyggtggaggctgagagcaggggtgyggtggaggctgagagcaggggtgcggaacccgagtcagcaggggcagtgaggaggctgccgcagtagtcaaagcgacggggaggatgtggcaaagcaaacaagaggacgcgatggggtgaacacttgggaggaagatcaacgagtactgactaggacacrggggacaaggaagagaaagaaatccagaggacccacagctttctgggctggatgtctgggggactgttgttagcatgaacagaaggaaggaagaaagcttgcaaggaaagattgacctggacctgttgcattgcatgagctaggcaggaaatccctgggagggtgaggccagcatatgggtgggaagtcagggagaagtacagatttgtaaggcgtgagagtagacgcagggtggccagagagggaggggcagcaggagagggaaagggctggagacatgtcatctgggcgtggagcgggggagagaggtggcaaggggagtggagtggagggcccgggagcgtggacggtggagcaggacccgtcagcttcaatgagggtgaggctgggtggtggcacggggccgccggccagggagagcacgtggagsggggggcgcaatacacatctgtcagattcatgaatgaatgaatggatggggccgaactgatgagacgcgtgaggactggagaaaatcgtttttgctgttgggaaggagattctggtagctctgaggaaaacggcttgagcgaagtgagtgaggtgggggcagagcgagcagtgcgtggtaaagaagaggcggcaggggaagcccggctttcatgctgctggagggacgaggaggacacagacggatgacagacttgttttaggccaacagacacctgaacatgctcacaggcaggagagaaggagaaaggcagaaagaacgtcggagacacagaggcagagcagtgagccatccgggcaggagggagccccggggccccggggagggtgcggagaaggctctgggcattgaaggagatgaagggcacggctttggttctttcagtgaagtagaaaatggagkgtcacggggagagaagagagaggagagacctgtttctctccaatatcaactctttaggcgcaaatctcccagctctctgctccccaagtttatgcgtttggccagagtgagaacaagtttcagttgtctgacaatctsacggaayctgaagggcctgacttgcatcctggtgagagccaaggtcagttcattctggccaacacttgagcagcaagaacaaggctatgagtattttttagaataaaacttgatcaaggcttcaaatttctctgcctgacaacttcagcgagatggttttggcttacaaacattgttaagagtggatactatcattttattttaagggaagtgtttctgaacgtggggtccacggaccacctgcatcagaatcactctggacatgtgttaaaatgctgatgcaccctctgccttttgagaaccactttttttttttttttttttttcagagaaggggycttgagctattgcccaggctggtctcaaactcctggcctcaaggaatcctcccgcctctgcctgtccgtgctgggattttaggcatgagctaccatgcccagctgagaaccattttcttaccaaaaatcattctccatagtctctccatccactaggatttctttctttttcttctttgtaaagataggtcatacttgaacacaggatttcttacctacaaataacctactcaagcttagtagattgagttatctgcaaattgttttcctaaacagctraataatcaatctattgcaggagtggcttcagaggtattgtttaaatgatggtgaaagacaaatgcaataactgtagttttgtcgtaacgaatgctaatctcttcctcctcacaagcccaacagattgagagattttgacagcgccttctcccctagacaataaaactatgtcctccacatgcagtgactcacttgccctcctatttgcggcagcaggaaactctaatcaacttggctcaagatgagcaagttctctaaataaagatttaaaaggaggactaccaggacacagccctgtttagcaagaattttttttttttttgagatggagtcccgctctgtcgcccaggctggagtgcagtggcgcgatctcggctcactgcaacctccacctcccaggtttgagagattctcctgcctcagcctcctgagtagctgggattacaggtgcaygccaccatgcctgggtaatttttgtatttttagtagagatggggtttcatcatgttggccaggctggtcttgaactcctgacctcaaatgatccacccgcttcgacctcccaaagtgctgggattacaggtgtgaggcaccgcacctggccgattttcagtcgatgctgtgaagcaaagagcagcaggtgagggatggggcctgtcctggatcatgcccctttgttcacaggctagggatatggggaaacaggcacactcttgcacactgccaacaggtctgtaaattggcataagctttctgcaaagaaatttggcagtctgtattaataacatgaaaaattttataacrgcataaaccagcaattccactgatagaaatttatgttaaggagatgagctgaaataatgtaaacaaaacattagacacgaagatagtcatcagggctttatttaaaataagcaatacattggaaatatcctaattgtccaacagtaagttaacaatatgagctttctctatgatggcttattatttagtgtttaggccgggcgcggtggctcacgcctgtaatcccagcactttgggaggctgaggtgagtggatcacctgaggtcaagagtttgagaccagcctggccaacatggtgaaacccagtctccactaaaaatacaaaaaattagcctggcatggtggcacatgcctgtaatcccagctacttgggaggctgaagcaggagaatcacggaggtggaggttgcagtgggccgaaatcgtgccgttgcactccagcctgggcaacaagaagtgaaactccatctggaaaaaaaaatgtttaaaggctatgtccaatgttctataagggcagggacacacacacacagtgtctcwcacacacacacacacacacacacacacacacacacacacacagtgtcacacatacatactagcaacacacagaacgggcataaagtaagatgtattaaggagaaattgcgagcagggagcagtggagtccacatgacccccgagctctcattgcacagagaggtgggtatggtggacacacagcaggatgtggtacaggagagagacctgctcctgtttaacagaaaatgggaagggtaacaacgcttccagttgggggagtggctttgttaggaaggaggccaccagagctcagcagggggagtttttatacagcaccctagattttactatggagctgagctctcccagtccccctgagccagctcttgtaggactccaaaagggggaagcaaggaactgccatccaagacataaaagatgtgcgtcttctcaggctatgtttacgaagctagtatcttgaagaaatgctcatatcaggtatggctaaaaaggcaggatacaaaattatgtatactgaataagttaaactatacatatatattttttaatttttaattttttttttgagacggagtctcactctgtcacccaggcaggagtgcagtggtgcaatctcggctcactgcaagctccgcctccccgggttcacgccattctcctgcctcagcctcccgagtagctgggactacaggcgcccgccaccacgcccggctaatttttttgtatttttagtagagacgggggttcrccctgttagccaggatggtctcgatctcctgacctcatgatccgcccacctcagcctcacaaagcgctgggattacaggtgtgagccaccackcctggcctaaactatatattttttaaagcataaaaacatcctggaaggaagcattgtctggtagcaagattatgggttttgatctttcaactataaatgttcccaaatgcacgtaaccagtatgtgtgttttctttggcatatttcaatgcagttgtacaattttgtccataaagattaagcacatcttttgttagatttatttttatgtactttttttggtcaccatcataaacactatagtcttaaaaatattttctctttcactgatatataggaatgcagttttattttgtttttaaatctctttttgagacagagtctccctctgtcatgcaggctggagtacagtggggtgatcatagctcactgcagcctcgaactcttgggctcaagtgatcctcccccctcaacttctgagtagctggaactatatgtgtgtgctactatgcccagctaattttttatttttttattttttatttctgtagagacaggatcttgctatgttacccaggctggtcttgaactcctggcctcaagtgttcctcctgcctcagcctctcaaagcactgggattcaggcatgaatcaccacacccagctggaatgcaattatttttaaaattttgattatggatatagaactttgctaataatgtatatgttygggaagtttctatgtaaacaattatgttatctgcaaataaccataggcttgtttcatcccttccatacccaaaatcacatttctgtactctcatactttttgtttaattttctcgtcttatttcaccagctaaaaccttcaacctaatgttgattagaagcagtgattgttggcatcttgtttttattcctgattttacagaaacgtttctattgttttaagtataatgtttacacggggttataattgacattgtttatcaggttaaaagagttaacgtctctttttagtttgctaggagttttaacaggagtaagtgttgacttttatcaaataactttcctgtatctgctgtggtgattgtgtctcccctccattctgtttatatggtgatttacattaagaaagcattgtctttatcttgcatttctgatttaaactcagcttgatcatgatgtacttttaaaatatttatttatttatttatttatttaagatagagtcctgctctgtcaccaggctggagtgcagtggcacaatctcggctcactgcaatctctgcctcctgggttcaagcaattctcgtgcctcagcctcctgagtagctgggattacaggtgtgtgccaccaagcccagcacacacctgtaatccaaaaaaatacaaattttttgtatttttaccagagacggggtttctctaggttggccaggctggtctggaactcccggcctcaagtgatccgcctgcctcggcctgccaaagtgttggggttacaggcgtgagccgccgcgcccggccatgatgcactttggcttgctaatattttatttacgatgcttccatgtattattactgggacttattaatctatagtttgtctttcttatcctatctttggtttccaaccttataaaattattagtagatcatttcctcctgttccaaactctgaatatgtttgtatagaattgaaattacctgttccttgaatgtctgatttgcctgtaaactcatcttagcctgcatttttttgtggggtggatagattatatatacatatttttttttgagacggagtctcaccttgtcacccaggctggagtgcaatggcatgatctccgctcactgcaacctctgcctcccaggttcacgccgttctcctgcctcagcctccagagtagctgggactacaggcgcctgccaccatgcccagctaatttttttttcaccgtgttagccaggatggtctcaatctcctgacctcatgatccgcctgcctcaccctcccaacgtgttaggattacaggcgtgagccaccgcacccggcctagattatattttttaaactgctgattcaatttaaaatagtttatagtggccgggcgaggtggctcatgcctgtaatcccagcactttgggatgccgaggtgggtagatcacctgaggtcaggagtttgagaccagccaggacgacatggtgaaacccagtctctactaaaaatacaaaaattagccgggcgtggtggcatgcgcctgtaatcccagctacttgggaggctgaagcaggagaatcttgaacctgggaggcagaggttgcagtgagctgagatcatgccattgcactccagcctgggcaacaaagcaagactctgtttcaaaaaaataaataaataaaattaaataaataaaataaaatagtttttagccaggtttttttcttaattcatttttgataaattatatttttaaggacagtatatccaatttatctaagttttcatactttttggtataaattcatcagagcactgtctcttaaattttttttctgaagttatgtacccttttttgtttctaataatcttgatatctgtgtcttttctgtctctctctctccctcctcccacacccccccccactttctttctcttgccaggtrtttgttttattttcaaagaactaatctttggcttcatttattccatttttaattgtttctatagtgagttctggtctgttactatatccttcattctgcttcctttttcttttttcttcctggtctttctagtcyaccttttttgctggcggttccagctttttgcagggaaactcagttcagtgtcgtgaccgagggtcttgcttcctttcctttttcagcctttcagtcagcacatttccaagggcattgactcaccatcttagttgttaacttcttcactcctgagtgtttccctttctttcttctcatctcacctctgcattagaaaacatttattacatttataacctgtatttatctggcatyggctggttttgctattagaggcttatctcttcttccatattgctgaaatggagctgtgccacttttataaagaactacaaaaatctttactttaaaaaaaaggacggtgctgtcatgaaacttctgctgctgacactgattttagcagaggtgatgcaggctctgaaaagatgttaattgccaagaatttacacattcagaaagtttggcccctagatagctcctgtctactcaaagcctgatgatagacaaatgctcttaattatgttatcagggaaatgaaataaggttaaaaataactgcatagagaatgtttttaaatttaaaccttatttggagaaaccaagttttgcaaattttctctaggagaaagcaggcatcgagtttagagtcctatcaacaaatctcaacctaattccaactaaaggaagtttccgtttaaagttgaagtggagtcattttggattaagccaggggcccagggacctcccagagggctctgcggttcagcccgtgcctttgtccacgtcggtttacaagtgtgtcaccagtaagcagttactattaatgaagtgcagaagcttgcacgtgagtcacttttttaacaattagagctggttcataaccattatcactcacttgagagtctaagttactgtctgaagaagagaaggtggcgaattacagtcaattccagaaagtggacttgaagctgaattcttccctgagactttgtctctctgagtatcatcttgccaactatctaggagcactgaggttgaaaaaaagrgtgggagcggtggctcacacctttaatcccagtactttgagagtctgaagcaggaggatcgcttgaggccgggagttcgacaccagcctaggcaacatagcaagattccacctctacagaaataaaaaaattacccaggcatggttgtgtgtgcctgtagtcccagctactcagaaggccaattacaccgctgaacttcagcctgggtgacagaagaccctgtctctctttctctctctctctttctttctctctctctctctttcttctctctctctctctctctatatatatatgtttaaaaagaaaaaagaaagaagtttgagaacagctagggaactaatgaaaacccaaaagagtcagtttctaagagaaaaaaaaaggcaagttttcttggtttcttcttggttcagagactcagaggctaaggtaatattcacgaagatggtatgtggctagtgcaggtgctgtgaaatattttaaacaaaaaaagccaatatttaaacattctgcctgggaaatatttttctttattwaatatctatttttattattattattattatttttattttttaagacacagggtctcgctatcttgcccaggctggtctcaaactcctggcctcgagtgatcctcccaccttggcctcccaaaatgctgggattacagacatgagccaccatgcctggcctctgcctgggaaataattttttttwaaaaagtggttatggtcaataatattagcttcttggtagtctgtgaccagggcaagagtatatgcatttaccccttgggttttttaccagattggcacagatgttaacaacgaaaaagaaaagtagaaatttaatttatttttaagaaagataatgctataattcaagttgagagagttaacccggcttatagcaggggtactgtttgcytcttcccatggagtttaacacagttaattcaccattctagtctaacctcaccttcctcctcacaaggaagacaggcgggagctggagaagaccattggctatattcctgcaactgtgctttttctaggcgatttgaagcagtgcttatcaggggccttcctctgtgggaatcctgcacccccatctctctctccttttttattttatttatttattttttttttgagacagaatcttgctctgtcgcccaggctgcagtgaagtggcatgatgtctgctcactgcaacctccacctcctgggttcaagcaattctcctgcctcagccttttgagtaactgggattacaggcacccaccaccacgcccagctatttctgtatttttttttctagtagagacggggttttgccatattgcccaggctggtctcgcactcctgacctcaagtgatccacccatctcagcctcccaaagtgctgggattgcaggtggggctaccatgcccggccccatctcttattatttttttatcccccaaatatgtacagttgtgatatattaatttttcattttttctttttatttcttttcattttttactttaagtttcaggatacatgtgcagaacgtgcaggtttgttacacaggtatatatgtgccatggtggtttactgcacctatcaacccatcacctgcatgtattagctatttatcctgacgctcttcctccccttgtcccrtccctgacaggcgccagtgtgtgttgttcccctctctgtgtccatgtgttctcattgttcaactccaacttatgagtgaaaacatgcagtgtttggttttctgttcccctgttagtttgttgaggatgatggctttcagcttcatccatgtacctgcaaaggacgtgatcccattcctttttcatggctgcatagtattccgtgctgcatatgtaccacattttctttatccagtctatcactgatggacatttgggttggtttcatgtctttactattgtaaatagtgctgcagtaaacatacgtgtgcatgtatctttataacagaatgatttmtattcctttgggcatatacccagtaatgggattgctgggtcaaatggtatttctggttctagatccttgaggaatcgccacactgtcttccacaatggttgaactgatttacactcccaccaacagtgtaaaagcgttcctatttcaccacagccttgccagcatctgctgtttcttgactttttaataattgccattctgagtggtgtgagatgatatccctttgtagttttgatttgcatttctctaatgatccatgatgatgagccttttttcatatgtttgttggtggcataaatgccttcttttgataagtgtctgttcatatcctttgcctgctttttgatggggttgtttatttttttcttgtaaatttaagttccttgtaaattctggatattagacctctgtcagatggttagattgcaaaaattttctcattttgtaggttgcctgtttgctctgatgatagtttcttttgctgtgcagagctctttagtttaattagatcccatttgtcaattttagcttttgttgcaagtgcttttggagatttcatcataaaatctttgcctatgtctatgtcctgaatggtattgcctaggttttcttctagggttttcatggtttggggttttacatgtaagtctttaacctgccttgagttaatttttgtataaggtgtaaggaaggggtccagtttcagttttctgcatatggctaaccagttttcccagcaccatttattgaatagagaatcctttcmccattgcctgcttttgtcaggtttgtcaaagatcagatggttgtagatgtgtggtcttatttccaaggtatctattctgttccattggtttataygtcagttttggtaccagtaccatgctgttttggttactgtagccttgtagtatagtttgaagtcaggtagcctcccactttgttctttttgcttaggattgtcttggctatttgggttcttttttgattccatatgaattttaaagtagtttgttctcattctgtgaagaatggtagttttcacatcctttgttagctgtattcctaggtattttattctatttgtagcaattgtgaataggagttcattcatgatttagctctctgcttgcctattttggttcactccaggaaccacagaggacacattaataactggaagtaaaactsctgccccagtcacctcaacaggctcaacaacagcgacactagagggacaatcaactgcagcttcttcaaggacctctaatcaggacatatcagcttcatctcagaaccaccagactaagagcacggagaccaccagcaaagctcaaaccgacaccctcacgcagatgatgacatcaactcttttttcttccccaagtgtacacaatgtgatggagactgttacgcaggagacagctcctccagatgaaatgaccacatcatttccctccagtgtcaccaacacactcatgatgacatcaaagactataacaatgacaacctccacagactccactcttggaaacacagaagagacatcaacagcaggaactgaaagttctaccccagtgacctcagcagtctcaataacagctggacaggaaggacaatcacgaamaacttcctggaggacctctatccaagacacatcagcttcttctcagaaccactggactcggagcacgcagaccaccagggaatctcaaaccagcaccctaacacacagaaccacttcaactccttctttctctccaagtgtacacaatgtgacagggactgtttctcagaagacatctccttcaggtgaaacagctacctcatccctctgtagtgtcacaaacacatccatgatgacatcagagaagataacagtgacaacctccacaggctccactcttggaaacccaggggagacatcatcagtacctgttactggaagtcttatgccagtcacctcagcagccttagtaacakttgatccagaaggacaatcaccagcaactttctcaaggacttctmctcaggacacaacagctttttctaagaaccaccagactcagagcgtggagaccaccagagtatctcaaatcaacaccctcaacaccctcacaccggttacaacatcaactgttttatcctcaccaagtggattcaacccaagtggaacagtttctcaggagacattcccttctggtgaaacaaccayctcatccccttccagtgtcagcaatacattcctggtaacatcaaaggtgttcagaatgccaayctccagagactctactcttggaaacacagaggagacatcactatctgtaagtggaaccatttctgcaatcacttccaaagtttcaaccatatggtggtcagacactctgtcaacagcactctcccccagttctytacctccaaaaatatccacagctttccacacccagcagagtgaaggtgcagagaccacaggacrgcctcatgagaggagctcattctctccaggtgtgtctcaagaaatatttactctacatgaaacaacaacatggccttcctcattctccagcaaaggccacacaacttggtcacaaacagaactgccctcaacatcaacaggtgctgccactaggcttgtcacaggaaatccatctacagggrcagctggcactattccaagggtcccctctaaggtctcagcaataggggaaccaggagagcccaccacatactcctcccacagcacaactctcccaaaaacaacaggggcaggcgcccagacacaatggacacaagaaacggggaccactggagaggctcttctcagcagcccaagctacagtgtgactcagatgataaaaacggccacatccccatcttcttcacctatgctggatagacacacatcmcaacaaattacaacggcaccatcaacaaatcattcaacaatacattccacaagcacctctcctcaggaatcaccagctgtttcccaaaggggtcacactcaagccccgcagaccacacaagaatcacaaaccacgaggtccgtctmccccatgactgacaccaagacagtcaccaccccaggttcttccttcacagccagtgggcactcgccctcagaaattgttcctcaggacgcacccaccataagtgcagcaacaacctttgccccagctcccaccggggatggtcacacaacccaggccccgaccacagcactgcaggcarcacccagcagccatgatgccaccctggggccctcaggaggcacgtcactttccaaaacaggtgcccttactctggccaactctgtagtgtcaacaccagggggcccagaaggacaatggacatcagcctctgccagcacctcacctgacacagcagcagccatgacccatacccaccaggctgagagcacagaggcctctggacaaacacagaccagcgaaccggcctcctcagggtcacgaaccacctcagcgggcacagctaccccttcctcatccggggcgagtggcacaacaccttcaggaagcgaaggaatatccacctcaggagagacgacaaggttttcatcaaacccctccagggacagtcacacaacccagtcaacaaccgaattgctgtccgcctcagccagtcatggtgccatcccagtaagcacaggaatggcgtcttcgatcgtccccggcacctttcatcccaccctctctgaggcctccactgcagggagaccgacaggacagtcaagcccaacttctcccagtgcctctcctcaggagacagccgccatttcccggatggcccagactcagaggacaagaaccagcagagggtctgacactatcagcctggcgtcccaggcaaccgacaccttctcaacagtcccacccacacctccatcgatcacatccastgggcttacatctccacaaacccagacccacactctgtcaccttcagggtctggtaaaaccttcaccacggccctcatcagcaacgccacccctcttcctgtcacctacgcttcctcggcatccacaggtcacaccaccctcttcatgtcaccgatgcttcctcagtatccacaggtcacgccaccctcttcctgtcaccgcccttcctcagtatccacaggtcacaccacccctcttcctgtcaccgacacttcctcagaatccacaggtcatgtcacccatcttcctgtcaccagcctttcctcagcatccacaggtgacagcacccctcttcctgtcactgacacttcctcagcatccacaggtcacgtcacccctcttcctgtcaccagcctttcctcagcatccacaggtgacaccacccctcttcctgtcactgacacttcctcagcatccacaggtcacgccacctctcttcctgtcaccgacacttcctcagtatccacaggtcacaccacccctcttcctgtcaccgacacttcctcagcatccacaggtcacgccacctctcttcctgtcaccgacacttcctcagtatccacagctcacgccaccccacttcctgtcaccggcctttcttcagcttccacagatgacaccacccgtcttcctgtcaccgacgtttcctcggcatccacaggtcaggccatccctcttcctgtcaccagcccttcctcagcatccacaggtgacaccacccctcttcctgtcaccgacgcttcctcagcatccacaggtgacaccacctctcttcctgtcaccatcccttcctcagcatcttcaggtcacaccacctctcttcctgtcaccgacgcttcctcagtgtccacaggtcacgccacctctcttcttgtcaccgacgcttcctcagtatccacaggtgacaccacccctcttcctgtcaccgacactwmctcagcatccacaggtgacaccacccctcttcatgtcaccracgcttcctcagtatccacaggtcacgccacctctcttcctgtcaccagcctttcctcagcatccacaggtgacaccacgcctcttcctgtcactagcccttcctcagcatccacaggtcacaccacccctcttcctgtcaccgacgcttcctcagtatccacaggtcacgccacccctcttcctgtcaccgacacttcctcagcatccacaggtcaggccacccctcttcctctcaccagcccttcctcagcatccacaggtcacgccatccctcttcctgtcaccgacacttcctcagtatccacaggtcacgccacccctcttcctgtcaccagcttttcctcagtatccacaggtgacaccacccctcttcctgtcaccgacgcttcctcggcatccaccggtcacgccacccctcttcctgtcaccgacacttcctcagtatccaccggtcacgccacgcctcttcctgtcaccagcctttcctcagtatccacaggtgacaccacccctcttcctgtcaccgacgcttcctcggcatccacaggtcaggccacccctcttcctgtcaccagcctttcctcagtatcaacaggtgacaccacccctcttcctgtcaccgacacttcctcagcatccacaggtcacgccacctctcttcctgtcaccgacacttcctcagcatccacaggtcacgccacccctcttcctgacaccgacacttcctcagcatccacaggtcacgccacccctcttcctgtcaccgacacttcctcagcatccacaggtcacgccacccttcttcctgtcaccgacacttcctcagcatccataggtcacgccacccctcttcctgtcaccgacacttcctcaatatccacaggtcacgccacccctcttcatgtcaccagcccttcctcagcatccaccggtcacgccaccccgcttcctgtcaccgacacttcctcagcatccacaggtcacgccaaccctcttcatgtcaccagcccttcctcagcatccaccggtcacgccacccctcttcctgtcaccgacacttcctcagcatccacaggtcacgccacccctcttcctgtcaccagcctttcctcagtatccacaggtgacaccacgcctcttcctgtcactagcccttcctcagcatccacaggtcacaccacccctcttcctgtcaccgacacttcctcagcatccacaggtcaggccaccgctcttcctgtcaccagcacttcctcagcatccacaggtgacaccacccctcttcctgtcaccgacacttcctcagcatccacaggtcacgccacccmtcttcctgtcaccrgcctttcctcagcttccacaggtgacaccacccgtcttcctgtcaccaacgtttcctcggcatccacaggtcatgccacccctcttcctgtcaccagcacttcctcagcktccacaggtgacaccacccctcttcctggcaccgacacttcctcagtatccacaggtcacaccacccctcttcttgtcaccgacgcttcgtcagtatccacaggtgacaccatgcctcttcctgtcactagcccttcctcagcatccacaggtcacgccacccctcttcctgtcaccagcacttcatcagcatccaccggtcacgccacccctgttcctgtcaccagcacttcctcagcatctacaggtcacaccacccctcttcctgtcaccgacacttcctcagcatccacaggtgacaccacccctcttcctgtcaccagcccttcctcagcatctacaggtcacaccacccctcttcatgtcaccatcccttcctcagcatccacaggtgacaccagcactcttcctgtcaccggcgcttcctcagcatccaccggtcacgccacccctcttcctgtcaccgacacttcctcagtatccacaggtcacgccacccctcttcctgtcaccagcttttcctcagtatccacaggtgacaccacgcctcttcctgtcaccgacacttcctcagtatccacaggtcacgccacccctcttcctgtcaccagcttttcctcagtatccacaggtgacaccacccctcttcctgtcaccgacgcttcctcggcatccaccggtcacgccacccctcttcctgtcaccgacacttcctca

SEQ ID NO: 8733 - DNA, 17221 bp, Homo sapiens
accaaaataatgctgcctttagtgtttctgagaaggtaacacatgaaacccagtttcccctggactgtgggatattgttttgagaacctatttgtgggggaaggcaggtcagtcacacgttcaaaagttcacaaattaagaacatacaaatgacaggaccaccaaatttagaaaatgtcctamaatgtgcattttattccatatcattatacaatgtttacatatagttaaaactctcaagaaaacgtcctttaccagttgtatgtggtgtctaaatctttaacatgaaggactgaaaagagtggaaatccacactgattgttatcctacagattgtcatgagctgcacgtgtgccaatcagaaaggaatggaagtctcrgaagagcagcgtggcttacagacccttggctttagtgaattcaggcatgcgggatccatagtctcatcttgtagtaaaactcaagacaaaataaattagtgttggacagagttctacattgtacaatgttgaacaaaagaccacagggggaccttttgttcaargtagcaccaatccacacctgattgtgtttccaacattaaccttcctgttgactctatcattggcactttgaatrraacttctyctgcttwartgaggattcctacrctgactaagcacactgtgttgctaaactctctacaaagtgtggcagcatcaacccgggaaatggcacatttgaaccaggatcgccctgacatgggcttgcctttttgtatgtgttttccccaccccctgacctagctggtatcttgtggatgtttctgtgacagtggtaaaagtaaatawattgcatttaaggggtaagcaggtgtttaaaaacaaaacaaaacaaaacaaaatgaaagaatgtggtcgcagctaaggaggttttcacatgttgtttaactccagtaaagtctgatccagcatctgatgcatactaaggttttcttctttggcatgagccactttctctgtggtgagattagaaaattaagtcatgaatagctgtgctttggacacaatggtggtttgtacatttaggcaggcaaacatcaatcacaaacacaggatgagatgattagaactaggcatgcttgtaagacattactcatttctagacaagaacctaagacggaggggagggcatctttgacccaaaggagccatggcacggattctcacagagcagtcaggtgcacctccaccaacaattcactgaggataaaatgcacgtrgkgtttggtgaaggttcactgacggtgtgccgtgggaacagggagaggtaaaaaccaaatacagctgcagcactgttatacaaactgaagaagttacgaacagcagacatttccaaggtacaggcagttaaaagtctgggagttgtgcggtaacacaaactcacaaaagcaaagatgacataaataggttttctgagaacttttaaaatgatttatttctgttgctcataaaaaattgtcaacatgtttcatgcacacttcattaggacattctcttaatatttttatagtgttctatttattagcatgacattctccccagactccaacagcaccattagactgagtaaagcatacctttcagacaaccaggggcttctggcatgagttcctgttttcaaaagctattttgcccaagcataggtacatttaatcatatttcaaacactataccagatatttagaagttaggaatatgagtatctgataggaatatatcacacacacacacacacacacatatatatatatatatacatacttaaagtaggactcatggctgtcaggaaatagaaaacattttttgggggggctcctcattatttatcagttcaaacaagaggacctgctatttcaaggagcagtgctgaattgatataagtattctaccataaaagctgttttgtgattaaagagaacgtaattattccagccatatagagaaacaagcaggcaaggccagcctttcagccaattccttgcatttgcatttctgcagaaagcaactgttttcaactctattagttgaaggtaggacagtcttagattttctgcacatgggctccacgcctagaattcagcccaagttttttcactcttaagtttaatcctcattcagggccagctttagttcattagtgaggcggcgattttgctcaagttgctggtagagttgatctgtacaggtcagcaagcaggttagcagaaaagaggcagaaggaagacaggttagcagacttggtgagaggcagttaatagagaacacaaagagacctcaagcaggacagcaactggtcacttgctgagcagtttactcttaccccatagtcacctgtcctgtatccaggaagggtagaccctaaaaagcttggtagacttaggaagtgtcagaatttctctcttggtgaggaaaggaggggaggaggagcaacaggataagaggaggaagaagagtgaatgttcctcttatacctcactaaaccactttgtgagctgagccatacatggtttctggcaatagatttgggaatgcaggcctggctggaggcgagcccagcgtgacatccaccccttgctagggctcagtgttgaacttaagtgaaacatcaacctgcccagtgctgcccacctcttccagaacccctttcctctccgttcacagggcaggctttcccctcaggtaggaccaactgggggttactgcttttgctgcactgaaattttttgaaatttggaattaagtctctgtccttcccccagtcaccacaatacagggtacacattctgactcctgtctagctttgatagtgttatccattcaaacagcaaaagaacaagcacttgtcaccactcaacactgatttagaatttatctgcttgctttttttgttttttgagacttagtctcgctctgtcccccagcgtggagtgcagtggcgtgatctcagctcactgcaagctccacctcccgggttcatgccaatctcctgcctcagcctccctagtagctgggactacaggcgcccgccaccacgcctggctaattttttttgtattttttttagtagagatggggtttcaccgtgttagccagaatggtctcaatctcctgacctcatgatccgcccgcctcagcctcccgaagtgctgggattacaggcatgagccaccgcgcccagccctatctgcttacttcttgaagaggatggcattcatgtgtggtgctaatggatgtgtataaaatgaacgaaacttgcaacacctacatgaagaccagcgtgatatacattttacacactgacacgtgatctgcttacgggggaaaacaagtgcaggagtcagtctgtatctgatgatccaggggacatccaagctatgacaagcaagagcccggtatgcactgggaacagctggaggatgcacggtggctttgaatgctggtgacaacttggacctaaaaatacttcatgatcttgaaaagctaacagacctacccctagggaaaatgtgcctgcagcccccgggtctgtcaggagactgagcagttctcacattaacattctcttataaatggtaggacatgggaggatgctatgctcgttatgttttctcgcttggaatatctgctgctctgtcctctttgctcatccacattttttgaatatgccaaaccccagtcaaatgtccgctacctcctccagggagctcccagtcagaatggttctctcttccttgttgcctccaaatacacatgcctattagttcggactcgcttcactcctctatctccccatcagatgsccagcttattgaggacaaagagcctttccagcccatctctttaccacacccccactgcttcccacggtgttttgcacgtgacatatgcttgggggttccaagacatatatcccattactacattcacactatggacataggaagtgtcgccatgggtggggagcttgtctcagtttgctgagcccaaatgtttggccaggctagaatggaagaactttggagaaaatctggagaatccagagggtcagtatgaattcagcaggaaggacagtggtccctccgacagcctcctctggatctgctctgcttcagctgctgtggagctggtgtgcatgggtggcccaaaggcagggacaagacatgctcatatccttggaagtgttttcccttccrgttctatggagactcccagctgtctgaaacttcaagtgcccaaactcagtgatgcttttggtttggcccaccagagcagctgtagctatggcctggccctttgaaccagaagcctggttcaaatcaacagttgaacaagaaatcaacaatttcttgataaacttgagtttatcaagttttcctcttgcacatgcataccttgggctactcctgacctgccctcccagtccattagtgccccacttccccttgtagagtgtacttatagaaagtgcgaaagtctctggaaggatttccaaaacacagatgtgcctccagaattacatgaacatctgctcagcagaactttcagacttggcattttgtctacatcaggaagcaggatttactcagagaagggtacacttctcttattctgaatttaaaaaagaatgaggaaggaatcatagtcagaagcaggcccaaggagccttaagaaaagaaaagcatgaaatcatggaagtctttataaactcaagggagagacattgtccagattctaaaattccaccatactatgactaaaatactttaattcacagctttctttaaaaaaaagtatttcctctatgctttgaagtctctgtagagtgagaatgacactatcttctgagtttgtccaaatttatttgagtatggtggtatatcagccctctcgggctaaaaaaactatatacaaaacatgcagatcatccatgttaaaaaaaaaacaggagaaatatatagctagattgttgaggaaggagaaatgttgggaattataacactaaagtccatattagttaaagttctattttttgcaatgtatttttttaaaaaaatcacttaattgctgtttgtgaaataaaacagaagcccaaatgaaatacaattgtcttctgaacaatttccaccaactatctttttgggaaaaaaaaaaagaaactttcattgctatattttaaaaatgtccacaaatgaaaacacagccattgaacacaaagattatgtacaatccctcccaaagagtatgtgctaaaaagcacaaaacaaatcacgactaaacagagtaatcatatttagaaaacctaagatgtcattttcatgatcaaaataaaggtggctgagtcatgaatatacttcaaaaaagcttgaacttttctttgtgctataaaaggatgatcgacaataaccaaaacttacattgtttgaatccaagttctttttcacccttctcaatgtataacttcctagtaatatgggacagctacagaaccattcatcatgagcctttcattagttagccaggtcctcccaagtaaggccaccgaaataatcaacacagaggggtcactacatcccgagctaaacctccagcaaaggaagacactgatcaagccagacctttcaactctcaacaagcaatgtcccctgtgtgacccagactgcaaagcagagccatcacaattcccccaaaacccccccagatgtccagacctcattctaacctttgaaaatcagaactctgagagggaatgcaggcctgggtatttttttgaagttcaacaaggaactactgctttagaaactcctgatataattctgtatagtgttcagtatttaaaaagaaaaagcagcagccaaacactaaccctcatatgtgtgaagcagctttgtagttttattcaatgttgaaactaaaatgtcaataaataagaagtaaaaagaatagcaaacagaaatagcttacacagtgtttatttgacactgaaacgaagagcttctgtamaatagaaagcacagtgtgtgcctggctctaaggcaggatgctaagagagagaaccagggtcagctggagaatagacaaatgcagagctcagagaggtgggacatccagctcgacgagggagtcttgggagaagtgaagcaaagaaacttatctgcgtgaagataaaaaggtgggaggaaaaaaaaagtggcacaatgagaaaaaaaaaaaaaagaaaggaaaccaaaccaatagatgagagcacttgaaacacagacaagaagcagtcatgcaaaccccactgccagccacacccttggaaggacatccatcttcccacctgaggccgtcacaggccgcctttcggcaagggtccattttaagaagacccatgaacagaatttaaaaacaaaaaaaattttaagctacactcgtctttcagaatatttaatcatacttgatgcaaaaagtttttcccaaagaatcaccacattttagcactgaaaaagaccttagagacagatgatctgctccaccccctcatttacaaatgagggatgagaagacacattttctctggtttccatggcaacagtcatgtctctagaggcttttttgttgactgtggggattctataacctctaaggcagcaggcacatgccactctcttcaagttaccattttttctgcatgggtaaatgaatgacaggtgggcttggaaaatgacatttccagcttcaatggaattcagggtgatattagaatgaagaactctgaaacattccaggttagaatttaaagtagtagaaaaagtttaatgtttaagtttggttagtaatatgtaaattagttgtatctgttcaaggttcttctcatgataacaagactacctactccaactcttactgcctaacagtaaaatctgggccattaactcccaagctcacattgtacaatctgtgtttaatttcccatttatttgacacaggttgtggtaaatatttatcgtgggtattttaattcctttcataaaaacacaaaattaaaggcttggttactcagcagagggttctttttactctaccattcttttttttcttgagacagagtctcgctctgtcgtccaggctggagtgcggtggtgcgatctcggctgactgcaagctccacctcccgggttcatgccattctcctgcctcagcctcctgagtagctgggactacaggcatccaccaccacgcccggctaattttttttgtatttttagtagagacagggtttcaccgtgttagccaggatggtctcaatctcctgacctcgtgatccgcccgcctcggcctcccaaagtgctgggattacaggcgtgagccactgtgcccggcctactctagaattcttaaaagtaaaagagatgatcttttgtagtaccactgttaaagctgtattggatcatgccaatttccttatcctcagattctcaataacctgacactttaagggttccttcaaattatatttaacgaaaatgattatgttgtacttagttgaatttcaggaaacaaattttgatattttttgagaagttcctgtacaacaaacggcatggccttctagttttacttgagtttagcttaatttcccaaaaggacagtgctcaaggycactcattctagttcactgctctagttcagygtttacaaaataaacggattctgaaaagaaaatggtytgtatagacagacttaatctaattggcctttatattagcagaaagtgaaaaaacaatgactattctaggttatgacaaaaagggtgaacacaagagtgcaaagatggagattagggagcaaggaaggcatggtggtgagtttattacattagcawgagggcagggtgtaagcaggcagagtggatgaacgtttacatggaagtcatatcgttgagagcgtggtccagctcctcgctgatggctttgtacttcagtttctgagcgtacagctcgtctatgaccaggaagtggaaggcagaggtgcaagaacatggagagtgatcaagaaatggagggtgagtgagggtggtgcgcgcaccatcccaacacagcagcaagaaaagggcaatgcatgaaggggttggtgccgcagcaggtggccaatgcaggaggcgtgcgttttgttttaagtaaattgaaacaaaaacaaagagaacaaaacccattagaaaataaaatgaaaaagactcaatatgaaaatcctaacaaatatggtaggtatatcagtaaaccatgttaaattgtaaacgaaaccacagaaggctgtctcctggtgaggggaggcaggggctaatggaacatctttcttttgcagagctatattttaattacactggagtagtcaggcatctgcagctataaacaatgggaaaaaaatgcaagggcagtgttttggaagaacaatttgtgactacagcctgtagtccttatctggttccaccttcaaaccactgacttcctgaccacactagaccactgggatagcgatttcttagtgccatttaagctactcctgtggtcttcccactcaagctgcctattactggtccaggaggcttgaaaagcaatgggcgccacactttatatggcaagtctgcaacttagtttttgtaatgctgcaggtttcatactttgctgcactttggcagatcattttgcaaccatttgtcattctctcttctccactattttggttattatctgcaccaaacactagttccttctctaatcccttcsgtgatgtagatatttgtcttttttctttcttgttcacagctaatccttcacaagcttcaaagctcaacatttaggatatctgtgagatagagtggttattactaaaataaaacctaagtgccttagggaagaaatgcttaartataatttttccctcctccttcaggatataaagtattttgttaagataatatatgacttaaaawaacccctaaatccttactttgaattcatacttggaagaagatgggttcttctaaaaacaagaccacaatcaccacatcattcccaatttaattaggaagtaacactaaagatataaaatatactagagtcattctcaccaataagcacctcactcacagtgaaaaataaacctgccacacttgtaatgagcatgaagtcaagctggatggcatttgccactatggctggtggctaactagtcacctcgtgagcagaagacttaggttcatgagttcaagagccacagagaaaaaccccagaggacacacaggaagaatgtgcaagtgcaaaggagcgtatcaatgtggatgcccttgaattggaaaattgttttgccaggttggtattcaaccataaggattaaactaaaaacactacttaagatcttaccttctaagtcatcaatgcttttctccaatttagttactgacctctccgcaaactcagcccgagtctcagcctgtaatgatttatttgagttaaagttgggaagttttatgtttcctgtagctacaaacatagggaaaactagaggatgaaaatgaagcacatcacctataaaatggatcagaaactacttgtcagtttcagtcacctctgtgagaaatggcagttagcacagtacataaactccaaggygacctttgaatattcctgacttggatcattggaactttaaaatgaaaaggccctgaccggttccatgaaaacaaactcatttaaaatccagttggcttcatccacaactctcatattacctccttcagcttgtcggaaaggaccttgatctcttcctcatatctgtcttccttctgcgagtactgtaattagaaagagcattccagatgtcaggctgcagctcaatctactcatggcttctcatgcaaagaactcgccagctcagccaacagatgttaaggatctcttaggaggtaatggaacctctgatatcaaatggcacactgcaatacattctctgctttcttgcctattgttttacatgggataacaacaagataacttatccacttggcacttggtttaaattaaattgatgcctcatatccctaacataaaataaattctctagttaaaaaaaagaatttgttatctagtaactctccaaaaatcacctcacaatattgccattttactaaaatgtctactgtaagtgttgctttctggcagggcctcttttgagcagctcttaaaagatgcctttcccccacaccatcctcctggcctaccttctcagcctgagcctccagtgacttcaagttgttcgtcacagttttcaattcytcttcaagctcggcacatttgctaatgttttcgatcagaggcagaaagggtgggagacaagccaaaggaaggaggagagaaaaaggagagggatgggaaaaaatgaaaactgagtcctagagacgaagggctgccttaaagtagccaaatcatcaggtattaaaatgtttagkttttccaggaacactgccccccaacctcgcaacagcagaaggcagggtgaccaaatccaacaactttgaagtgcgataatttggctccttttttggctgcccaaagagcatttatgaagggaaaacaaaggagcataaaggaccaagggaaagcacttaaggcaagatataaatagcagagggtgaagtgaaggtgcagtcgttataccaaacgaaccaggaggcattggaagctgaaagatgtctgggttgcagttaaacctaaaaaccacacgagccatcagtaccttatcctctgcagccattaatgctttcaaggtctgatccattattcttaattgttcttccagctgtcggacttggctgttagtggacacaggaaatgcacaaggccattcacaaaatcagtgtgcaggtaaggcatgcagtgatacacgcattcatacataagacaccccacacgagtcctccatgttccatactcgtggctcatccacatcaaatgagcacaaaaggagcccggagctgaaacaggtaatgtgcagctgccagaaggtcatgctgtttagtcactgctctgcagcaccccattcgtggcctcctggcgccgggcccgcttacccttctgagagctcagcccgctcctctgcacgttccaggtcgctctcaatgatgaccagcttacgggccacctgcagcaggaagacacaacacacacaccatgggtcttgcaagctttgtgtaacagaagggcatgggggtagagatcagatcccatcaggccctaagggttttgtctacaaacaatatgatcctctttctggtagaccagagagaagcaactctctattaggagtgccagcagagaggagatcagaggcttctgctttgactcagaatggttagctgtgattgggcagtctcaattggaagtctgacctaggtgaaccggcagccagaccaaaatgtggaaggagggataaaatacacattcacaatctcaaaaacagcagtaggatgagacatgtactaaaaaggtgggggctgccaggaaaacaaagtaaacctaagaactccatcaatttgatggctgatctgtgcatctacctccttactgcagtggaagaatacaagagacactaacgtgagacaagttggtgagataactgacaaaatcaaatttgtatttagtggaagaaccagagagaggaagggagcctctgaagcagatcaaaacttgtgagcatagtgtaatctgaaggtaataatggtaataaaaaggaggggcaatgctgtttcaggatagccacgatgtgatccaataaggaaaaaacagaaaccttaataatcaagttgcctcttatcacaggaggctgttttcatggggacacgaccaggagcaaattctgctgaaaacctgcgttgataatagttttctaccacccttgaggagagaggcctctgtgaatccactgagaaactgtctgtggtctctaagctgcccaatctggatgtgccaggtcactctgggaagaaatgacttgcaccatgacagcatgagagcctcctttcacaagacacagggcccaactctcccttccggccaaagatcttttgtccgggtctttgtggctgggggagaggagttttggtccttcttcgcagtgctactgattggcttcctgataaagcctgggatcccctagcaggattaaaattagaaccgttttctggacacaaaggaactctgcttctcaaaaccacccatttctgccaacaaagcagatggcctcactcgggaatcaagactgtacattgctccctggcttcctgaaggccactgctgggtgtccacaaggctttgggccccaggatctgacctcttcatatttgcggtcggcatcttcagcaatgtgcttkgcctctttcagttggatctcctgaatttccattttttcttcatctttttgggctcgactctcaatgactttcatgcctctgaaaagaaagacaagcaagaaaacccaagatttagagctgaacttcccaaatgcacactgcactgctgtggcttgtgaggcttagtgtaagtggtagaccaaaatagagcacagagctacttttattttccaaaccaggaaacaacaatttccagagctaaaggtggaaaaaagagacacatttctctctgttcactgtgaatgaactctctcactttgagtactgatgaaactatcaggcatctaacattaatgatgacgaaaggtaccatgtcaggaatctgtctgaatcttggcagtatgaaaccggaaaagccaatatgctttactattaaaaagataatgagatttcttgcctttcctgtgggaagcctcagcttgcacatgaaccaaagctagaacaaaatcaaacttatctttatatacctctttctacaaagaatcttcttaccctgccacccataaacaaaaatattagacttaatgttagatttaataaactattaagtccacaaagaatgctgatatttgaccatttcagacaagtaataatggcaatttcttatggttcaactgaatgcatcaaattaagttttacctataatggaaccctttcatgacagcaatgctgggagacaggcctgacactgtcctctacactgagtgtattagggtcctatggcatggtgtatattagggtcctatagcgtggtgtaatgtttcagaaaaatactaaatgacctatgatattttacagatatatggaataacaagtcatgtaaaatggaattcatttatcaaaatttaagtaggcagtataagtgaaccactatttttttatttttattttttgagacagagtctcgctctgtcacccaggttggagtgcggtggtgtgatcttggctcactgcaacctccacctactgggttcaagcgattcttctgcctcagcctcccgagtagctgggattacaggtgtgcaccaccacgcctggctaagttttctattttttagtagatttaggggttatgccacgttagccaggctggtctcgaatccctggcctcaagtgatctgcccgcctcggccccctaaagtgctgggattacaggtgtgagccaccacatctggcccactatcttttgatgaagcattggaatacagttgaggagatctgggtcggagtcttggcttagccacaaatatgctgtgagccttggtgcaagtcacatcagcctctgagccctacttttctcatttgtaaaactaagggactaaatgatccccaagtcccctttactccgaagtctaacattaccagactgcctttaaggaacactaacaagtatatttcagaaagaagtcagccacaaaactgctcttatgcgtacactgtaagatgcttagtcatcttaaagaagtccaaaatgcttggttagcgaagaaacactaagcagcggtgaataatggcctaaaaagtttagctaaaaatcttctttaatcctaaagtctgaaatcactctttatacctggtacctggtggtagggtcacttcaaagagtaagaaatggacaagatgactgactgcattcacttgcccaggtcacagcacagacagatacacattcagtgctctgagccccttcatgctatgccatccctcaagcggcagaacgctctctcacctcatggagtctctcttgaagtacttctatgcaatatggcaaatccttacttccaacagttgagcttaagggaaaatgccttttagaccacacaaggctgtgctggtctatacgaaccaygctttcctttactaccacaaagctgaatctgagtaataattcagctacagccagattacagtggaggtgggctcagaacacacgagcatctgactatttgtgtgcatgtgtgttgtgtatattactaagaccaagtccaaaatattttacttttgcagaccatgtttctgctttgtgttttttcttccacctatttgttaagctattttgacaactgatagtccacagttcctttatttacacctaagcctccttgtatattataaaataaagttacactttaaaaaatgcacaattgctctgtggtcagtaggagtgaaagggccaacttgtatccctgacatttctcctttacatgtctgtctccctcattagatggtgagttctgtaagggcaggaacaagatcatcttcttctttgtaaccttagggcttaggacagtgctttggacatagtaggtgtttcactaatgctaaatgaacaaaaccaaccgagttatacctgggatcaatagaggaaatgatcccaccaccaggggactgaaaaattcttaaacctcaaagatcacaggagccctccggtttattccaccaggaaaggcagctgcaaaagatggctgatgaggcattctcacctctcactctcatctgctgccttctcagcttcctccagcttctgcaaagctgttgccagacgctcctgggcacgatccaactcttcctcarccagctggatgcgtctgttcagagaagctacgtcggcttcagcctaggtagagagtgaaaagcatttcagagttggggagaaagtgagggtggtagcttcaggaaatggctgggactgcaatgctgatttyagataggaagactgtcttgtggtgagctacctttaagtgcattacaagccctcatcaactctggagttctcggacacatttacacattgatttatacagtgaacatccatatttgtgtatacacaaatctatacacacaattctcatcagacagacagatcattagcaaacgctctttcacatggttcctttcttccgtagatttttttgttttgttttgtttttgagacagggtctcgctctatcacccaggctggggtgcagtggcacgatctcagctcactgcaaactccgcctcctggattcacgccattctcctgcctcagcctcccgagtagttgggactacaggcgcccgccacaacgcccggctaatttttttgtatttttagtagagacggggtttcaccgtgttagccaggatggtctcaatctcctgacctccttatccacctgccttggcctctcaaagtgctgggattacaggcgtgagccaccgcgcccggcccacttccgtagagttcaacaccctggctttacttgcctgttaaacaagagcgtcatcacggccacctcactcactgggggcctgaagtgtgaactgagacaagacttacccaggctcagccatgtaagacaatagcagtacagccagaaatcggactcaagagtttcactcaactctttccttcaagccactttatcataggatccttacaaaggaacttaaatagtttaaaattcagtggttctaaaatacacaccacatgaaggcccaacacaatccagtaaccccttttagaataactggcctcattggaacagagccaagacaaatttcccaagtgtttttgatgtaagcctatgatttttctttgaagtcaaggttaatacaagaaaagtatcaaactcctaaaaagaaaaataatacaagtactgtttttacttggtatctgtcactgaaataaaatgttggtttctttgagaggcaatgatttttttcctgtcataagaaattgttgctatgagcctcagaacacttataagactatgatggtccattatacacacttgcactggtggctgtttaaatattgtgcatggaagtgggagatggaatttactaatcaggtaaaatatcctcatccactttgaatgtatgttcactaaggggtggtggggttttcagaacacttaggagttttctagaaattacaatacacacttagggacccatggtaataggataacaaatttctctacacacagccctgtctttgtcattgaactgtaagctgctcacatccagagaactcacagttctctgcacagagtatgggctcagtaagatgagtaaaaccaacctaattttaataaaagcaacgttctcagcttatggatccacaatacagagttggaaatgcaaatgtagttagaaactgtggtcatagtctttaatcaaaggaatctgagaaccttcagctctttgctcacctagatttgtaagattttaaatgccaagttttatctgggaagagaggtgagtagggcatctccaaccacggtgaaggactctataaaaacatgtaaatacacttttatcttgacaaaaatgtagtaattggttgatggaggcagggagcagggcaaatgtgaaataaatcagaggaagagcatttacaactgtagtgcctacaaagtaaatcattatcagtgcacagctggtaactggacccagctaggaattactggcagatgactgttgtttctggtgtgtgtgtgtattgaagggtgagggtaataggataacaaatctctcaattatagggaagtgtcttttaaaaaccattaggcttttttttttttattactattactggaaggatgtatatattaaggatatacttttgggtcaggtaagatttcttcacttttctatattttcattttccagtaaaattctattccttttgagggtgggggggagactcaaagcggaagcaaaaacaaagggcaaacaaaacaaaacaa

SEQ ID NO: 8734 - DNA, 26541 bp, Homo sapiens
tcataatcacgttacttaagctgaaaatgtcactaccatctggagacttggacatgttttattgggaatatatttttttctctctgaatctgttatgaacgcattggttgggtgggttcagtaataaacatgtgagacctttcatttcaaaaaaaaaattttaatgacataatagattacctaaatttctgttttgctttgttttgttttttgagatggagactccactcggttcagtggatcgcacctgttgtcctggcactttgggaggctgaggtgggaggattgcctgagaccaggagtttcctgggaatcttctcatcttccctaacccagttcatgaaagacccttggactttactgttagggaaaaaatctatataaaacaatatcagcagctgggagtgatggctcatgcctgtaatcccaacactctgagaggccaaggcaggtgaatcacctgaggttaggagttcaacaacagcctgaccaacatggagaaactgtctgtattaaaaatacaaaattaggcagggtgcgatggctcacacctgtaatcccagcactttgggaggccgaggcgggcggatcacgaggtcgggagattgagaccatcctggctaacacggtgaaaccccgtctctactaacaatacaaaaaatgagccaggcgctgtggcaggggcctatagtcccagctactcgggaggctgagcagggagaatggcgtgaaccctggaggcagatcttgcagtgagccgagatagcaccactgcactctggcctgggcgaaagagtgagactccgtctcaaaaaataaataaataaataaataaaaatacaaatacaaaattaggcgggcatggtggcacatgcctgtgtaatcccagcgactcaggaggctgaggcaggagaactgcttgaacttgggaggcggaggttgctgtgagccaagatcacgccaatgcacaccagcctgggcaacaagagcaaaactccatctgaaaaaataaaaaacaatatcagtgtgtcaaagcattatgtctgtcacaatacttgtgaaaggaaaatcaaaattactaaccaaagagaaaagtcaagctgggaactgtgttagacaaacctgcctcccattttattcctaaacaatatagctacaaggactaaaccaaaaatctacatactccactcacaaactgtgggcctcaagatctccaccccaaaatagttctgttgaatttcaccctggcaatgtaaactgagagcttatcttcacaggtgtaggaaagaacccatccctctgcacacctgagtcaaatgtctatctgactacttcccctgacctattttttatgtaaaaattcagggtcactgagccagcctaaggcataagtgactattcctccaccctctctcacatataaattgtgtattcaatgaaaggttgatcaaagactcaaacaatgtgatcatttgttatctccctgtgacctggaagcccgcaattccagttatttcaccttcccagatcgaaccaaggtgtatcttatatgtattgattgatgtctcatgtcaccctaaatttgtaaattgcagcctgaacatcttgggcacacgtcatcaggacctcctgaggctgtgtcatgggtgcattttaaccttggcaaaatagatttctaaattcattgagacctagtagatacttttggatcacaagctcatgaacacagaaaagatcaagatagaataaggaaaaaatgagtataatggaaagcacaaatcagttccaaaatctcaactccttcatatttattcaccatagggaaatgctttacaactttgtgggattagagtccatttgtgaaagattttatatatatatatatagtttgttttgttttgttttttgagacggagtttcaatcttgttgcccaggctggagtgcaatggtgcgatctcggatcactgaaacctctgcctcccaggtactacggattctcctgtctcagcaccccaagtagctcagattacaggcatgcatcaccatgcccggctaattcttttgtatttagtagagactgggtttcattatgttagtcaggctggtcttgaattcctgacctcaggtgatccacctgcctcagcctcccaaagtgctgagattacaggtatgcgccactatgctgggccaaaagatatatttctagtattagattgaaataaaaacccattctatataactttagctaatttaaaacgcaaataatagataattacatagatacacaaaactttataatatttcacttagtattgctattactatgttcttggggcagaagctcagtctgtcagatacattacaaaaggatggtgtctccataattgtgcttaggactctggtgcataagtggataaactgttaaacaggatcctaggggagctagggtgacaaagttcaagtccattaaaactagcaacatacattccttactgctcacgcatgactcatggtcttaagatgtttacagttaagaaaagcagcttaatcatacctgcaaggacaaactcctacataaacacaatgtccagatgacccaatatcccatgacaatgtatgcttctaagctaattacagtcatgctttcacgtacttgcacactaaaataccaaggataggtgtttttttttttttgatggagcttcacttttgtcatccaggctggagtgcaataggacaatctcggctcattgcaacttccaccttccgggttcaagcgattctcctgcctcagcctcctgagtagctaggattacaggcatgcaccaccacccccggctaatcgttgaattttcagtagagacggggtttcatcacgttcgcaaggctggtctcgaacccctgatctcaggtgatgcccccacgtcggccttccaaagtgccagaattacaggcgggagccaatgcaaccggccaaggatagctttaaatcaacaaagtaataagttttgttacactgtcagcccactggcaggtagacataccttagtttttacctaagcacctatgtaagagaaactttaagagaaggcagttccctttgtttttgaggtcgccctactgtgtaactggtagttttcttttttttttctttttttttttaagacggagtctcgctcaggcttgagacaccttgtccagctgtattttttattattattattattattattattattattattattattattattttgtttttgagactgagtttcactctagttccctgggctggagtacaatgtcatgatcatggctcaccacagcttccattttctgggctcaagcgattctcctgcctcagcctccggagtagctgggactacaggctcatgccaccactccaggctaatttttatatttgtagtagagacggggtttctctatattggtcaggctggtctcgaactcccgacctcaggccatccgccgtcctcagcctaccaaagggctgggattacaggcttgagccaccgcgcccggcctgaagtagaatattttagaaagtaattaaaccttttttcagcataataacccagagatgtacttctgaaggacttaggatctcttcttgaaaggcaagcaacaagggagatagtacctgtaagtcagtaggaaattaaatatttcaaacatcagctatttcaaatttaaagctacagacttttaaataattcggaaccttgagaggaacgtggtcatgcaacctgagtccggtggcatgcaggcgcaacttctacaagttttcctggccaggcatgcaggctcaggcctgtaatcccagcactctgggaggctgaggcgggcggatcgcctgacgtcaggaattagaaaccagcctggccaacatggggaaaccccgtctctactgaaaatacaaagccattagccgggcatggtggcgcacgcctgtattttcagctatttgggaggctgaggcaggagaactgcttgaacccaggacgtggaggtcgtagtgagccgagatcacatcactgcattccagcctgggcgacagagcaggacgccttcccaaaacaaaacaaaacaaaacaaaatgtgctatacaatttagtttcctaatatcaattttaaaaagttttcgtgtaaataattaggaaaactaagcagccccagagataagacctcctggcatcattgtcccttcttatggagtgataatgtaaccttccttgaagtgtatcactccatcaccagtcaagctgccgcagcctatgcactggacttgaatggaaaatgtggtggttctgggaaagcttctctgtatttccttgtgtgtgtgaaatgttaatgtctctacttgggaacgctgaccccattcatttggagttgaggtttccaggtggctattctcatgctttgtgtccaaataaactctataattaataatgtattctaaatttcattatttactgctgacatcagtttctgttggattgtaggagcctcaccagagagggcacctgtccgccatgctgtaaaactcacacttgccaaaaatacatgggttagggtttctccccctccctcaggatgatgctagttagctgacacagatggtcayctccattaccaagtagagccaggatgaattatgtgtgaccaagggtgttgtcaagtcctcttccctgaggactgatcagtgtttatcttgaaaacatgtatttgggttgtatagaacagtgaagtttctttctctcttttcaacctctcaactgtcctctatttcccatcacatgctggtctaaggcctatttattaataaaatagtttttatttctttctctgttatcgtcgtgaagatgatttctcatttaggggaagatttttttagttttcaattgtattttctcaacatttaagagcgaagtgaagagtatttcttgggccaggcacagtggttcacgcctgtaatcccagcatttcaggaggccgaggcaggcggatcacttgaagtcaggagttcgagaccagcctggccaacatggtgaaaccccgtctctacccaaaatacaaaaattagccgggcatggtggcctgtgcctgtaatgccagctattccggaggctgaggcaggagaatcgcttcaacccaggaggcagaggctgcagtgagccgagatgtcaccactgcactccagcctgagcgacagagaaatactccgtcttaaaaaaaaaaagaaaagaaaaaaaagaaagtaatagatctcttccacaaatgtgctgggacaattaactggatatccacatggaaaagaataatgttgtatccctatctcacacaatcaaaattttattttaaaaattaaaagagacgatgaggggagccctgcgggagggtgtgttactttgtcgcccaggctggcctggacccccaggctcagtgatcctcccgcctctggccctcaggctcccgcccacctggccgcattcctgctatgtttaagcagtaggtggtgacttcactcctccctggcctgaacactccgtcgcgcatcccaggcggaggccctagggaagtctctgaagctgagcacagggtggactctccctcctgagtgaatggagaatagaaagggagaggatttctgttctgttctgtgggccgtcagcatgaaattgtacgttccgcccaggcagggctttgcattttacattcttgtttgcatccccgttccagacaattccagggctttcgaatcgtgcttcagccttcctgaccgctctcgcctccaaagcccgaaaaatagagtcgctgggagcgaggctgagagacgcacaggtcccgccccggccccgccctctgccggttctaaagggcaaggtctctccgcctggggccccgcctctacctcgatcaggccccgcccaccttctcgttggctccacccaggcctggctttagtcctgtgcgcacacatccgcgcagaccaggaagcggatcccgtggagtgaaggtcgcaccgcggcggtgagttttgctctgtgttgtrttaagtctgcactccccatatccccggcacttccgtacctgggacgtggggtcaccacagacctgtaaattctcgcccatcttccttcaaccagagcaaatgcagacgttcccctgggaatccggaagtcgcttccttttgtgtttaaagtcgccctgaggctgttcccgtctccagtctttctgctacagggcgctgtatacacttcctatcgcgtagtttctgtgctcaaaaccgttttttaactcctccctccccgcgcttttcaaagtcctcacccgagatgtgtatttccgcctgggcgcctcccagtctcaacctttaggcgcctgaagcgcaaacgtcgcgatcccagtctcagggaggccgagttctctgcctggtgctgggatcttgtggaccccaccgaaggcgtcgtcgcaccccacctcccgcctcatgctgggccttgctgcaccccaagtctccccttagcagtcaccactttccttgagccagcgttggggaggtgccaggggccagtcctgtgacacggtgtgttcttgcctgcctagctccaacccctgaaaaatgagcctctctgggatgcaggcgtcttacttcaaaccctcctgtgattgtgtgggctaaagagatcaggagacagagagtagtagaaaacctgagacagagaaaagaagaatgagaaagacccataacagatggcaaagtagaggatgggtgagggatttgccaagagacagcaaaagtgaaaaaaaaaaagataagaaagcaggaggagaaaagcaactggagaaatgtagagaaaagctagatgtacagagagatgaaggacagacagcaaggtagagaggggcagcaaagagggaggctcatcagagtgagagagagagagagagagaggaggaatttggagccagggcagacagagcagagtggtgctggtggcaaggagaacagagggagaaccacagcagggaggacgcctggggatctggggtgctagagagtggggacggggggtamaacagagaagagagaatttaacagggagagcggcagagatgcagagatgggataagaggcggaaatatatggagattgaggacgatcgaagaattggggagaaggagcaacaagagattaaataagacgtgaggatggagcccaggtaatttttgtatttttagtagagacggggtttcaccatgttggccaggctggtctcgaactcctgacctcaggtgatccacccgcctcgacctcccaaagtgttggaattacaggcgtgagccaccgcacctggccacccaagcattcttgattgaaaaagtttgcttatgtcttagttctacagctgaccctctttccctgctttttgtttgtttgtttgcttgtttgttttgagatgcactttcrctcttgttgcccaggctggagtgcaatggtgtgatcttgggtcaccgcaaccctttttggttttttttttgagacggagtttcgctcttgttgcccgtgctggagtgcaatggtgcgatctcggctcactgcaacctccacctcccgagttcaagcgagtctcctgcctcagcctccctagtagctgggattacaggcatgtgccaccacaccaggctaattttgtatttttagtagagatggggtttctccatattggtcaggttggtcttgaactcctgacctcaggtgatctgcccacctcggcttcccaaagtgctgggattataggcatgagccaccgagcccggcctactcaccaccacctttacctcccggttttaagcgattgtcctgcctcggccttcctgagtagctggaattacaggcaagtgccacaacatctagataatttttgtatttttagtagagatggggtttctccatgttggtcaggatggtctcgaactcccgacatcaggtgatccgcctgcctcggcctcccaaagtgctgggattacaggtgtgagccaccgcactcagcctccctgttttgaaggtaactagctgtgtctttgtacatctgcattttataaatgttactgtaattttcttgtgaggaagaattaaatgttgggaatcagtggcatcagaacttgcaaargaagtttytttatcccaggtatgtgaaagaggcttctctaattttcaaggatagttttgataaggccaaccctttcctttatcccttccaggccaccatgtaagaattccgttacatcttttcactcatctcagaccttctcagcgtgactcggtgaaaatgtccccgttctgaggatgtcacagctaaatctaaagcagatcatgtcagtccctggcagggaaccctccatgggcttcctgtgttccccaggacaaaagcccaactcctcactgtcactccacagccctgtgtccagggcccctgccactgtccaggctcctcctgggaacttgccctcatctcatgactccctctgccccagtcacatttgcttttctcttttcccaaacatcaaaacccttcccgtctsaggtcattttcactgctcttaccctatttctctaaatgctcacagcactgtccctttctccttcaggtcctggctcagaaatgtctcccatgccctcccacccccaactgaatttccctctgcccatcagtctctatcacattactcaggttttattatctctgtgtcagtcacatcagaaacacactttttttctttttccaaagagtctcgctctgtcctccaggctgtgagtgcagtcttgtgatcttggctcactgcaacctttgtctcctgagttcaagcaattcttgtgccttagtctcccaagtagctgagattacaggtgtgtgccaccatactctgctaatttttgtatttgtattttattttatttttgagtcttactctgttgccctggctggagtccagtggtgcgatcttggctcactgcaacctccaccttccaggttcaagcgatcctccaacctcagcctcccgagtagctgggcttaccaatgcccaccaagcccagctactttttgtatttttagtagatatggggtttcaccatgttggccaggctgctgttgaactcctgaacttgagtaatcctcccacctcagccttccagagtgctagtattacaggcatgaaccaccgcacccagccccaatttttgtgtttttagtacagacaggttttcaccatggtggccaggctggtctcaaactcctgagctctactgatcctccccctcagcttcctaagtagctgggaccagagacacacagacgtgcaccaccatacctggctaagtttttgtatttttggtagagatggggtttcaccatgttgcccaggctggtctcaaactcctgagctcaagcgatgtacccaccttggcttcccagagcggtgggatgacaggcatgagccaccgcaccgagcctctgcatgggatttggtcagggctgggtctgtgccctgaaagggagctcattccagcccagctccccactgctgcagcgtgtgagggcttctccaggagggaagcgagagttttcttatagaaatttattatccctggtgcagtgggcagcasaggtgaccatattttttcagagtgagggcacctttgtatgtgtcattgtgttacaggsaggaggtgtgttgattctgagcagtaaacaacatatttctaacattcaggattgacttctaaagacttggtacgtgaggaaaaaacacggaagaggaagaggaaagcaaaggagtcagggatggctcttcytcaggtgagatgatattctcgggggattgttctgtctccttcctttcagaaatgctgatcttggagttgggaatcttctctgagtctcaagtgtcctgcctgacaggtttgctcacactcaactcatgccttccctcagtccctgtcatctcacttagattccatctcttgtgactgagtgacatgaacktgggaagaggctgcactgggcatggtcctgggaagggctcacacccagacatgtatggagatggggtgagggtcccgcagtgtcagtgctgttgggcagcagggattgttcaggggccacatctggatgcactgtcaactctctgtggaccaggattagagcagctgccaatggaagtgacctattaatgtgcacaaagtacgtggtaaattctagaaaaggagaccaataagggaaaatcttttctccctaattttataccacatttttaggtaattgagtgagttactgtgtttctgactcaaaaaattgtactaattagaatggaaagttcataaacagacatgaatgatacaggggttttattccatcmttatttaaagaatatgaaatcaacctaaataatagcargagatttattaaaccattcttagcaaattaagctgatggagacagtggtgttactgtggagaggcttttgaaacaggtgttttttgtaaaaatggttacaatttttctcaaatatgggagcagtacttgcagctgccaaattatccttttccaccaagatgagattcctcttcagttaaacaaaatttgcatatatatatatatttgtgtttgtttgtttgttttttcgagacggagtctcgctctgttgcccaggctgtagtgcagtggcacgatctccgctcactggaagctccgcctcccaggtttacaccattctcctgcctcagcctcctgagtagctgggactacaggcaccccccaccacgcccggataatttttgtattttttagtagagacggggtttcaccgtgttagccaggatggtctcgatctcctgaccttgtgatccacccgcctcagccccccaaagtgctgggattacaggcatgagccactgtgcctggcctactttttgtatttttaaaacctttatatatatacacacaaccccatacatatacacacacatatatacatacacatacatatatacacacacacatatgtatatattttgaaaatctgrgacaaatgacaacactttgtattaacgtggttttttgtgagtgtgtgtaggttttattttttttttaacatayacaaaatagaattttgtacttcgattaattttattttcatgtattttattttattttgagagagagtcttgctttgttgcccaggctagaatgccttggtgcaatcgcagctcactgaaacctccaccatcaaggtcaagccgtcctcccacctcagccttccaagtagttgggacaacagatgsctgccaccatacccggctaattatttatttctaacgtaagcaattcatactgagagggtatcctgagctcttcagaaagtataatcaaacaccactgggaagacatcatgtggtgaagaatcccttacttggatttgtcggaacattctctgcaattaaatccatgctttcccctctcctcttctcattttctgtaaagataagatctcctcccataaccatttgcttaaaatgtgttttcctttcagggtctactgacattcagggatgtggccatagaattctctcaggaggagtggaaatgcctggaccctgctcagaggactctatacagagacgtgatgctggagaattataggaacctggtctccctgggtgaggataacttccctccagaagtggggatgtgcccttgtggatctttgtattttctcttgttgyctcttgggagyyrcatccttgcttgrctaaaatggaagcygtattgakttwgaaatgaaaagcttcatgatgtagcatctggactttcactgtcccctttagatgttctgcattcttcatgatagctcagtgggggttccagaagtaaagtaagcataaaagcttatggcaggccaggcgtggtggctcacacctgtcatcacagcactttgggaggctgaggcgtgtggatcacttcaggtcaggagttcaagaccagcctggccaacatggagaaatcccgtctctactaaaaacacaaaaattagccgggcgtcgtggtgcatgcctgtaatcccagctcctagaaaggctgatgaaagagaatcgcttgatcccggcaggccaaggttccagtgactgagaacacaccactggactccagcctgggcaacagagcaagactctctctcaaaaaacaaaaaaacaaaaccttatggcagactttaatcatatccagtttcctgtttgcttttcctgtgctttcgattcagtagttcttggaagagagcttgatgtccacatattacatgttacagtgctctccaagcattcagaaggaggcagtcagtggagcaattagtaaaatattttcctagatccayctgtaatgtcttctttcctacagaaatatagggctgggactctacaaaagctccagcacgtcttagtactttctttttataagcaggagtctcatgctgatatgttatctccatgttggagcaagagaaagggccctggactgtggagagtgaagtgaaaatatcaaaaaactccagatgggtgggaatgtattataggtgtaaatgcaggtaagagctcagatgggcagagtggaagctccaccttcaaatagtrtgtggggaaactctgcaagtgggagaattctgttggaaaaggaaagtttcaatcctgagatctctgaaatgacatctttctttgcccccacttatccctctgctcttcctttctttctttttcttattttatgaaagagtctcactgtgttgcccaggctacagtgcagtgatacgatcttggctaacagcagcctccacctcccaggctcaaaggatttttgtgtcccagcttcctgagtagctgggactgtaggcgctcaccaccatgcccagctaatttttgtgtttttagtagagacagggtttcaccatgttggccagcctggtctcaaactcctgatctcaagtgatccacctgccttggcttcccaaagtgtggacctaagattacctaggtgccaaggcaagagactgaaggcacaaagtgtttcagtataataaagaaaatagttacaataagaagagtcataatacaaattagatacagagatgatcatggacaattatcaatcattattaacattagcttttaatattactctttgttgcattattaatataacctaggaataacyggcaggtatagggtsaggtgctgaagggacatggtgagaagtgacctagaaggcaagaggtgagtcctctgtcacaccsgcataagggccgcttgaggggtccttggtcaagcggtaacrccagtgtctgggaaggcacccgttacttagcagaccgcgaaagggggtctcctttccttggaggagtcagggaacactctgctccaccagcttctcgtggaaggctggatagtatccaggcctgcccgcagtcatccggaggcctaaacccctccctgtggtgctgtgcttcaatggtcatgctccttgtctactttcatgctcctcccgtactcctggctcctctttgaagttcatagtagatagcggtagaaggaatagtgaaagtctttgatctttcttagaagtgcatagaagagccgggcgcagtggctcttgcctgtaatcccagcactttaggggtccaaggcgggcagatcaagaggtcaggagatcgagaccatcctggctaacatggtgaaaccccgtctctactaaaaatacaacaaattagctgggygtggtggcgggcacttgtagtcccagctactcgggaggctgaggcaggagaatggcatgaacccgggaggcagagcttgcagtgagcygagatcgcaccactgcactccagcctgggcgacagagtgagactccgtctcaaaaaaaaaaaaaaaaaaaaaaaaagaagtgtatagaagaaaacgctaacgtatgctgccttctctctctgctttggctacctaaaaggcaagggccccttgtcctatgatcacgtgacttgcttcaccttatcaatcacttagaagattcaccctccttaccctgcccccttgtcttgtatgcaataaatatcagcgcacccagctgtttggggccactacctgtctycgcgtcttgatggtagtggtcccccaggcccagctgctttctctttatctctttgtcttatgtctttatttattacaatctctcatctccgcataagagaacacccgctaagcccgcagggctggaccctacaccaaagcgctgcgattacaggcgtgagccgccaagctcaactattgttattattttaaacagttttgtcttttagttctttgtaaacatgtaaatggtttaaacatgattccagtgtgaatataacaactacgttagcgtccatttcttttatttttgttgaaacggagtcttgctctgtcgcccaggctggagtgcagtggtgcgatctcggctcactgcaagctccacctcccgggttcacgccattctcctgcctcagcctcccgagtacctgggactacaggctcccgccaccgcgcctggctaatttttttgtatttttattagagacagggtttcaccgtggtctcaatctcctgacctcgtgatccacccgccttagcctcccaatgtgctgggattacagacgtgagccaccgcgccccgccgtgcccatttctttcagtaaacagaaatgaagtgtgttgtatagataaaataaaaaggcatgaaaaaaacactgtacatatatgttaccagaaatgcaacatacacagaaataattccgacaaaaataaaaaaagttctagaggagaagtagttttgggaagtggttattgttgcaggtatgttaaagatcttaaagttggccaggcgcggtggctcacgcctgtaatcccagcactttgggaggccaaggcgggtggatcacctgaggtcaggagttcaagaccagtctcaacatggagaaaccccgtctctactaaaaatacaaaattagccgggtgtggtggcgggcacttgtaatcccagctactcgcgaggctgaggcagaattgcttgaacctgggaggcgggggttgcagtgatccgagattgtgccattgcactccagcctgggcaacgagagcgaaactctgtctcaaaaaaaaaaaaaaaaaaaaaaaatcttaaagttatagcataataatgaaacctaaaattttcataacctggccaggtgtagtggctcatgcctatmatcccagtaatttgggaggcygaggtgggcagatcaccagaggtcaggtattcaaatccagcctagttaacatggtgaaacttcgtctctagtaaaattacaaaaattatccaggcacggtcgtgggtggcagtaatcccagctactcaggaggctgaggcacgagagttgcttgaacccgggaggtagaggttgcagtgagctgagatcgcaccgtcgcactccagcatgggagacagagtgagactccatctcaaaataaataaataaataaataaataaataaagtttcataacctgcaaaaactacttctcctctagaattattattattatttttttagatggagtctcgctctgtagcccaggctggagtgcagtggcacgatctcagctcactgcaagctccacctcccggggtcacaccattctcctgcctcagcctcccgagcagctggggctacaggcgcctgccaccacacccggctattttttattgtatttttagtagagatggggtttctctgtattagccaggatggtctcaatctcctgaccttgtgatccatccacctcggcctcccagagtgctgggattacaggcgtgagccaccgcgcccagcctttttagaaatttttatttttgtcagaattatttctgtgtatgttgcatttctgctaacgtatatatacagtgttttttcatgcctttttattttaaaaaatttagttctgaactgggattacaggtacccaccaccgtgcccagctaatgtttttgtatttttagtagatatggggttgcaccatgttggccaggctggtgtcgaacttctgacctcatgattcacctgcctcagacccccaaagtgctgggattacaggcatgtgccaccgtgcccggacattagtcaattcttattccttatagtgctgtgtatagttttgacctcatacatcagaaagtagtgaccttaacatgtatttcaattcttatgttgtgtactagtggtaagtacaagttgtggcttttttcttaatagggaattgtttacaattctgcaggctgcatacatgtacttattattttctggcttgttttatcaagccagaaaatatttatcaatattttattaactgatttttatgactttacctgtgagttttcagtatgtgatatgcaatataactgacacactccactcgttactgtcacaaagtgctgctgggcacagtggctcatgcctgtaatcccaggacttcgggaggctgagacatgtggatcacctgaggtcaggtgtttgagacaaacctggccaatatggtgaaaccccatctctactaaaaatataaaaattagccgggcatgatggtgcatgcctgtaatcccagctactcaggaggctgagcaaagagacttgcttgaacccaggaggcagaggctgcagtgagccaagatcatgccattgcactctgtccagtgacagagtgagactccatctcaaaaaaataaaaatacaaaatttttwaaaaaaagtcacaaagtgcctgttccacatggatatagataattttgtaacagttatttagaaaaatacggtgttaacatttttctttttgagaggtagtctcactctgccactcagggtggagtgcagtggcacaatctcagctcaccacaatcttggcctcgcgggttcaagcaattctccttccttagcctcccaagtagcttggattacaggtgcccaccaccacacctggctactttttgtatgtttagtagagaagaggttttgccatgttggccaggctggtctcgaactcctgacctcaggtgatttkcctgtctcggcctcctaaaatactgggattacaggcgtgaaccaccatgccctgccttgtttctttagagatggagtctcactttgtcacccaggctggagtgcagtggttcgatgttggcgcactgcaacctttgcctcttggcttaaagcaattcttgtgcatcagccrcttgagtagctgggactttataaaggcgtgggccaccacacctgcctaatttttgtaatattttcttatcttctcagtgctatgattctttgacaatacagaaattccattgattttgattatccttacaggagcttgttgtggattatttaccaaaatagtaccttgtctggttttttagcatttatttrtttacactaagtaccctataaatatgaagaatatatatttttctcttctttgatgtgacagtgatacgtyttttgcaaagtgtgatacactttagggtcacagtagaaaaacactcctgactttaggcttacacatgtttgtgccctgtcagtgtttcgtcatgatattggaaataggcttccataaaaatgatytgaagcacatgcaatcaccctttatttattaaaggatcttactccttttgtgttcctaaactttgaagatcatgtttgggaagtttaaaataagtattgttttttatgtaatatttacacatttcagtattgtataacttccrtacttaatttgaaacctatttgtgtttatattttgtagatacctcttccaaatgcatgatgaagatgttctcatcaacaggacaaggcaatacagaagtggtccacacagggacattgcaaatacatgcaagtcatcacattggagatacttgcttccaggaaattgagaaagatattcatgactttgtgtttcagtggcaagaaaatgaaacaaatggccatgaagcactcatgacaaaaaycaaaaagttgatgagtagtacagagcgacatgatcaaaggcatgctggaaacaaacctattaaaaatgagcttggatcaagctttcattcgcatctgcctgaagtgcacatatttcaccccgaagggaaaattggtaatcaagttgagaaggcyatcaacgatgctttctcagtttcagcatcccaacgaatttcctgtaggccaaaaactcgtatttctaataagtataggaataatttcctccagtcttcattactcacacaaaaacgggaagtacacacaagagaaaaatctttccaacgtaatgagagtggcaaagcctttaatggtagctcactcttaaaaaaacatcagataatccatttaggagayaaacagtataaatgtgatgtatgcggcaaggactttcatcagaagcgataccttgcatgccatagatgtcacactggtgagaatccttacamgtgtaatgagtgtggcaagacattcagtcacaattcagccctgttagttcacaaggcaattcatactggagagaaaccttacaagtgtaatgaatgtggcaaggtttttaatcaacaatcaaaccttgcacgtcatcatagagttcatactggagagaaaccttacaaatgtgaagaatgtgacaaagttttcagtcgcaaatcacaccttgaaagacataggagaattcacactggagagaaaccatacaaatgtaaggtttgtgacaaggctttcagacgtgattcacacctggcacaacatactgtaattcacactggagagaaaccttacaagtgtaatgagtgtggcaagacctttgttcaaaattcatctcttgtaatgcataaggtcattcatactggagagaaacgttacaagtgtaatgaatgtggcaaggtttttaatcacaaatcaaaccttgcatgtcatcrtagacttcatactggagagaaaccttacaagtgtaatgaatgtggcaaggtttttaatcgaaaatcaaaccttgaaygtcatcatagacttcatactggaaagaaatcttagaagtgtaaatttgcaaggtttttaggcaacagtcaaaccttgcatgtcatcatagactttatactggagagaaaccttacaaatgtgaagaatgtgacaaaagttttcaatttcaaatcactccttgaaatrcataggagagttcatactggagagaaaccatacaaatgtaaggtttgtgacaaggatttcgggtgtgattcacacctggcccaacatactggaattcacactggaaaggaactgtacaagtgtaatgagtgtggcagagcctttggtggtcagtcaacacttactcaccatcaagcaatccrtggtatagggaaacttgactaatgtaatgattgtcacaaagtcttcagtaatattacagccattgcaaaacattggagaatccataatgaaggaggtcttacaagtgtaataaatgtggcaagtttttcagacatcattcataacttgcagttcattggcgatcttatacaggagagaaatcttacaaatgtgatgattgtggcaaggtcttcagtcaagcttcatcttttgcaaaacgggagaattcatacaggagagaaacctcacaagtgtgatgattgtgagcaaagcctttacttcacgttcacaccacattagatatcagaggatccatactggacagaaatcttacaaacgtcctatgtgtggcaaggtcttcagtccgaggttactccttgcagaatatcataacgttcatttttgaggtaatagttacaaatgcggtgagcacagcaaaccatcaaggrttgacagtagagtcaattsagaattgacttgagtttgagttgactkaaaacattcagttgaagcattaattgacattaaagtgtttatgttaagaggattgggccaggcgtgtggctcacgcctgtaaacccagcactttaggagcccaaggtggatagatcacttgaggtcatgagtttgagatcagcctggccaacagacgtgagtcacttttcccagcctgctttttgtttctttaacaaaaaccaataggggtttttataggtattgtgttgaatctgaatcacattggcttatataataacaatattgatttttccaaaccatcaatgtgggttgtatatatatgtttttaatcattttggttaatgtttgtagatttcaaggtgtgaaattctcagtttttttatgtttattcctaagtatttcttactttaagatctctagcaaatggaagtgttttttaattttcgtttaaattttttattgtttatggaaattcaattaatttttggtgctgctattgcattgtgcaaatccactgaatgtgttgattagttccagtagtattttggttgactcaggccccgcccacctcttcgcctcccgtctggcctgacccmggccccgcccacctcctcgggggtctccccgcgggtctggcttctgtactgtgctgattggcacagacccggaagctgatggcatggactgaaggttgccccgttgagtttgcgcttcccagttctctggtactgctataccggggacgtgggtgtccccacagacctggaaattccggcccctctttctcaactcagagcaaattgagacgtccgggtgggagtccgtgagtcttttccttttgagtttaaagtcgccctgaggctggtcccgtcccggtcttttctgcagtggggccgtgcagacacctcctgtcgcgaaactttccttctcaaaacccttcccgacccgtcctcccgcctcgcgctgtttcaggtcctcaccagcgagttggactctcgccctgggctctcctcatcggcgcctggagggcagcgctgcagccccactcccgggaaggccgcgtcctctgcctggtcctgggatcctgcagaccccacccctgtccgaaggcgccatcgcccaccacctccctcctcgtgccggccctgcttctccccagttccaaccccaggaaaacgtgcttctcctggaggcaaccctctttttccaccctcgccctgttgttcccggaaggcaggcctggaatgtgaagtttccaggtagatggatattaaacatagaattgaagaaaaaaaaaaaaaccccacaaagtaacaaaagaatgaagcggcgaaagcagaaatttactcaaccaagaaagcaccccacagggtgggggtgggcccaagcgagcgtctccagggccccatttacaaagtttttggaggttatttttttttgaggtccctatgggctaccccttatctggatgaagaatttggcccttggccaaggaaataactgaggtaaattggcctgaggccagagcagatgggtgccctatgcagatgaaggggtggccggtgcttggccttggccactcctgggctctttctctttccacctgcgacctggtggaagggggagggtgttagggagagtagcctttgatcctttgttactttgggtgggaagatggggtttttccttttagtctagttttggaaagttcgcgttaattggttttagattccctgcctccctagacccaggacccatgtggttttttttgtttttgtttttgtttttttgatggagatggggtcttactctgttgcgcaggccgaagagcggtgaccggatcacagctcactgcagcttcaacctcctgggctcaagggatcctcccacctcagcctgcagagtagctgggaccacagccgcgcgccaccacaccgcgccaatttttgtgttcttggtagagaccgggttttgccttgttgtctaggttgggctccaactgcagggctaaagcgatccaagagcatcagcctcccaaagtgctgggattacaggcttgagccaccatgcccgccttatttcttaatttaaaaaaaaaaatgtatatgtagactgaacgcagtggctcatgcctgtcatcccagcactttgtgaggccgattctcctctatccaggagacgggtttcaccattttgccaggtttgtctcaaactcctcggcttaactgatccgcttgctttggccttccaaagtgctaggattacaggagtgagccaccacacgtagccagtcctggcattttgtagaaggatggccaacgcagcctgttgacccttcctggccatcacatgaaaatcagcgactcttccttcttacaaaactcggagcttctcaggataacttggtgaaacgtcccccgctgtgaacctcagtgagcccacctgtaatatacaggtgagggagaagaccagaaaagctcagtcagagtgacactgacccctgaaatgatgggcacaatggagtgtgtggcttttcctgtaggacagggaggtatttagttgtaatttgaactttaaaggattccagtcctccgaaaaacaggattagactcaaatcaccttgaaccttatcatctcatggctttgacccacctacatggctccgtgtcccctgcaggcctcgccccggagctctacaatcctgtgtgcagttgtctccgcagctctctgctgggacatcaaacaggcatctccaccttcatgtgtctataagtgacttcctaaacccccaaacacattcccttacagtcctacacatctcagatgagggtgacagtgtacttctgggtgcttagctgaggttgacaccatgtattttaaatatggaaaataaattacattatttgtaagtgttgtaatttataatgtaaagagaaaattacatgtatacatgaaaggagtgagaaagtacatcatttccaaatttattttgaggtgtgggagaaaaatgtttcaaggcctcatccttagggatctgtgctcccgggacccctctgacttcatctcctgcctgtgtcctcctcactccctctgctccagccatacaggcctctttcctttttctgggactgaggttgctcctatctcagggacttctcctgggctgtccctctgcctaggactctctggcccctcaactgcaagtgacaagcagcctttcttccctaagtctttgttctgatattactttctctatggaaacctttgtgatctcccacagccccccacttgacattgcagcgccaccttcacccccacctctggtccatgttgcctgttctgtgtgattcttttagctccttcaccgttcactggatcctggtgagaacaagtccgtaagcggagagcagaatcagaaggtggggctgtgctgggctggcgccatctgagtggagctcaaccctgacttcacattacagttttcaggcattttgcaaatatatcttttgttctgttttatcaaagattgctattatcataggatgggacacaccctcaataatacaatggcactggtgattctcatctgtgtccagcattgaacatcaaggcagtttcctccatattgagaactgagatcagcctgtgatccacagggaggtgagggggctgtgctctgcatggggtttggttagggccagatctgtgtcctgaagatctgtgtcttgctgcatcgtgtgcgtggacttttccatcaggggagcaaaatccaaaaacaagtcaaaattacccttgtaggtcttcctgtgggatgtccttatgtctgcataatctctggtgcagtgggcagcagaggaccatctttgtccctggtgaggtctcccctgtgtgtgtgttttgtcacaggaaaggagggagtgatttctaaacactaaatctcagctgggtgcagtggctcacatctggaatcccagctctttgggagggttgggtgggcagatctcaaggtcaggagatcgagaccatcctggccaacatggtaaaaccccatctctagtaaaaatagaaaaattagctgggcctggcagcgcatgcctgtaatcccagctacttaagaggctgaggcaggagaatcactagaaccagggaggcagaggttgcagtgagctgaggtcatgccactgaaccacattcttgtgacagagctagacaccatctcaaaaaaaaaaaaaagaaaaattaaatctcatatttttttacacacaggattgatttccaaagactcatgctatgtaaggaagccaccaagaagggcaaagaaaaggagccagggacggctcttcctcaggtaaagtgatattcctcggtggattcttctgtctccttgttttcttaaataccaggtattgtggtagccagtcttctgtgattctgaagcgtcctaactcacaagtttgctcgcactcacccatgccttttctcagtccctctcatcttaaattccatctgcctctattgcccaggctggagttcactggagcaatctgggctcactgcaacctccacctcccagggtcaagcgattctcatgcctcagcctctcaagtatctgggattacaggtgtccaccaccaggcttggctaattttgtattttttgtagagacaggttttcaccctgttggccaggctggtctcaaacccctgacttcatgtaatctccttgacggtttttcactgttaccaagaataacacactggctgcctgtgagcatggtgacttcactgcagatatctggagaattcctgcaaaactgattacttctttttggatttgctatttcctcttttacatctgggaagattccatccagacccccagctgcagaggtgccctctctgactgagaacatgagaaatttctcactcttttaagcaaatcttactcctgtggtcttaccaccatgttcttttttgcattcggtgaaaatgaaagccctttttatttatattttctattccttgagagtctgagtagatgtcattaatcatggacttgtatatttaaaatagattttaatactttgctgagcatacttttcatgtgttttgagagctattttgtattctttagttctttatttttgccctggtgttttgttcacattatgcatttttttaggataaaacagaaacgttctttcacatgcctgctttttttttttttcttttaagacggagttttgctcttgtcacccaggctggagtgtaatggcacgatcttggctgactgcagcctccacctcccgggttcaagcagtttttctgcctcagcctcccgagtagctgggatgacaggcaggtgccaccactcccagctaagttttgtatttttaagagagatggtgtttcaccatgatggccataatttcttttggcttctgaaattagaaatttttggccattaatatcttccaacaggcttttctattcctttcttcctctcactgtcttctgggacttctggtactttaaaaaaatttttttgagatgaagtcttgctctgttgccaggctggagtgcagtggtgcaaactcagctcacctccagcctttgtcacctgggtttaagtgattctcttacctcagcttcacaagtagctgagattacaagtgcgcaccactacacctgcctaattgttatatttttcatacagacagggtttctctatgttggtcaggctggtctcgatctcccgacctcaggtgatccacccaccttggcctcccaaagtgcagggatttcaggcatgagccaccgtgcctggcctgttttttttattgtttttttttttttgagacagtcttgctctgttgcccaggctggagtacagtggggcgatctcagctcactgcaacctctgcctcccatgctcaagtgcttctcctgcctcagcctctagagtagctgggactacaggagctcaccaccacaaccagctaatctttgtattttcagtagagacagggttttgccataatgaccaggctgttctgcaaactcctgacctcaggtgatccacccacctcggctttcaagtcctggtgtgagccaccttgccagtcccctcttcactaatttttaatttacataatgaattctgattttgaacccatgtattgagtttttctacttagttactgtatgtttagccctagggtttctgtgtagttcttcataatttccatacgttggttgaccttctcattttcttcatgcattgcttttatgatttcttgaagctgtctcttaactcaatgagtttccaacattgtttgggttggaggtgatggggtctcactgtgtccctcaggctggaggacagtggtacaatcttgggtcactttatcctctgctctccaggctcaagcgatcctcccacctcagcctggcatgtatctgtggatgtgtcctctctaggtttttgcttataatctcctaactgaagttaatttaagtgtgtgtgggtgtgatttgtagt

SEQ ID NO: 8735 - DNA, 141121 bp, Homo sapiens
gctaatttttatattttttgtggagacggggtttcgccatgttgcccaggcaggttgtaaactcctgagctcaagagatctgcccaccttggcctctgaaagtgctggggttacaggcatgagccaccgtgcctggccttgatgctgcacttttctaagcaataattcaagtattttttaactggggtagagggatgcccaccctatcaattttatgcacctgctgtttcttatatctcacaatttcaaatgcacacatttaaaatttgcctaagattggtcgcatttgtatgagttgttctcttcagccctttctttcaaaactgtcatggagatacttggctcattctcttggtgttcctgaatgcagtttcagaaatgaaaactttaaaaatcaaaattccagcttggttcaagacattggttggtgctcaatgtgtgtgcatatatatatatatctatatatatatatttttttcattttttcagcacacaggtttttttttttcatttgttttgttttgtttttttgagacaggatctcacttggttgcccaggctggagtgcattggtgccatcatggctcactgtagtcttgatgtcccaggctcaagtgagcctcccgccttggcctcccaaagtgttgggattacagacgtagccattgcccccagcttacacacagtttttgagctcttactctgtgccaagcaccaagctgggtacaaggatccaaaatgaatgacacttggtctatgtccccaagsaccacccagtcggtcagggagaacagacaaccgaacaagccacttccatgccatgttttctgtgtcatcatgatggaagtctgtacccaggcctcccaggccaggatggactgggcaaagagccccaagggagtggactgccgaatttctaaagcatttggccactgtggccagcagagggcatgagagggagtggccattcagcaggggtcaggtttagagggccccgtatgccctcctttcctggggaggatgtaggatttaatctgttgggcctctggggaagccgggatagcttttgcaacatttttggcaatgttctctggctgttgttaatttcaaaatttttcctgagggcatgtgtgagccagctgtttcaggactcggacctttcttgcagacaattttaaagattttcttgagaatttactatgcacaagagaaatagtaatagtatgaaatagactttgtccccagaggttcctagctcaccattcagaggcaaaaggagacgggaaggcaaggactaggcagaggagttgagaccagagattcacaaccaaagggcagttttgcctcccatgggacatttgtcaatgtctggagatgttttggttgtcccagctgatggaggtagatgctactggcatcaaacaggcagaggtcaagggtgttgctctacatactataatgcacaggacagcccccaccacaaagaattttccaaccctaaatatcagtagtgccatggttgagaaatcctggggtaagaacaaggcttgggcatcagaaagatacccatagtactgctatgtatttgtttgagtcgttgttttcaattcttttgggatatacctaggagtgagattgctggatcatatgataattctatgttcaactttttaaggaaccaccagacttttttccacaacggctacaacattttaaattcctactggcaatggttaagagttccaatttctgtacctcttcaccaacacttgttattctctctctctctcttttgggttatagccatcccagtgcatgtgaagtggtatctcactgtgattatatgatttgcattttcctgacacctaagcatgttgaatatcttttcatctatttattgaccatttgtatatcttcattggagcaatgtctatccaagtcttttgtccacttaaaaattgggttgtctttttgttgttgagttttaggagttctttatacattctgggcactagactcttattagatatatggtttgcaagtggtcctcccattctgtaggttatcttttcactttcttgatagcatcctatgattcacgaaagcttttaatcttgatgaagtccaatttacctattttttcttatggtaaattggacttcatcaagaagcatccaatgcttgtggtgtcatatctaagaatcaattgacaaatccaaggtcatgatgaattacttctatgttttcttctaagaggtttgtggttttagcttttatatttaggtctttgatccattttgagttaatgattgtatgtggtatgaagtaggggtccaactttttattcttgtgcatgtggaaatccagttgttccagcaccatgtggtgttaaagaggtaatacttttttttttttttttttgagacggagtcttgctctgtcgcccaggctggagtgcagtggtgcgatctcggctcactgcaagctctgcctcccgggttcacgccattctccttcctcagtctcccaagtagctgggactacaggtgcctgccaccatgcctggctaaatttttttgtatttttagtagagatggggtttcaccatgttagccaggatagtcttgatctcctgacctcgtgatccacctgcttcagcctcccaaagtgctgggattacaggcatgagccaccatgcctggcctgaagagatcattctttctccattggatggtcttgatatccatgtcaaaaatagattgaccatagatgtataggtttctattccattgatctatatgtctatcttatgccaaataccatgctgttttgtttaccatagctttgtagtaagtttttaaattgggaaatgtgaatcttcaaacatattttttaagattgttttggctgattggggcctcttgaaattccatataaatctgtatattcctttggataatatggacatcttaacaataagtcttccaatccatgagcaaggtatgtctttccatttatttaattcttctttaatttcttttagtaatgttttgtagttttcagtgtgcaggtctttcacttctttggttaaatttattcctaggtaggaaacaagtgtgataggcaataatagaaaaaggaaacattgaaattaaacatatttatttctaggtgttttattcttttgaatgctattataaatggaattgttttcttaatttctttttcagattatttaccactggtgtatagaaacacaactatttttgtgtatttatcttgtatcctgcaactttgcttaattatttttattacctctacaataccaaggttttctgtgtgtgtattatctggcactttctacatataggaccatgtaatctgtgaataggggtggctttacttcttccttcctaatctctatgtcttttatttcattttattgtctaattggtttgtctagaacttccagtacagtgttgaatagcactggtgaaagtgggcatccttgtcttattcctggttaaagctatcagcctttccccatttagtatgatgttagctgtggatttttcataaatgtactttattaagttgcagttcccttctgttcctaattttctgaatgttgttatcatgaaagggtgttggattttgtcaaatgcttttcctgcatcaattgggatgatcatgtggtttttttccctttgttccattaatgtggcatgttacattgacattgagycacccttgactgacttttctttaaaaaaaacacatgatgatcttgaaaggaaaaaacccctctgaccctgtgtactacctagaaaatagccttggcaacatatcagcaaattctgctgctgaaagtgtgtaagaagtacttggattgtttagttctgggaaatattgagaacttttccacttcctttaaaaacattgtgttgaaatttaaaaagaaaaagctttatggcagggcgcagtgtctcacgcctgtaatcctagcactttgggaggcagaggtgggcggatcacttgaggtcaggagttagacaccagcctagccaacatggtgaaaccccatctttacaaaaaatacaaaaattagccgggcatggtggggggcacctgtaatcccagctactagggaggctgaggctcaagaatctcttgaacccaggaggcagaggttgcagtgagctgagattacgccactatgctcccacctgggcgacagggtcagattctgactcaaaaaaaaaaaaaggatttttagataccaaattgacctgctgagctttgtggtccacttttgtaatgcttctagtatataattgtggcaaaattggttcagaaatttcaacacatagagagaggtcccatttaaaaattttttttgaaatagggtctcactctgttgtccaggctggagtgcagtggtgccatcttagctcatttcaacctctgcctcctgggcttttcttttctttttctttttttttttgtttttgagaccaagtctcactctgttgcccgggctggaatgcagttgcatgatctcagctcactgcaacctccacctccaggttcaagtgattctcatgcctcagactcccgagtagctggaattacaggcacccacctccatgcccagctaatttttgtatttttatttttagtacagacagggcttcaccatgttggccaggctggtctcaaactcccaacctcaggtgatctgcccgcctcagcctcccaaagtgctgggattacaggcatgagccaccgcactgggctcatttttaaaacaagatttccttcaaataacaatgatctactcattagtagggcagagttagggtgatagaaagaggtgtggcttagagattggaatacctgggttcattctttcaatacacacttgtaagccctcattgcataccaggcactggtctagaccctgcaacagaaaacagtctcccgaggcttgttgggcttctatgctagttgtaagcataccccacactggggatgatggcgcccttcctccctccagggccatgatggtgactgactatatgataataatactagaatgatgatgatgatgacagaagcaacaattccctttcatttataaagtggaatataattaagagtctttaaaaaaaaaaaataacagctttggctgggcgcggtgggtcacgtctgtaatcctagcactttgggaagccaaggtcaggagttagagagcaacctggtcaacatggtgaaattctgtctccacaaaaatacaaaaattagctaggcatggtggtgcatgcctgtagcccaagctactcaggaggctgaggcagaattgcttgaacccaggaggcggagtttgcagtgagcagagattgcggcactgcactccagcctgggcaacaaagggagactgcatctcaaaacaaaaaaacaaaaaaaccccagctttattgagagataattcacatggcatacaatccactcatgtaaaggacaagtcaatgttttttaactgtattcacagagctgtacaaccatcacctcaatctgctttagaacattttcatcatcccaaacagaaaccctacactctgtagccatcatccccatcccactaggtcctggcaaccactaatctgttttctgtctctcaagattggcctgttctgcacacttcatatacttggaatcgtataatatgtgaccttttgtgattggcttctttaacttagcagttttcaaggttcttccttgaaccttggcaggaaactaagatccagaggggtgaaggaatatgtccaagcctgtttcaggcagagcagggaggagaaccccatctctcccctcgtccagtatttcaggaatacacagcaccccaacagcctcctgccccactagcttctttaggagagaaatcacttgattatgtaaatcctaaaatgtctctccttttctccttacagattttctgaatggtcttgcttctttgtytatcttgtctgattttctcctgtctgaccttttcctggttaaaaatctgggggaaaatgacggactccaagccgatcaccaagagtaaatcagaagcaaacctcatcccgagccaggagccctttccagcctctgataactcaggggagacaccgcagagaaatggggagggccacactctgcccaagacacccagccaggccgagccagcctcccacaaaggccccaaagatgcyggtcggcggagaaactccctaccaccctcccaccagaagcccccaagaaaccccctttcttccagtgacgcagcaccctccccagagcttcaagccaacgggactgggacacaaggtctggaggccacagataccaatggcctgtcctcctcagccaggccccagggccagcaagctggctccccctccaaagaagacaagaagcaggcaaacatcaagaggcagctgatgaccaacttcatcctgggctcttttgatgactactcctcygacgaggactctgttgctggctcatctcgtgagtctacccggaagggcagccgggccagcttgggggccctgtccctggaggcttatctgaccacaggtgaagctgagacccgcgtccccactatgaggtaatgtgcattttctccttgtaactgaggagtgcagagttcaggtggggtccacacccttcccaacctgtgcccaccttgatcaagcygtttgctgatgccaaagcttcaagggtggctatgcacaaaaggagaagacacgagccttctcagaagtttccttccttccttctttccttctttccttccttccttccatccttccttccttctttccttccttccttccttccttccttccttccttccttccttccttccttccttccttccttccttccttccttccttccctcctttcaaaatcattccttgaggctgggcacagtggctcatgcctgtaatcccagcactttgggaggccaaggcaggcagatcacttgaggtcgggagtttaagactagcctggccaacatggtgaaactccgtttctactaaaaatacaaaaattcaccaggcatgcaggcgtgtgcctgtaatcccagctgcttggaaggctgaggcgggagaatctcttgaacccaggaagtggaggttgcagtgagctgagatcacgtcactgcactccagcctgggtgacagggcgagaccttgtctcaaaaaaggaaaaaaggaaagaaatcattccttgtgcatctactgcatgcacagggctcgatgccatgaaactgactttctagaagrcctcagcctagttggggaagatgaccttgtgtttagttataatttaagctgaatgagccaaggctggcaagagccacaagtgatgatggtagtctagagggaggggcagttctctctgcctcctgaagagacattgattcattcattctttttttttttttttttttttttttttttgagacagggtcttactctgtcactctgttagctgagtgtactggtaggatcatagctcactacaacctcaaactcccgggctcaagcaatcctcccacctcagtgcactcctgggtagctgggactacaggtgtgcaccaccacacctagctaatttttaaattttttatagaaatgggaatctcaccatattgcccaggctggtctccaactcctggactcaagcgatcctcggtctcccaaagtgctgggattacaggcatgagccaccacacccagcccattcattcattcattcattcagcaggtaactgacaactgaaaaaccagccttcccccagtgatgcctgaaaagcagaaactcaaacactctaaaggtctccatcaatttgattgttggaaatgaatgcctgtaggttcataacaggtgggactatcccagcggctgcagtcagtggctttgttgttgatgttgttgttatccaccttctcctctgccatccccaaattacaaatggaatacagcacttccaggtagaaaatttgggaaatataggagaacagagagaagaaaagagccaccaaccaaaacttcaccagccagagggaaacctctgttctcattgttctacttcttccttctagtgtgtttttctcctctggagtgaagttttactggctaktcttttaagcatctcctgtactctctcccaaattagaaaaatctagaggtggtcttccatacatgtccatgttagcagtgagcttggttttaaccctggtagctggaagtagaagacagagaaaaaggaggaggaaagtattccatatactgaaacttttcaggggaagagtgtttgagtttctagaagggttaagggaagagaaagtctcagaatctagtacaaagagcacagtctgtggagtcagctggagtggggttcagtctttggctctgccaccccctactgtgtgaccttgggcatgacccttcacctctccaggccccagtacctctgtaaaatgtggaagggattaaatgggataatgtaggcaggcatggtggctcacacctgtaattccagcactttgggaggatgaggcaggaggatcgcttgaggccaggagttcaagaccagcctgggcaatatagtragacctcatctctaaaaaaaaaattaagaatttgccagacattgtggtgcatacctatagttctagctacttgagaggctgaagcaggagggtcacttgagcccagaagtttgtggttatagtgagctataattgtgccactgcactccagcctgggcaacagagcaagactctgtctcaaaataaaaaaacaaaaaagaatgtatcaaaccaacaaacttataacatgattattattattactatttcctgagtcttggatgccaaaatagtcgtgaagattaaatgaactaatatttctcaggtacttggcaagagaataaagcatccrtatttggtagataataaatagaaaggggggcaagtctcccacctttccacccactgtcttcctgccaccattttgaggggtctttactggtttgagcttaaaccaaggtttttctgagctggtacatttataaaggygaaaactatctctctctttctctttctttcttctttttttatttttttggacagagtctcactctgtcacccaggctggagtgcagtggcatgatcttggctcacagcaacctctgcctcccgggttcaagcaattctcctgcttcagcctcccaagtagctggaattatgggcgtgtgccaccacacctggctaatttttgtatttttagtagagacggggtttcaccatgttggccagtctggtcttgaactcctgacctcaagtgatccacccgccttggcctcccaaagtgctggaattacaggcatgagccatcacrtctagcctacttaactatctttcatagggaaaatgaaaccaaaatgttgagtgaatttcctgccctcgtgtcttcatggcatagaaacctaacattgtagatcaatcttttatccttactttgtcccagcaaacagctggcaggagggacagagggatcttggaaaggcagtgaatgtggagctgaatgacattgtaggattgtgggcgattcaaaggctatgatatggtgaacgaaggagtgatgtgctgcatgaacttgggtgagtcccttcccctctctgagtctccaatttmtcatctttrgaatgaggaggctgaggctgggcctgatggctcatacctgtaattccagcactttgggtggccgaggtgggtggattgcttgagctcaggagttcaagaccagcctgggcaacatggcaaaacctcatctctacaaaaaaatataaaaattagccagttgtggtggtatgcacctatagtcccagctactagggaggctgaggtgggagaatcacttaagcccaggaggcagaggttgcagtgagctgagattgccccactgcatcccagcctgggtgacacaggcagaccctgtctcaaaaaaaaaaaaaaaaaaaaaatgaatgaggaggctgcaccagactcctgagatgtgacctgtggccctaaagctcactgacatacagttagttattttgtccccagtatgtgtgcattttcagagttgagaatttagaattttagcacccaggggcaatgcgggtggttctgctggcacctcctgagacactggcacttcctcaaggaacattcccagccccagratcaggggcttctgacagagaagactcatgtgtgcttgttgtttctaatgaactgtagtgagaatcccacatcaaagaatcttcagggagtcaagccttagacatgtgtgctggtgcctgctgcctctggtgtttgactggatgaaaaaattatgtccaaacctggtgttccagcctgttggaaacaacgcatatcaaaatgaggctgaggtccagcatggtgactcacgcgtttggggagactgaggtgggaggatcccttgagcccagaagtttgagagcagcctgggcaacataatgagaccctgtctctacaaaaaataaaaataaaaaataaaatgaggccaggtaaggtggctcacacctgtaatcctagtactttgggaggctgaggtgggtggattgcctgagctcaggagttcaagaccagcctgggcaacatggtgaaaccccatctctattaaactacaaaaaattagccaggcatggtggtgcacgcctgtagtcccagctactcaggaggctgaagtgggagaatcgcctgaactcaggaggtggaggttgcagtgagctgagatcacgccactacactccagcatgggcaacagagtgagactctgtctcaataaataaataaataaataaaatgaggctgagcattttattatcttgtagagcttttggctttggattttggcatctttgggatccktggtagcctggtgtttgctggttacccattgactcttttgcacacatacaggcagggtagtaatacctcttccctggtgttcacaggtcaacacccaagcagttttgggtgtrggccatggaaggtggtgtcaaaagacaaaatcacagcaaatttgatttaaaactcgaattggcttttatttacaattctaggatcatgcagcacctcattctgtaaaatagaatgggtcttccgaagagctgagcagagaggagcttggctttataggcagaacagggctgaagaaagcagaaacaagggacaaaggggagcttcatagtttctttctttttctttttctttctttctttttttttttttttttttttttgagacagagtcttgctctgtcacccaggctggaggctggagtgcaatggcacaatctcggctcactgcaacctctgcctcccgggttcaagtgattcttctgcttcagcctcctgagtatctgggactacaggcacatgccaccatgcctggctaattttttatatttttagtagagatggggtttcaccatattagctaggctggtctccatctcctgacgtcgtgatccacctgtctaggcctcccaaagtgctgggattacaggcgtgagccactgcgcccggcccgcttcatagtttcaaaatgactttcccttcagggttaaaacaaatgcaactttcttatcatgttggctcaggtacactggaccccttctgattggttgctattgttttytggaaaactggtcagtttcaaagttcagactgattgcgaggcagttggccaggagtgatccgtcgttttggtttggtctgtaggggctaagcacaggagctcagctcaaaatcatggcctcccatatattaaaattttgttttaattttttagatttggggggtacaagttcagttttgtcacttggatataattcccagtggtgaagcctgggcttttacgagccattgcttgcatagtgtacattgtatctattaggtaatttgtcattccttaccccttcccaccatgccacctttccaaatctccagtatctattattctactctttaggtccatgtgtacactttatttagctccacttataagtgagaacaagcataaattatatttaagggtggtgcatgcaggccagccagccagttgcctgtaaccagctggagcactgaggaaaggaagcctgacccaaaaaggcaaatacagtgagcaagaatccctgttagctgaatccaggaactccttctgaaaaaaaatattatttttcttgaggccaggcacggcaggtcatgcctgtaatcccagcactttgggaggccgaggggggcggatcacaaggtcaggagtttgagaccagcctggccaacacggcaaaaccccatctctactaaaaaaaaaaaaaaatagaaaaattagctgggcgtggtggcaggtgcctgtaatcccagctcttcaggaggctgagttaggagaatcrcttgaacctgggaggcagaggttgcagtgagccaagaccacgccactgcactccagcctgggcracagagtgagactctgactcgaaaaaaaaattattattattttttcttgataagttgctaaataatctgtatcctctggcaaatcttctaaccgtttgaggtcctgtttctgcaaaatggaagcaggggctagaggtttaagctagtccttccagacaggatccaacccttgccccatttccaagacaaacaactaaggcctgggagaagaggccaggggtatttatttgagggttctgactcacgtggaagccacagtgaagaagtgacttgtatttgtggatctgcttctgctctctgcagtttccttgggcagtcacttcactgctgctctgccctggaaggccacttcctacattcacctcttcctgccaggccagtagctgggagactggcaaggcaaggatggaaaatgcttgtgttaagtctgtgatttgggaggaagctctttctgaagcagtcttcaaggggctgtctccttcctgcagtgcccagagcatcccagagttctcacaactgtgttcctgttttgggagttcgcactgggttccctctgaactgraacactctctttctcccaacccctgaacccagacctcccaccagggccagcttcacaggcatgccctgtgcttcaagggaccccgtgcttgttttgacgctttgttgtcgccgtcttgagattcttttttattttgttttttgagacatgatcttgctctgatacccaggctggagtgcagtagcatggtcatggctcactgcagctttgacttcctgggctcaagtgatcctcccgtctcagcctcctgactagctgggactacaggcacgtgccaccacagctggctaatttttttatttttggtaaagatgaggttttgccattttgctcaggctggtcggaatctcatgagctcaagcaatctgcccacctcggcctcccaaagtactgggattacaggaataagccactgcacccagccccaaattcacaataatttttcaacaaggggctctgtgttttcattttgcactgggtcctgcaaattctgtagccggtcctgcctctactgctagctctttgcccatcagagtcacttcctcaaagggccttccctgtccctttctcacatttaaaaaatctaccccccaattaccttcagtatctttatcaatcactctgattagttgtctytgcaacatttaattatttcttgagattatgtctgtttttgtttgtttgtttgtttgtttgttttgacacagtttcactctgtcacccaggctggagtgctgtggtgtgatctcagctcactgcaaccccacaggctcaagaaatcctcccacatcagcctcctgagaagctgggactacaggcatgcatcaccatgtctggctacttttttttttttttttttttttttagtatttttagtagacactgggtttcaccatgttggctaggctggtcttgaactcctgagttcaagcaatccacccacctcggcctcccaaagtgctgggattacaggtgtgaacctccacaaccggctcctaaaagattacgtcttttatttttttatgatctacttggttattacctgtctccctacactggaagcaagttccgtgaagccagggccatagttatagtggtctctgtttttccccactgcctaggctggtgctggctcatggtaggctttgaatatctgctaaatacatgaatgaaatgagctgcaacaagcttgccaaagacagaattctgcattacgggggaatgtaaaacatgtgatgaatgagtgtgggaatggatgaacgaatggatgaatgaatggatgaatgaatgaatggattaattaattaattaacaggtgaataggcattttrtagttgttgctctttagcagcagtaaatttttgttttcataaaattctttctccttgtatcttgtgactttggagactagttctggggtgaaactccaattttaaatttttcttctgtctttgataggatcatgcaaactcagcctttctctcctttctcccagctggcaagggctggctgagaatatgaatccaacaacctcrttaagctctctcctcccatctcctcccctttgggttgatctcagggcagggattagaacttggcctttccttggacttggaaacagtccctgaggtttggaaatcccatgcaacacttagaaacagagctaatgagaacattacatgatgtggcaaaatcrctgcttacatgctctgaaatgagcacggttacaagaacctcctgttctgtgtgatcccattttgttggacaaacagcatgtggttagtagtgcatagtgggcctatgatgagacactcaggttcaaagctacctcttcctagcttgtaccccgacttagtatgaccctgtggggtgcgcatgtggactgaatggaatgggacaggttcaggattgctgagattgcagctggaatcctgaaacttaaagctatgaaattgaagttcataaattagtggtgaactcatttggcagcaaaacctgtcctgaattgatgtgaggttatgtatagtaattatttatcctattctgctgctgaaatattaatatgataatgtggaacagaaagttttaccttcctaaaaacaataatttccaagttccaaaacrtatcaggccctgggaatttcagataagggattatggactatatataacatgcttagaatagttcctggcatatagtaagcacaaaaaatgcttctgcttagtaaatgtgcctaataaatgtgtgtgtgtrtatgcgtatgtgtttgtatgtgtgtgtcttagagggactgtaaagagtgtctccaaatagtaaataatcattttatgtggtatgattatgagtgatttaaattttcttctgcattttctaactttctgctctaaatgtcattttataatgcattttracaatgtataataataaaacagtataaaaatattgggagaaagagtaaaccaatcatctcacttcctagataggaagctgaagcccagagacattccaggcctctcagcaaggtaatcagaggcccagagcaccatttgaacccagaccctcgttagatgtggatgtgaaatcagtcaacgaactgctagtattagtgtcactgcctaaccttcccccagcgggtaagaggcttggactccaggacgggcacctccgtcctcctcctaacttgttctttctattagtgggaagggttgggagattagggtagtttatggataacctttaagtcgtatgagcttgaggacatcatctaccttctcaggggccagactggacactctgaggttctttgtggctctaacagttggtggctttgttcctttatatgtggaggaatggacagcagggagggggctgggagatagagaaggagagtagctggaaaatggcagaaaagtttgttaatttacaggcaggctgaagcrggaggatcgtttgagcccaggagtttgaggctgcagtgagctatgattgtgccagtgtaccccagcctgagcaacagagcaagaccctatctctcttaaggaaattgttaatttagaaccattttctccctggtaaatgaccacagatagtctgggttctaggcaagagagaggacacactaagggatgaaatggtaggtggggaagtcaaggtttgtcccatccattcgttggcccaggagcagttattgcaacccctctgggtgccaggcagtcagttggcactacagatgcaaagatggtgagatacagcctctgtccttagggagaccagggcaaggggtctgagagcccacaggccagggcattccccatcatttttacagagagagctgtggaatagttaagagcacaacacrctggtggctgaggctggrggctggtgtgctggcttctccacctagccatcatgtgacttggggccaagttctgtgattttctgtgcctcagtttcctctgaaatgaagtcatcgtgttacctccctcacagggttgggatcaggcttcattgagttgctgtaagtacagcactcgaagcagcacccatggtgcgatcatggtcattagatccagtgcacggcataagagcccaggacccacaatcaggtctggattcagacctctcctgttacctgtctgagctgcaatttcctgctctgttgaggcaggataatactagtgcctactttaggagattgttgagatcgagtgggagcaagtgctgggggtggacggcccagaggtggttcagtagccattagttgggtgggcttcttccaaagttcttgcctgtgcgcatggttattcccaagccctggccgggcttacatcttaaaggtgtagcaacctgtgtccacggaggaggaagaggattgaaaaggcaggtgaagtgtcccgataaaaggataaagtccaaaacagcagatgggtgctgaagtgttccttcccgccaccatttacgaccatgttgggatcactgaggtaagaacagtttagcaaggcagaccttggatcccaggaaggcaaatgaggctctgtggggtctggacatacagagggggccctgcaggcaaaggtaggtgaaggaataccaggaaagggagctgacaccagggacctggcatcgcccccactttcccagatagcagactgggtgggcttgcagtgcagcctcccagctgcttgttcgtcatcccagcccacatctcttatcggctccaagcaaggaacaggtcaggaaactaaattgtctatgcatatttttatgcgcccctgagtgaaatgccaaggatcttcctgtaatgtttaatttattcatttattgacttaggaaggggctgggagaaactctsktttcaagtctctttagctcctaaaatgtttactttttctttttctttttctttttttcttttcttttcttttttctttcttttttttttttttgagacggagtctcgctctgtagctcaggctggagtgcagtggcacaatttcagctcactgcaacctctaccgcccgggtcccggttcaagcaattctcctgcctcagcctcccgagtagctgggattacaggcatgcaccaccatgcccagctaatttttgtatttttaatagagacagggtttcaccatgttgtccaggctggtcttgaactcctgacctcytgatctgccctccttggcctcccaaagtgctgggattacaggtgtgagccactgcgcccggcctcctaaaatgttttctaggagcttgggggaaagaggatccctgtctttgagttgttcttgtattaagttaatacaaggtacagagcaactaaccattcatacattcccctcccccttaagcatcattgccctattttagaaaaattattcacttctgctctatacttaatgtaacacagtcccccccaccccatatattgaaagagattatttcattttgcttttctgcaaaaatgaaggcaaattgtatgtggataattttatagttgaggaagtggagagacgggatttacttaaggtcatccgtgaggggaagkgtaagttcaagcccatggatggcacagtctttctaccacgctgctggccacatgcatgcrgattttcttgttgattttgtgtgtgtattgttcattgacctgggttttccctctgcaataccagtaagtaaaattgagcttctagtaagtctgagaggaagggcttaatgcatgagacagcaactaccrccatgcttgaactgtttcatcaaaaagcacaacaatggatgtttgtataaaggtggtgttgtgcttgkaggtggatattaggttggtgcaaaagtaatcgtggtttttgcaatcccttttaatggcagaaactgcaattagttttgcaccgactgaatattattcatttctttccgtcttctattccctaataatgcaattagagaaaaatgcaaggtcatgatcactgtgatgaaatgatgagcccacccatctaaatgaaatcccttatttgagaccctgggtcatagtgagatgtgtgaggctgtctttcaggctgtattagcagagaagtgagaatatctatacagtgtttaagtagtgttggggtttttgcaatagagaataaaaatctagagcaatacaagtatgctggcaagcagttctcttctgcatgatcctaactgactttggtagggttggggtattttgaaatatcttcatttcttgattttcattgctttccctattttgaggtggttacatttacactggggatatttgggggatgaatacttgttggttttggtttgaatctctaaaaatcaggatacagtgggttacttttttggaggaggtgaagrcaaggctgtgaacaccttcccagaaacttgaagaactgagaattttgtttatctgttttttttcttaaacctgttgttgaaatgttatttaatatatggtcagrgcatagctatccactgctgtcaggcatggctgcttaaacaggggcccagggtgtttatgttgtggccaagtacttggcacccccgggaagtgtggccctgcctgtgccttttctttcttcctttctttctttttttttttttttttttttttttgagaaagggtcttgctctattccccaggctggagtgtagcgagatcatggctcactgcagcctcagctacctgggctcaggtaatcttcccgcctcagcctcctgagtagctggaattacaggtatgcaccaccacgctggctaattttcatatttttagtagagatggggtttcactatgttggtcaggttggtcttgaactgctggcctcaagtgatctgcctgcctcggcctcccaaagtgctgggattacaggtgtgagccactgcacgtggccttcctgtgaagtgaatttttaattgtattttaaaatttgttttcatgtttttgtttgttttgagacagagtcttgcaatgttgcccaggctggaatgcagtggcctgatctcggctcacttaaacctctgcctcgtgggttcaagtgattctcctgcctcagcctctggagtagctgggacttcaggccaccccgccaccacacccagctaatttttgtagttttagtagagacgaaatttcaccatgttggccaggctggtcttgaactcctgacctcaagtgatctgcccacctcggccccccaaagtgctgggattacaggcatgagccaccatgcctggcctgttttcatgattctgatacattatatttttacacatttataggatacatgtaaaattttgttacatgcatagaatgcataatgattgtagggaccaagggaatatcttctgctttgccctctgaagtttcgctgaaaaattaacttgtaaaaaggcagattagttggagaaaagacacacaaatttaattaatgtgtacactgggagaaccgcagagtgattacccagaagggaatttactggccagcatttacattatttttggttggtttgtkggctatgaaagtaggctacctttattattactgcgatgacttctaggtagtgttttggttctttgcatttattacattacttgaagaagcattcattcatttatttttgattttttgagatggagtctcactctgtcactcaggctggaatgcagtaccgccatctgggctcacttcaacctccgcctctcgggttttagtgattctctctcctcagtctctcgagtagctgggactacaggtgtgcaccaccatgcccggctaatttttgtattattagtagagacagggtgtcaccatgttggccaggcyggcctcaaactcctgacctcaagcgcctgcctcagcctcccaaagtgctggtattacaggcatgagctaccaggcccggcctcattcgtttattctaactggaatcggtttgtctgagttcaagaccctgggctctggcacttcagataacatgcatctctgggccccagtttccttatctgtattatagggataaaaacaataagattgccacgaggattaagtgacacagaggaacaaaggagcacttagtaaatgttagtcttaccagaagtttatttcggatcaccgggctgctggggtcctccctgtcctggaggcactcgcttcagtagcggacccaggtggtgcaaagtgcgtgctagaagcacactgggtgattgcgcagccacctgtcccagggagtggaggtgaaaagatgagagaaaccaggactttgggaaataaaagtcgacttgacaacagggacttttaacgggcacagtggcgacctctgactcacattttaaatttcccatattttccaccgcttccctatcgtgtgtgtattcaagcatatcaattgctgccaatatgtaggggtgtcccatattggggagcaaagcagaagagaggctttaaaaatatatatctccgcagctcatttcggctgccgaagctcagcggcgggtcggaggtaggccggcccgggggcggggctccgtccggaaggcggggccctcctggggcggggtcggtgtgggggcggggcctgggtggggcctaggcgggcgcgatggcccgggactctggcgcgcagggygcatttcgggatggagcaagcgcagcgcgaagttgggcgcccgccggctgcagcagaaccccgcccgcggcgctstaggactgcatctcggcctccgggtcgcgacctggctgtcctgctgggtcccgggcctcgggtcggcttcaggcggttaaggggtgcatgctctgcacccctgcgggagcccggtgggattggcctgcggggtggtcaacatgagtcctgccaagtgcaagatctgtttccctgatcgcgaagtaaagtaagtaagcctgcaattgtaatgaccatgatcttttacaaacttacgcagtcttccttccccttgaagtcaagctgtgtgtcctcttagcaccgccccctttaccsccacccccatccaaagaaacacgggcttgagttggctgctggggagatgatgcccgccttggaaactctagctggccttggcgggaggggaggaaggaggctggacgttgggggtgacgttgcttggaggaggtcgcttcggagcacacaggtgcctaaagatcagcccttgcgcaggggcacgccttccccgctttctctccttcgcctccagaagctgatggttgtggaaggcaggtctcttttgaagctgaagcctgggcaaatcgacgtgaacttgagcaggctctcattgagggtcattttctgagcagatgagcgtaggcatctcagtgcctgagtgctttgtagctctacctacttggttttgtttctttccttttttgtcctcattttattgcacttaaaaagaattaccaaattgatggtgtgtctgttgttgacaattcagaaaattatagataagcaaaaaagaggaacaaaaatcacccataattccacccctgtgatgtttgttaacagttgtatattcttcagcttttttttttttccggtgcagatatgttttaatttataaacttgaatcatgcagaacgttctgtaactcactttttcattcaacattaagtatttttctaccactgggcttggcaaactatgacccactgcctgttttgggatggcctgcaagcagagaatggttttttcatgtttaagtgattgaaaaaaaaatcaaaagaagattgttttgtgacacgtgaaaattacatgaaattcaaatttcagtgtctacgaaaaaagttttattggactgcagcctgctcatcgatttatgatttatgcctagttcatggctgcttttgtgcctcactggaggatttgagtggtgggacagagactgaccagatctaaagtacttactgcctgacccttgacagacaatgtttgccaatccctgcctacaacatgcttttactggattcatagtgttcctttaaatgggtgcaccttaaaatgtatgaataatcctcgccaggcagggtggtgcaagcctgtagtcccaaatactcaggaggctgaggagggaggatgcttttgcccaggagttggaggctgcagtgtgctatgatcgttcctgtgaacagccactgcactctagcctgggcaacatagcaagaccccatctctgaaaaaaaatgtgcccaggtgtggtggctcatgcctgtaatcctagcgctttgggaggccaaggcaggagaactgcttgaactcgggagttcgagaccagcttgggcaacatagtgagacccccatctctacttaaaaaaaaattagctgaggatggtgatgcatgcctggagtttcagctactggaaagactaagggaagaggattgcttgagcctgggagatcgaggctgtagtgagcaatggttgtgctattgcactccagcctgggcaacagagcaagaccctgtctcttaaaaaaaaagtataagtaatcccctataagtagcggatattcaggctgtttctctctgttttttttttttttttkggggggggctattatcaacagcacagtgaggagtacccctgtagctgaatctctgcctccatcctttattttcttaggatatgtttacctggtccataaacattcatgcacacctcccatgcataaggcctgcaactggtagcaggaagggtcgcaaaaatggttggaaaccgtgacctccgccctccaggaacttcggttccattgtggaaggcagatgtcttctcagtaactccaattcgaggctgatgggtgcaacagtaatagccactaccactcatggggtgctttcagtatgccaggccaagtgctttgtaggtgtggtctcatgccatcttcaaaataccactgtgggggcactaagtggagrstgttgtacccatttcacaaaccactttaatggaaaaaaaraaaaacctcacacaaatttggaattgtcccagcaagtccaggacgtggggtccccctatttataataatatggacatactttgttgggggactacattgttcctctcttagcttagagtggctaaaaagatggatttggacgatctaactttgccaccaagctgtgtgatcttctggagcaggtaccatcaagccttggaacctcagtttccacatctgtccaagggactagccctcataggcctttctagagttgttattattattattattattattattattattattacagacagggtcttgctctgttgcccagacagtggcatgatcatggctcattacagcctcagcctccgggctcaagcagtcctctcacctcagccttccaagtagtgggaccacaggcatgcgccaccacacccagctaatttttgtattttttagagagacagggtttcaccatgtttcccaggctggtcttgaactcttgagctaagcaatcctcacaactcagcttcccaaagtgctgggattacaggcatgagccaccatgcccggctctttcttggttcgttgagaytctgtgtggaagtcgctggtcttgagtactgccctgggtcagcacaaacattgatgaaaactaataagtaaagacagagttcggttatgaaagagccctctggagttgggaggcatttgggatcttgtgctgaaggctcgggccatctaagaagccagaactcctgagaaggtgaggtcgsaaatgatgactgatttttcatggcatgagaacggggtcacagttcagagagtagagaaatgattgtggatcagagtgcagaagggcttgaaataaagttggggatgaggaggcagaagttgttttttaatgagtcccatttcactgccatgcaattctgctctgaaaggccagctgcctgcatgcaaatattggctgtagacctatcaggggttttcactcttggctacacattagaatttcctggtggggagatttttgaaaaatctggatgcyggggaccccacctctaccccctagacatgctgatgggaccccgacatcagaatcttataaagtttttcatgtcagggttgaaaactcgtgcctagcttggggtcagcagactgctattataaacggccagacagtaaatatttttggctttgtggccatgtggtctctgttrtaactactcaactctgctgtttcctgcaccagaagccatagttatgtaattgaacaggcctggctgtgtttcaatcagacattatttatagatggggaaattcaaagttcatataatttttatgtgtcacaaaacaggattcttttgattttttttttttttcgatgacttaaaaatgttggctgggcatggtggcttatgtctatagtcccagcactttagaagaccaagacaggagggttgcttgaggagtttgagaccagtctgggcaacatgatgaaaccccgtctctacaaaaataaaccaattagttgggcatggtggtgcacacctgcagtcccagctactcaggaggctgaggtgggaggatcacttgagcccaggagtttgaggctgcagtgaactatttttgcaccactgcactgtagtcctggcaacagagggagaccctgtctctataaaaaacaaataaggctgggtgtggtggctcacacttgtggtcccagcactttgggaggccaaggtgggcagatcgccctgaggtcaggagttcaagaccagcctggccaacatggtaaaaccctgtctctaataaaaatacaaaaattagcagagcgtggtagcacacatctgtagtcccagctactcgggaggctgaggcaggagaatcacttgaacctgagaggtggargtagcagtgagctgagatcacaccgctgcactccagcctgggcgacagagcaagactccctttcgaaacaaacaaacgaaacaaaacaaaaaacaatctaaaaagttaaaaccgctcttagcctgtgggagatacaaaaacaggtggccgagtggatttgacccatgggtcctagtttgcccactcacccctggcctagccaaggtagtcatcccagggggtactgatggggcaggtggcttgagaaatttccaagggtccatttctggagagcgtggttttgtgctgtttgaacgatatcaacctttactgggctacacagtgttctttcttgctttcttgtttggaagtagttgtaattacagaattgcctggctcagaatcagctcttagcagtgcgggtagccgttaccatctctattttatagaagaaaagagagggaagraattgaaggtctgattaatgccggggccctagcctaatggcccagcctgggctcctgtaatgctatcctgcagacgtacatggtagctaaagtgttgcaagctgtttactttggctaggtccagggataaactgttaattccatcatgtgaggaaactgaggcagggagtattgaagtaactttcccaggattacacaggttataagcggtagattctggcttcaaagcctaggaggatggccgcagtctaccagagtttctaaactgcggctctgttgacacttggggctgtccagttctttgtggggctgtcctgtgcattgcagggtgttgagcagcatccctgrtctccacccactagatgccagtagcgcatcccccaagttgtgacaatcaaagatgtctccaggtattgctccccggggagcaaaatttcccccagttaagcactcagggctgggcgcggtggctcacccctgtaatcccagcactttgggaggccaaggtgggcagatcacctgaggtcaggagttcgagaccagcctggccaacatagtgaaaccccatttctactaaaaatacaaaaattagccaggcatggtggcaggcacctatagtcccagctactcgggaggctgagacaggagaatcgcttgaatctgggaggcagaggttgcagtgagccgagatggtgccacttcactccagcctgggtgacagagctagactctgtctcaaaaaaaaaaaaaaaaccaaccaaccaaacaaaaamcctcagcattatacatgtttgtctcttatttgagaggaatataagaggccatatgtgtaatgcatgttttaaaagtccagttaatagaggggcttccatttatctcagattgtctttctgcctagaagttagattctgaggtcagctagagttggatttgaaacggggctctgccacttgccagctgtgaaactggaggtaaatggtcctctctgaacctcggtttcctcatcgtgaacctggagatgacagactcctccatacagggctgtggagattcactgagaggccccctgtgcccagtccatagtgggcagccgagaatgtttatttcctccattcctgatactattctgcctggtcttgtgctccggcagctgactgcatttggtgtttggctgacacctctgctgttgattgtacctgaagtcatttccaaagtcaccttgaaacatttcagctctcacccttgccgtgctgtataaggacagggcttctcactggacaatggcacttaggatgatcctccttcagtggaagcaaatgctggccgaaggtcagctctctagagccaatgttggttggcttccagctttatcaaaaagaattaaaatagccmcttgccyggagattgggcctgaaacaaggccagtccggcagctttgtgtgttcgcttgcctagcctgcggtaatgggcttgtggcctgcctgatggaggggctctgtcaccagtttcgaaatcaacatggtggccaagaatggtttttttgccccctaggccacaaatgaagtttttctttgttgtgctttaggtcaaattgctagagttttaatgtttgtgtgtgtagaaatgggatgtctcagactttctgaagctgaaccatcaagccagccagtcagggaaggtcgtggacagaatgaggggtgcggctgtgtgtgggaatgtcgattagtacaacctctgtggaaaacagtttggagagttctcaaggaactaaaatagatctgccagtctctccagcaatcccactactgggtatgtacacaaaggaaaagaaatcactcagtcagattcgcttttcattgggaggatcttaacatgattggttgaaaacaataaataaaattagcaaggagtccagttgtggggtctcacgcctgtaatcccagcactttgggaggctgaggcaggcagatcacttgaggtcaggagttcaagaccactctggccaacgtgtaaaaccccgtctctactaaaaatacaaaatttagccggacatggtggcgggcacctgtaaccctagttgctcgggaggctgagggaggaaaattgcttgaacctgggaggtggaggttgcagagagccgagattatgccactgctctccagcctgggcgacagagtgagackcagtctcagaaaaataaaataaaataaaataaagaaataattatatcaaaagacacctgtacttgtatagttatcacagcactattcacagtagcaaagatatggaatcaacctaagtgtccaccaacagatgactagatacagaaaatttggtgtatatatatatataattttttatggctcagtagtattcttttktgtgtrtgtgtgtgtgtggtgtgtgtgtgtgtgtatacctacatgtatacatgggtgttcctcttacaaaattaatagcttttttcttattgaaaataacacatcattgcagaacattttttaaaayatagcaaagagataacggctcttaatactttagcatttttttcccccagatcaggggtctgtctacaaatgatgtcccttgggttgcatctacctttttttgtaaataaatgaagttctctttttttttttttttaggtagagtttcactctgttgcccaggctggagtgcagtggtgtgatctcagctcactgcaacctctgcctcccgggttcaagtgatttttgtgcctcagcctccccagtagctgagactacaggcgtgcgccaccatgcccagctactttttgtgtttttttagttgggatggggtttcatcatgttggccaggctggtctcaaactcttgccctcaagttatctgcccatcttcgcctcccaaagtgctgggattacaggcgtgagccaccgtgcccagcgtagcattaaccttttagaagctagaaagcagatgaatgagtggtcactggcttaaggctgagtcctaatggagcagtgaggaaagttggggacccctggccatctgtaccacagaacccccaaaaggcatggtgtctggcagcaagggatgcccctggagctgaggggtaaggagggtaccaaaatgagaaggacagggtggaagactcccaggtcccctcccctgtctcctgcggcaggggctgtccacttcgaccccaacagaaggcagcagttcaaaggtacatatagagggtcttgggagaggggatcgacaggcacagttgagggcatggggcctgtatcccaaataggaagataagggtctgaataggtgctgaattcttagaacttccccgttccccccggggctccaggctgacctttactgtccaggcagaagactggaaaacttctccctggggaatctggccagcgagagagaaagacacraagatactgactcaggggatccccaacgcactcctacctcaccctacattgagctcagggtcaaccaggtccaccacagtctcagaaattctgttctcactcatagtcacaaggttggaaccaaggcttccctgacatttgggttcagtttctttttctttttcttttttgagatggagttttgctcttgttgcccaggctggagtgtaatggcacaatctcagctcactgcaacctccgcctctcaggttcaagcgattctcctgcctcagcctcccatgtaggggggattacaggtgcacgccaccaagcccggctaattttttgtatttttagtagagatggggtttcaccatgttgtccatgctgctctcaaactcctgaactcaggtgattcacctgcctcggcctcccatagtgctgrgattacaggcgtgagccactgcacccggccctgaggtccagtttctcatrtgtaagtcaaggtccaaaccagtagacacaggaagcttggaagaaacagaaaccacgctggagaagagaagtttaaaaagctctcattaatatcatcgttgaggtcagacaggatgttgcactcataggaagaggatgctataacaaagggaacatttgtaggccaaaaacaggctcgtagacatcaaaaacatgatagcagaaatgaagaactccactgaatgtttagaagatgaggctgagaaaaatcaaccagcaagtagaagaagagagagaataggagaggggaaaaatgcataaaccagtaggccagtgtaggaatttcaacatccagataataggacttcrggaaaaaatagagaaaaaaagaggcaaggacatcatcaaggargtatttgtttcttgttgttgttgttgttgtttgagatggagtctcactctattgcccaggctggagcgcagtggcacaatcttggctcactacaacatccgcctcctgggttcaagtgattctcctgcttcagcctctcaagtagctgggattacagaygcacaccaccatgcccggctaatttttgtatttttagtagagacggggtttcaccatgttggccaagctggtctctaactcctgaccttaagtgatcttcccacttcagcttccaaaagtgctgggatcacaggcgtaagccaccatgttcagcccatcarggaagtatttgaagacaaattcccaggatggaagtttccagattgagagggcctgagagatgtgcagcctcattggtggaagcagacacatacttgagcycatcactgtgaaatcatagagttctggggacagagggacgctcctataagcatctggatatgaaaaaacaggtcacctacaaaggatcaaggatcagaattactcttgttctagcagccttggaagccacaacacaatggcacaaggcttctaaaacttgaagaaggttttccttcctgaaatttctttttgtttgagatagagtctcactctgtcgcccaggctggagtccagtggcgcgatctcggcttactgcaacctccattctctgggttcaagcaattctcctgcctcagtctcccaagtagctgggattacaggtgcacaactctgtgtctggataacttctgtatttttagtagagatggggttcaccatattggccgggctggtctcaaactcctgacctcaagtgatctacccacctcagcctcccaaagtgctaggattacaggcatgagccaccatgcctggcccttcctagcatttcacacacagccaagtggtaaggttgaatgtgagggcaggagaaaggctgaagtgcaatggtgcaatcctagctcactgcagccttgacttcctgggctcaagtgatccttctaccttagcctcctgagtagctaggactacaggcaggtgccaccatgcctagctaatttaaatttttttttttttttttttgagatggagtctgaccctgttgcccagtctggagtgcagtggtgcaatctcggctcactgcaacctccacctcctgggttcaagcaattctccctcctcggctttccaaggtgctgggattacaggtgtgagccaccacgcctggccctgaatagcctttcttagaaagctacttgaggatgycttccactgaaamcagagggtaaaccaaggaagagcaacacacaggagacaggaaacaggagattcaacatagactgaaagggagtctccagggtgatggtgataaggaagcccagtcaggaatagggcagggaaattgagggcatcattgtcatgcgccttgccattctaccatcttcttaagtggatgaaactactggaggatatgccccagcaaaacaagggagtctaccaagaaagacgagccacccattcccccaaattaggaatccaaccccaaggaaaggcaaagggaattctagggatgtcagcaaagggaagccccaaaacaatggtgatgtaggggcctagaggacagccagtacctacggaaggagaacagaggccttcaggagagatgtcaccagtggaaaaaaacagaactgatmaattatttattattattatttttaatgagatggggtcttgctacattgcccaggctggtctcgaactcctggtctcaagcagtcctcctgccttggcctcccgaagtgctgggattacaggtatgagccactgcatgtggcctgatcaattatcttatgtgtactgggaatctattaggaggagtggggtgatttagcaacaggtacaaggaacactaagtaaaggaaaaaaatcattaactccaggaaaaggcaaaaagaaaggaactaaaatctggtacactgcagctctcatatgtgaataatgatcacaaacttcatatgtgaataatgatcacaaacwagtaaaacattgaatacccagtttgctaaattacagtagacttctatggtattgaccagctggtggaggggagccgatggggtggccttgtgagataactaaattcacatctctcaggatgggaaggccatagatgctgtctcacatggatgactcacaagattgcatacacttgttgtttaggactatggagatgtgtaattgctagaaaaaatcagcatcagtttcctctggtgtggagggacagagcaggwaacctgttttgttgttaaacatttaaaaaattgttttcagttttctaaagaaattttgtgggctgggcgtggtggctcatgcctgtattttggaaggccgaggtgggaggatcacttgaagccaggagttcaagaccagcctgggcaacaaagtgagacccctgtctctacaaaaaagaaaayttaaaaacttctgaaatacaaatgtagaaaagtacatgaaagatattaataccatgtaacaagtcggaacgattagaatgtgtggacttcttccctgatcataaaactctcacccttgttatargttttttagtattattcaggttcctaaacaatgggcatgtaaagtaaaaattaacttaggattaaaaatctaaacatccaccttgggacaggtagaagaaactgctccttctagttcatgtgctggtaccttagctggcctcttaaggtgctttcagttgggtacagtggttcacgcctrtaatcccaatgctttgaaaggctttgacgtcacttgacatcaagagtttggacgagcctgggcaacatagtgagaccccatctctacaaaaatgtttaaaagtcggctgggcttggtagtgccctctgtggtcccagctacccaaggaggtcgaggctgcagcgagccacgattgcaccactgcrtactagcctaggtgacagaatgagatcccgtctcaaaaaaaaaaaaaaaaaaaaaaaaaaaaccgaaggtgcttcctgmccttgagcctccttgtaaattgcttcaggggctctggagagcaagtgcaaagcaggggggctctggtgcagtttggctcctctgctccactggctttacaggtgccgagctctgagtcccaggcttcttccctcatgcacgtctgtccctcattcttattctgcaggccgagcatgtcgggactccacctggtgaagaggggacgggaacacaagaagctggacctgcacagagactttaccgtggcttctcccgctgagtttgtcacacgctttgggggggatcgggtcatcgagaaggtacagatgggtctcggcactctgggtggggtccgattggggtgcaggggcccctcctctcagctggaggtgggagattcgggttcaggctcattctgcctgctgcagagagggggtgagggccacgctcctctgagttttaatagtttaaccctcaaatagaaataatagtgaagcctctttcaaagggctattgtgaggatgaaatgaaataagacaggtaaaacacattgtactgtaaaacactcaaaaagtgttaagggtgatcacaatgacaccaaaggaataaaaaaaaaatcattcactgggctcggcacagtggctcatgcctgtaatcccagcactttgggaggrtgaggtgggcagatcatttgggcccagcctgggtttgtgttcaagttcaagaccagcatggacracatgacaaaatcctgtctctgcaaaaaaattaaaaaattagcaggatgtggtggtgtacacctgtagtcccagctactcgggaggctgaggtgggaggatcacttgaagctggaaggtcgaagctgcagtgagctgtgattgcaccactgtactccagcctgggtgacagagcaagactctgtctcaaaaaaaaaaatatatgtatgtgtrtatatatatatatatatatatatatatatatatttcagacaaacagccatccatccatccatccatttgatgatccattcatgtggatggcagactttgagctcctgctctgtgctggggtgtgtgccatggaaatacatagaaataccaagaggaatgatgtgctgcgggggctgcaggaggctctgcagctgtgaggtggactcggggtagcacgtggcccccagcgcaggtagatgtgcatctacagctccttccttgtcttcccatgcaggtgcttattgccaacaacgggattgccgcygtgaagtgcatgcgctccatccgcaggtgggcctatgagatgttccgcaacgagcgggccatccggtttgttgtgatggtgacccccgaggaccttaaggccaacgcaggtacctgggccttgaccctctcctcccatcacgctccatccttgcctgccctcgcctcyttcccctgtgcctaggcaagtccatcctggactcccgatggtcaggacctctcatgagtctgtatttatttgtccttccttctttatttaattaaaargtctgctgacatcaagaacaactcatgtgccttacaaaaatgcagatggttaacatgcagagaggaaattcgatctttgagaaatgtctgtgttctagcagattgggggctgtttctcctgcaggtgtatgtaattgtatttcaatcatttgttcattcttccgttcatttgcctaagtttattataatgaatcattctataaacaactgttggatgatttacttttttcctgaacagtcttatccttttataggccctactccccacagcagccaaagtgaccttttaaaagcataacttcttctgctgtattttctgaaggttgttaaaaacaaaaacctcagccagagcgctggctcacccctgtaatcccagcactttgggaggctaaggtgggaggattgcttgagcccttgagtttgagagcagcctgggtaacataataagaccctgtctctacaaaaawtaaaaataaaaaaattaactgggtatagtggcacgcacctgtagtctcagctactcaggaagctgaggtgggaggatcgcttcagcccagggggtctaggctgcagtgagctgtgattacaccgctgcattccagcctgggaaacagactgmgactctgtctcarataaaacaacataaacctaaaagcataactcaggtccgagcacagtggctcacgcctgtaatcccagcactttgggaggccaagatgggcgaatcacttgaggccaggagttttgagatcagcctgcccaatgtggtggaaccccatctctactaaaaatacctcccaaaaatttgccgggcatggtggcaggtgcctgtagtcccagctcttcaggaggctgaggcaggagaattgcttgaatccaggaggcggaggttgcagtaggctgagatcactccactgcactgcggcctgggcgacagagtgagactgtctcaaaaaaaaaaaaaaaaaaaagcaaaacaaaaaccaacataagtcaggtcttcaggtctttttgtgcttctccttaaaatgcatcagaggctgtgtgctgttcccartattagcaacctcagcaccatcccctaagccttcctgccccaagctcttcacagacatggcctcatttgttacttacagctctgttttacagatggcacagtcgaggcacagggatgtgaatttatcacttgtccagggtcacacaaccatcatgtgatgcgggtgggatgggaaccctggtctgggttcagagcatcayccagtgggtcctcccatcttggttagtctaaaattcaaaattgtcacccaggcctattaagtcccctcctggctccatctygaacctcttgccctccatcagccgggtaccagtcaccctgacctctggtagctcctgggcctgttgcagagtcttggcacctgctggaacctctattgaaggtgcttctcccagagccctttgtgcagtggactccctccccacccagcctgtaggtctcaacatgatcatcgcatytctctcagagaacctcatttattttcttcccagcactgacckgagtctgtagttattgtgtttattttcttgtttatcttctccaacataaaagaaaaactggacaaggaccaggaagcctgtctggccgctcacttcatcatctctggaatctccccgttggccgacacttctgtgtttgataaacataggaggcaggcaggccggaaggarcagctgctctgggatttctttctgtgtttgcatataaagtgccacattgttcaatttcaggatcttagcaattctatagtacagatgtcccaacccctgtgtttggattgagtctaacttttcctagtccaaaacactgctcagtggctgttctctgactttggcctcattgatgtgtgggtttttgtttgtttgtttgttgttgctttttttctgagatggagtcttgctctacctcccgggttcaagcaattcttgtgcctcagcctcccaagtagctgggacttcaggcatgtaccaccacgactggctaatttttgtatttttagtggagatggagtttcaccatgttggccaggctagtcttgaactcctgacttcaggtgatctgcccgcctcagcctcccaaagtgctgggattacaggtgtcagccaccgcgcccagccagcgtgtgtttttttaaggacatattcctagacatggaacttctggcttaaagagcatgagtattttaaaatcaaaacattgcgttatgttcagccttaaaaaggaaggaaatcccgtcatatgttacaacacagatgaaccttgaggacgttatgctggtcacaaaaagtgaaataagccagtcacaaaaagacaaatactgcatgattccatgtagaaggggtaactagagtagtgcaattcatagagagagagaagatcgttggttgccaaggacatgagggagggagagaaagggagttgttcatgagtatagagcttcagattcataaaatgaaaaagttgtggacatctgtttcacaatataaatatacttcactattgaactgtacactcaaaaatggttaagatggtaaattttgtgtgtgttttttttttaccataatttaaaactctgkattgtatttttgtttgtttstttgttttttgagacagggccttgctctgtcacccaggctggagcgcagtgacatgatcacgactcattgtagcctcgaccttctaggctcaagtgatcctcctgccttggcctcccaagtagctgggactataggcatgcaccaccattcctggctactttttttggatttttttttttttttttttttgtggagacaaagtctctgtgtgttgcccaaactggtcttgaattcttggcctcaagtgatcctcctgcctctgcctcccaaagtgctgggatgtcaggcgtgcaccaccgtgcccagccctattatattatttaatggtaaaacaatattaagataaactttaaataggactttttttaaaaacccacctctaatcccagtctgttgacagattacttccttcttccttcgttcctttccaggccttccaggccttgtccagaaacatatctgtatcacataattaaaatcatatttcattttctttacattttctttcttttttttttttattagacagagtctcgttctgtcacccaggctggagtgcagtggtgtgatctcagctcactgctacctccgcctcctgggttcaagcgattctcctacctcagcctcctgagtaccttggattacaggtgcccaccaccacgcctggctaatttttgtatttttagtagagacagaatttcaccatgttgcccaggccggtttcgaactcctggcctcaggccatctgcctgcctyggcctcccaaagtgctgggattacaggcgtgagccaccacgcctggccttctctttacattttcatacatgtttgtccattgttaccatagaaatctgcatggttctgctttccatggctgcacatagtcacatcttgtaatgttctgccattgatgtcagtctgtcagcagttccttccttctccctcccatttaatttcagagtacatcaagatggcggatcattacgtccccgtcccaggagggcccaataacaacaactatgccaacgtggagctgattgtggacattgccaagagaatccccgtgcaggtagatggactggggtgcccaagtgtggcccctgagtgtgggatgatgcccctaggttctagttcaattccacagttcacaaggggtggagggtccagatcccacaaggctccaaattcctgggctgatgtaacacagaaaagagtgttcaagtgaggcgaagcacattctgtttttwaaaaaaaattttatagacaggatctcgccatgttggccaggctggtctcgaactcctgggctcaagtgatcctyctgccttggcctcccaaactgctggggttataggygtgagttactgcacctggctgggaggcatattcttgaaggaagattgttgctcacccctttctgtgtttgcaggcggtgtgggctggctggggccatgcttcagaaaaccctaaacttccggagctgctgtgcaagaatggagttgctttcttaggtagagtgtgtccccatcagatacatgggaattggggtattgctgggacactctgctgggtctgaccctctttctcctcctgtcctgtaaagcggaggtccgtttgatttcccacctcacacttctgtcgtgaggagtgagtgagtcccagggtggaagggcacatagctaatctgccaactcatggaattaggagctgcccgcttttcaaaggaagacacacaggcagccaacaagcatatgaaaaaaagctcaacatcactgatcattagagaaaggcaagtcaaaaccagagtgagataccatttcttgacagattctgagattgtggagaaaagggaacgcttatgcactgttggtgggagtgtaaactagttcacccattgtggaaaacagtgaggcaattcctcaaagagccaaaaatagaactaccgtttaacccagcaatcctgttactgggtatatacccagaggaatttaaaatcattcgaccataaagacgcatgaacacgaatgtttattgcagcactattcacagtagcaaaggcatggagtcaacctaaatgcccatcaataacagattggataaagaaaatgtggtacatatacaccatggaatactatgcagccatcaaaaatactgagattatgtcttttgtgggaacatggatggagctggaggccgttatccttagcaaactaacacaggaacagaaaaccaaatattaaatgttctcacttataagtgggagctaaatgatgagaacatatggacacaaagagggaacagcagacactacttgagggtgaaaggcgagaggagggagaaaagcagaaaaaataactattggatactaggcttggtacctgggtgatgaaataatctgtaccacaaacccctgtgacataagtttacctatataacaaatttgcacatgtaattatgtccatgtccttgtgtagtttaggggaatcatttactatcatgtaataaatccctgcttctccttaccggtgggtctgaaaacagtcttgcccaaatgtgaagcaactcagtgcggatcaatacatgatattcacctgaggtacagccgggagtcccatgcccattgacgttttctttgtctgtggactctgagtacatgtgggcatctgtcctgtctgacagttacccaggactctcattatcagtcttaattcctctggaggttgatgatccagcccactggacaaactacagctcataggccaaatccagcctatggcttgcctttgtaaataaagttttattaaaacatggtcgtgcttattcgtttatgtattgcctatggctgctttcacccaacactggcaaagttgagtcattgtgacagagacctgcaggctcgcacaactgaaagtatttcccatctggctctttatagaaagagtttgctaacctatggtccagctctttgagctcctagcttacctctttgatctagctttctgccttccctccaaagtgaattttgtatatgccactgtagcctaggttgtaactcacaacaggtttacartccacatacgttgaaagttgactgatgcaatagcagactaacagattatttttcttccctgacatgaggttaagctccttgagagctgggaccagagaattttctctgtcatctgctccttacctggccccaccaccgtgcactcggtcggccttcagcctcgagggtcttgtgactgacyggattctgcttcccttcttgtcccsgattcctcaggccctcccagtgaggccatgtgggccttaggagataagatcgcctccaccgttgtcgcccagacgctacaggtcccaaccctgccctggagtggaagcggtaagggaccccgagcttccctctgggggagcttctcagcccagtcttgataatgtgaacggtcagggtgacagaagtatgcttgtaacaattctttccattacaaatgttacttacttttattttttagtcattagcaaaatattttaaaattttaaattagtaaacaagtggtataatttattgtaggcaatttagaaaatacaagaagtacaaaaaagaaatggaaatcattcataatcctatgacccagtgttgaacatttattacattgtaggtatctacctttccaacctttttctgggcatattctttgggaaaaaaaaaaaaaaaagacagatcttggccagtggctcatgtctgtaacccaaccccccaacccagtgctttcagaggctgagggaggaggatcacttgaagccaggagttcaagaccagcctgggcaacatagcaagaccccatctccagaaaaagtaaaaaaaaaaaaaattaactggttatggtggtgcatacctgtagtcccarctactgaggaggctgaggcaggagggtggcttgagcctaggaggtcgaggttacagtgaactatggtggcaccactgcactccagcctgggtgatgagaycctgtctttaaaaggaaacaacaacccatcttacatttcctagtttgtgactttttttttcctcactaatgaatatctttctatgtaaaaaatacactttacaccatttaagatgcctgcataggattatatcttatggatgtatcataatttacttaacagtcctcatggttaaacaatttaggttgtttccaatttattttttctaatttaaaaaatattcaaaggaatggagctttgataatcttacagctaaatttatgtgtgcattttaataattttcttaggataaattcctaacagtggagtttctaggacaaattaaaaaataaataggaccgtctcaaaagtttcctattaaatttgtttttttttccccccccaaaagttgaattttaaatttgggatggaaaatttgctttcatttgttaaatctttgcatggtgttgggaaataattattcacatataaatgactccataaggtagaattgggatttttttttggatttagattaatatggttgttgttggtcgactcagtctgagtttctttccttttttgttgttttgttttcgagacagggtctcactctgtcacccaggccaaactgtagtggcatgatcatagctcacagcagtcttgacctcctgagctcaagtgatcctcctgtatcagcctcccgagtagctgggactacaggcccatgccaccatgcctggctaattataaaattttttttgtaaagacaaggtctcactatgttgccagggttggtcttaaagtcctgggttcaagcgattccccccacctcagcctcccaaagtgctgggattataagcatgagccaccacgcctggcagttagtttcttaagcttgatttctcattcaaggttgggttagttcttgaggaaatgaaaagccattgtgagaagctgaagggagtgtctgtattccgctggtccagaagcccaggtctagcactatgtcagcagggagaggcgctgtggtttctgggttgtgtgtgtttctcctggatttgggaggaatcaggtttctttgtgactctccaggcctgacagtggagtggacagaagatgatctgcagcagggaaaaagaatcagtgtcccagaagatgtttatgacaagggttgcgtgaaagacgtagatgagggcttggaggtaaatgcagagcctgtgggggccaggggagccagaaccgaactgcctctgtcctggtagcagttggcaactggctaacctctaaagaggtctgtttgtcctttgcacccaggcagcagaaagaattggttttccattgatgatcaaagcttctgaaggtggcggagggaagggaatccggaaggctgagagtgcggaggacttcccgatccttttcagacaagtgagcagttcttgctgtgtcttttcgcatctgtctttgggaattgtttgtgggctgccagattatttctcttagcattattctgtgacagtcaagaagacatttgtaggagctggatgtatcgttgtatcgtattttgcaacaaacgcgtacatttttactcagaaaagcccatggttttgtgtcgatcttgacagaatcttttaggtagttcaagtctataaatcagtgtatctagaaatgatttcagagatacaggatcaaaatagctgtttgtgactatattggcctatagaggaatgggatattttataaatattagtactcttgttatttctaatgtttctagatggtctattttattttatttttgagacagagttcactctgtcacccaggctggagtgcagtggcacaatctcagctcactgcaacctctgccttccaggttcaaacaattctagtgcctcagcctcctgagtagctgggattayaggcgtgtgccaccacacgcrgctcatttttgtctttttagtagagacagagtttcaccatgttggctgggctggtctcaaactcttggccttgagtgatccacccgccctggcctcccaaagtgctgggattacaggtgtgatcygctgcgccctgcctgatcaattttaactgtaggaacgaattgcacatttacttactggtagctagttttcctcttttaaaaccttatgtccgttatcagcaatgtttagaaaacatttatactgacaatcttcccattcttaaagctattttaatatttctagcttttcttctagaccttcttcatatgtatattttaaagagctgtattcagtctacacgaaattttgctctgcatttaacacattccaaattgtagatcatgaatattattatgttattcctgccttggcaattattttgatgattactcaatattttatgtgtggcaatagccttatttatgaaacctttccttttttgttaaatgtttagcttatttctactttgttattatgaataataataccacagtataatgtgatatttagtactataaataacacttagctcttttttcttcttaattattttcttggataaagacttggggagaaagacttagttaaatagcacacactttacatgcactttgaaacacatatcagtacattgctttctaggagttttactaattataccactcttggtataatatgtgaatgttgtataaagcagcagtttcactaccattgtatcgctgttggggtgtacaagtgttttggggatttgggtggggggaagaattgatattaaaagggaagttgcagcagcagtacagaaagttcacatctatccttcgcccggtttcactcgttaacatttttcatataactttgcaactaagagattaacatgggcacttttctgtttggtaaactccagactagattgaatttcatctgtttttgcaccaatgtccctttcctgttgcaggattcagtcctggattccatattgcattaggggtcatacagattttaaagcttttttgctttttaaaaaatagactttatttattagagcagttttagggtcacagcaaaatggagcggaaagaatagagagttcccacataccccaggccctcaygtgcacacagatgcccaagcttttttattttacttatatgagtgcactatgaatatgttcttaatgtagagagtcagtcaagtcagccatgtgttaagaataaaaaaggaaaaacccttttccccattaccttccaactctcctttctcagatgtaaccactattagcagctgccgatggtggggggctcttttcagcactgtcactgtatatacttttacatagacattcatacagttgtttyattattttttgcatgacttcatcctatacattattgcaaatttgttaaacttaatttgtcttagaaatcattgcacgtgaatacttttcacattgtctttaagaatctctagaagacatgcctataaaacaatgcctttcagctcttaacaggatgaagtaagtttgtccttagattccacccgggagagctagctgagaaagtgcagtaagtggaagaaaaagacaaccacagattagkgtgttttggtcccattttcattcaaagaaactttctctgtatgtgttgctatatgcatagaagaaagccagtttggacaccaaactctttaacagtgcaatatctttaggggatgtgactgtgggagattttaccatttcacagagtttgacttaaaaaagagaatatgttgcaggtagtgactattgggctggcggtgcagctggtaaaggaatttaccaagacagctgtaggtaaagaaaggcagatttattggaggaagtatgaaaatatgttgcaagattgcaacaggcagcacagcagagaaggatctgtctgcaaagaggcaagggctggtgggaggttttatagggtggtgctggaggaggggctgtgaggtcattacgtcctggggttgtttgtgattagccatctctcgagcagttgttcattgttcttccccacctggggccgtcccccacctggggcccctttctcctcgttactgtggagtcgggactccacagaatattatgtctgtgagacaacaaaagtaaaagatcagcagagtcctggatgagtaccctaaacacatcactgcgtttgttttatgttctctcctgagaacttccagaagcttccagagctggtttycccatgaagatcaggctgctctgcttcccccgacaggtacagagtgagatcccaggctcgcccatctttctcatgaagctggcccagcacgcccgtcacctggaagttcagatcctcgctgaccagtatgggaatgctgtgtctctgtttggtcgcgactgctccatccagcggcggcatcagaagatcgtkgaggaagcaccggccaccatcgccccgctggccatattcgagttcatggagcaggtacacttctcagagcccagggggcagcttcagagagagccgtctcagctcagagtcaggaagaactttctacggtcagtgtggctgaatggtggcatgggtgcctaacaagagggatgagggcccattccagaggtgatttcagcatcacacaggtttattggattagccggtctgtgaactccccaaatatttcttttcttttttgagacagagtctcactgtgttgcccacgctggagtgcagtggtgcgatgatagttcacagcagcctgtaactcctgggctcaagtgatcctcccacctcagcctcccaagtagctgggactacaggaacctgtcaccatgtctggctaattttaaaaaaaaatttttgtagagacagagtcttgctatgttgcccaggctggccttgaacttctggcctcaagtgatcctcccgccttggcctccttaagcgctagggtgataggcatgagccaccacacctggccagtcccaaaatatttcacatgtagcaggtgctcagtctgcatttggtgaaggaactgatagtcaccatttacagttccctgaaaagacctctggaacccccttggcctctttctgtttcttcacagtgtgccrtccgcctggccaagaccgtgggctatgtgagtgcagggacagtggaatacctctatagtcaggatggcagcttccacttcttggagctgaatcctcgcttgcaggtggaacatccctgcacagaaatgattgctgaygttaatctgccggccgcccagctacaggtgagaaaatgggcttggggccctgggacttctctgccctgggtcaggggtccatgtgctgctcccattagtccatcycgcccatctcttggccgactgtcccaggggaatgactggccaaagagcactttgagaaatctgtaaaagctatagttctccctgggaaaatatcttttatacaatttcaggacattcatagacctagagraatgtttcttaaccttgttatcattatcactccctgcaaggatcctttggacacattttatatcctaatccctgtcttgtgaaattttaatatcacaaatataccacatacctgtttggatattgtagatatatctgtgctttattcatgaaaagagtgagattttcttcactcccaagaacaaatatttgtctcttcagaggcaatatcatccctgttaagaatatgtgatccagagttgtaacctcttgggttaaagggaactctaaattttttttttatttttaattttgatgggtatatagtaagtctgtatatttatagggtgcaagagatttttgtttttgtttttgtttttttgagacggagtcttgctctgttgcccaggctggagtgcagtggcgcgatctcggctcactgcagcctccgcctcccaggcatacaatgtgtaataatcacatcagggtaaatgggtatccatccccctccagcgtttatcctttctttgtgttatggtgttatgaatattccaattatactcttttagttaattttaaaatgtacaataaattattgttgactgtagtcaccctgttgtactatatcaaatagcaggccgtattcattctcttaatcactacatttttgcgcccattaatcatcctcgctttccatgcccctacctcttcctttccagcctctggtaaccatcattctactctctgtgtctgtgagttccattgttttaatttttagctcccacaaatgagtgagaacatgcaaagtttgtttttctctgcctggtttatttcatttaacataatgttctccagttccatccacgttgttgcaaatcatggtctcattcttttttatgtctgaatagtactccattgtgtgtatgtaccacattttctttttcctttttcttttcttttttttttttttttgagatgcagtctcgctctgttgcccaggctggagtgtagtggtgcaatctcggctcactgcaacctccacctcttgggttcaagcaattatcctgcctcagcctccctagtagttgggattacaggtgcacactactatgcccagctaatttttgcatttttagtagagatggggtttcaccatattggccaggctggtctcaaactcctgacctcagatgatctgcccacctcaacttcccaaagtgctaggattacaggcatgagccactgcacctggcctgtaccacaytttctttatccaatcatctgttgatggacatttaggttgattccaaatcttggctattgtgaatagtgctacaataaacatgggagtacagatactcttcgatatactgatttcctttcttttgagtatatatttagcagtaggattgctagattggtagttctacttttagttttttaaggaacctccatattgtcctccatagtggttgtactaattttcagtcctaccaacagtgtatgaggggtcccttttctccacgtccttgctagcacttctttttctgttttctttttcctttcctttttttttttttttttttttttttgagagtgagtcttgctctgttgcccaggctggagtacagtggtgcgatcttggctcacagcaacctctgcctcacggttcgaacaattctcctgcctcagcctcctgagtagctgggactacaggcgtgtgccacgacgcccagctaattttttgtgtatttagtagagatggggtttcaccgtgttagccaggatagtcttgatctcctgacctcgtgatctacccacctcagcctcccaaagtgctgggattacaagcttgagccaccgcgcccagctgctagtatttcttattgcctgtcttttggataaaagccattttaactggagtgagacaatgtctcattgtggttttgatttgcatttctctgatgatcagtgatgttgggtgccttttcctatgcctgtttgccattcgtatgtcttcttttgggaaatgtctattcagatcttttgtctgtttttaattggattcatgagacttttttcctactcagttgttttagcttcttttttgtttttgagccagggccttgctctgttgcccaggcaggaatgcagtggcatgatcatggctcactgcagtcttgacctcctgggctcaagcgattctcccacatcaacctcctgagtagctgagactacaagtgtgcaacaccatgcccagctaactttttaaaattttttgtacagataaggtctcactatgttgtctaggctggtctcaaactcttgggttcaagcagccctcccacctcagcctcccaaagagctggtgttacaggcatgagtcaccatgctcatccttgagcttcttatgtattctggttattaatccctcgtcaggtggctagtttacaaatgttttctcccatgctgtggattgtctcttccctttgttgattgtttcctttgctgtgcagaagtttcttaacttgatgtgatcccatttgtcctttttttgctttagttgtctgtgcctttggggtattactcaataaatttttgcccagactgatgttcctgagagttcccccaatgttttcttctagtagtttcataatttcaggtcttagatttaagtctttagtctattttgatttgaagaatttgattcttcatttatgattctgcatatggatatccagttttcccagcaccatttatcgaagagactttttccccattgcatgttcttcgcaagtctgtcaaaaatcagttcactgtagatgtatggatttgtttctggattctctattctgtcccattgatctatgtgtttgtttttatgtcagtaccaccctgttttggttactgtagctctgtaatataactcatagtcaggtaattcaattcctccagtgtttgttcttttttttcaggatggtattggctattctgggtcttttgtgtttccatataaactttaggatttttttttctatttctgtgaagaatgtcattggtattttggtagggattgcactgaatctatagattgctttgggtaatatagccattttaacaatactgattcttccaaaccatgaacatggaatatctttccatttttgtgtgtcctcttcaatttctcacatcagtgttttatgctttttattatagagacctttcacttctttggttaagtttattccagggattttattttgtttgtagctatcataaatggaattactttcttgatttttttttccagaccattcgctcttggcatatagaaatgctactgatttttatatgttgattttgtatcctgtagatttactgaatttgtcaattcgaattgtttttttggtggattctttaggtttatccaattttaagattatatcatctgtaaacaaggataattggacttcttcctttccaatttggatgtcctttatttcttctctaaattgttttcattgttttcttccttccttccttctttcttcccataatggggtctcattacgttgcccaggctggtctccctcccttcctctttttcttccttcagcagaattttttaaaaagttttctttatttttttttcagtttgaaagatttcaaaaaagttgcaagaatgatacaattaatacccatacgccctgcatatagatccatcagttgccacatttgctttgtctctcttctgtctgtttgtataattttagggggctcaatcttttttttttttctttgagatggagtctcgccctttcacccaggctggagtgcagtggtgcgatsttggctcactgcaacctccacctcccaggttcaagcgattctcctgcctcagcctcccgagtagctgggattataggtgcctgccaccacacccagctaatttttatatttttagtagagacggggcttcaccatgttggccaggctggtctcgaactcctgacctcaactgatcagcccacctcggcctcccaaaatgctgggattacaggtatgcaccactgtgcccggccgtgggctcaatcttttgagcaatggtttgagtgaaccttcgtaacatatggcctctgaatacttcattctaaaggcctcctagaacaagagcattccggtccaatgccctagtgcaattatgacacttgagaaatagagcattgataccacatctatatctaatatataccattcacattaaatattttccctgttgttccaataatgtctttttgtagctgttttttgtctcttaaatccaggatccaacccaacccagggtgacacattccattttattttcatgtgtctttaatctctttaatctgaaagcatttcgtagtcttttttcatccttgacattggcattaaaatttttttttttttttttggtgatggagtctcgctctgtcactcaggctggaatgcagtggtgcaatcacgactcactacagattcaacctcccaggctcaagtgatcctcccacctcagcctcctgagtagctgggaccacaggtgcaagtcaccatgcctggctaatgtttttttaattttttctgtagagatcgggtctcattatgttgcccaggctggtctccaactcctaggctcaagcgatctgcctgcttcagcctcccaaagttctgggattacaggcmtggacactggcatttttgaggagctcaggcagaatgtccctcattggatttctctgattgtttcttcctggttcgattcctgctacacattttggcagaatactacacaggtgttgtgtccttaatacatctcatcatgaagcctgttaaatctgatcatttggttaagctggttccataattgtctactttttacccattcttcatgtccagtttccccttcgggtgccctttacaaaaacttcctttaactctgcagccaacatggttgcttctcaccttccctagctctaaaartctagtgcttttacttgatgcatgtattttcttgttgtgtgatgttgtttcataaatatttttccttttcccaactgtactatttgctccactgtgaaaagttcatgtcttatggctttttctttctttggctctctggccacagtagagcaccatgttgtctatagagtagtgtctgtatatcctaaatcattgactgaacctccgttgcatctaccactgtgcctggtgttttggggccrtgttctggtaggactgacagtctgtgggttggatctcttgattttagatcgccatgggcgtgccactgcaccggctgaaggatatccggcttctgtayggagagtcaccatggggagtgactcccatttcttttgaaaccccctcaaaccctcccctcgcccgaggccacgtcattgccrccagaatcaccagcgaaaacccagacgaggcaagttatgggggcccctgtgtttccaccatctcagatctcccagcatgtgggggaccctggatgttagcctgggaagagacacccacaagctatccaggcatctcagtttacaaatggggaaactgaggcatgggaagggacatcccatggtttatttgattattggatttattggatttttatttttatttatttttatttttttgagatggagtctcaccctgtcacccaggctggagtgtagtggcgcaatcttggctcactacaacctctgcctcccaggttcaagcgattctcctgcctcagtctcccaagtagttgggattacaggcgcccgccaccacgcctggctaatttttgtatttttagtagagacggggtttcaccatattggccaggctggtctggaactcctgaccttgagtgatccacccgcctcggcctcccaaagtgttgggattacaggcatgagccaccacacctggctggatttactggatttttggattattgccaggctctgggccgagccttcccatgtctcactgctcacttataggacactactgctgctggacatcgtcaccccacattacaggcaaagagcctggggtaacttgcttcctgtctcccacctgggacctgctgagacccatcagtggactccaaaagccatgcctatctttgggacaagcagccaggtttagaaccctagtccttggatttctggccccgtgtgctttttgcyacagtatgaagtctggctcattgtagagagtccctttgtgacttggccttacttgggtcttaaaaaacaaaccaactggcatcccttacagtttacatgcataccgaccgttgattgtcacaggactcatcaatctactacaacttaattgcttaattattaccctcaggaaactgggggtaagagagggtacacctccaccccttttaattaaataattttaagctagggtagctgtattcatttagggttcttggctgtgaaccaaacaccaactctggtggacaagcaaaaggggaattttttggagggatgatggctcgttcccaggttcctaggaggatggaggaccaggtatggtaacagcccaggcacttgggtcgctccatctctcacttctacatacctctycccaaatccttcatcccttagttcaggagccctaatcccagtgagaggtgccatgtccacccactcttaccaaaattgtacttagagggagacgggccgttctcccagagggaatcaggtgtgtgttggcagcagcctggccgatggggtgaggaaaagggggatggagggagggagggaggaaggggtaggaaaggaaggagggaagaggggagtgaggaaggacgaagggagagagggaaggagggagggaaggaggaaggaaggagagaagaaaggaaggaaataccaacgaaatggcctcttccctagcagcaagggccctgcccaggatgccctggatttcttcacctgcagaggttttcattatccagaattggaaatctaacctgtcttcacttctatttaaactttttattttcgaaatgtcaagcatataaagtcagaatgtcccttcactcagctccatcaatcatcaatgttcgcccatttaacacctgcactaccatctctgtcccaactcgcttattttatttatttatttatttatttatttatttatttatttatttatttgagacaggttcttgctctgtcacccaggcgggagtgcagtggcgtagtcatgcctcactgcagcctaatctcctgggctcaagagatccttctgcctcagccccacaagtagctgggactacaggtgtgtgccaccacacctggctaatattttaattttttgtagagatggggtctcctgatgttactctggctggttttgaactcctgggctcaagtgatcctcctacctctgcctcccaaagtgctgggattacagacatgagccactgcgactgaaccaacttcgttatttttttacagttaaaaaaaataagaattataggcattgaggagctcatatgggtacacccatgaatagatacatccatacctgtaacaagcgatatcagtgttctattgactaccctaagcttttggtcagcgtaggggttcttgggttttcccaggactgaattctgatgaaaatatatctggagtaatgatttcttccattttgcattttctgtccggactccagggttttaagccgagctccgggactgtccaggaactgaatttccggagcagcaagaacgtgtggggttacttcagcgtggccgctactggaggcctgcacgagtttgcggattcccaatttgggcactgcttctcctggggagagaaccgggaagaggccatttcgtcagtatctccttccttccttccttccttccttccttccttccttccttccttccttccttccttccttccctctctcccttcttcccctcttccttccctctttctcctcccttcctttcttcttccctccctctcagcctttctccttttttccttccttcccttccattgccttcctgccttcctttcttccttccttcctcccctcttctgccctcccctccccttccatcccttcccctcccttccttcctcccktccttyctcctccccttcccttctttcctcccttcctccctccttccttcttttcctgacttctctgctttcctccccctccctttcttcctccttctttccttccttccttctttccctcccttcccacttcctccttttcccaattccttcctttaagaaatgaaacggtcccctggggcttcagatacagtagcatttcaggagaccaagaaaagtaaatcacagggtaggccccattttaaataccctgtgcttgaagttcaagatcaaagcctgccctttttttcctttattgaagatccacaaagtaaaataagtgcaccaaggtcatttggtcttgagcttataagagttctagcttgaaggagatctaaagattgttctaggagatacccaaagtgtaaaaggtgctaagtaccatagctgaagaaagggggagggaaactcctttacatttaaaccttatcagtagttccctaatgggttgtatttcacaccgaagactaaattttaaggagtgtgtcctgctgtgaaccacccaccacyctgaggcctgtgacagcagccccatgtccccagctcagccaagtcctcccatacttgtgatagtttctgcagagctgagaagcccacattgacagagggacccccaaattctgacacaccatctccgacacttctcctggcttgacatgggtgtggaaaggtataaaactagtttactttgtaattaaatgtttttgtgtgggtaactgcccttcggagtgaaaaaatcccaaaggccttagcattaaaatctgacgtggggcacttagccacgaattaaattgagttgggcagttttgatgatcaggttttctttgccagcttagaataattaattttaatcatgcttagtgaaaaatcaagatccttgaagtttatggaagattgcagcaaaaagggcttacttaataggagtaggcggaagacaggtcagccagcccagacccctccgagtgaagtgacctgtggcttgtcacatgctacgagtggaccaaccgcaacttcaacagaactcacaggcagaaattccagcttttcttattgctgttagtgagagtccagtagggggatcaactgtcctcgttttcctggcaccggtttctcaggttgaaggacttctcagtgctaaaatggggaccrccccaaggaaactgggacaagtcactcacccgtgagaccagcgggttaactctcatacccagcttccagacccacagctgacttttcatggcctatggatacccttgtatgaccttactgggtcttcattttctcacccccaaaatggggtcatcagtgtccttccccgttacctgctgacagcacacaggatgctgcaagacatgaaagcttactcggccaggcacagtggctcatgcctgtaatcccagcactttgrgaggccaaggcgggcagatcacttgaagccaggagttcaagaccagcctggccaacatgacgaaaccccgtgtctactaaaaatactgaaattagccgggcatcctggtggccatctgtaatcccagctactcgggaggctgaggcaggagaattgcttgaacctgggagatggaggttgcagtgagctgagatcgtgccatttcactccagcctgggcaacaagagtgaagctccgtctcaaaaaaacaaaaaaaagaaaaaaagaaagctttctctcccagaagaagaggtgttcagatacctgcccacactcaccatgaattcatagggctcagcttcccgagtagctgggactataggcgcgtcccaccacgcccggctagttttgtatttttagtagagacgggatttctccatgttggtcaggctggtctcgaactcctgacctcaagtgatccacccgccttggcctcacaaagtgttgggattacaggcgtgagccactgcacctggcctgaggtttagctatttgaactggtgctcttggagatttggagtctgtgtgttggggagaggcagccatggggcccaccaggcccctgagccgggtgacagtgccgtccatctgcaggtgcaccccacacacaccaggcagagcagctgtgtggaaggtgagagggtggcaccagctctggggacaggagatttgaataggtcaagggagagacagaggcggtgaccgattttccctttgttttttttttcttcttttaagagatagcgtctcactgtgttgcccaggctggagtgcaatggtgtgatcatagctcactgcagcctcaaactcctgggctcaagcgatcctccccctttagcctcctgagtagctgggactacagtcacataccatcacgcttggctgattttaaaatttttgtagagatggcgtctcattatgttgcccaggctggtcttgaactcatgcctcaagcaatcctcccgcctcagactcccaaagcagtgggattacaggcatgaaccaccatgcctggctggttctttctctactaatcattaactattatagtcaataattataacaataataactaatcacrttcattgtagttaacatttattgatcagtgaccatgtgcattacatggattgtctcatttcaattctcgaacaccctcatgaagtcagggctatttccccattttccatatgaggaaactgaggcccagagttctcaagtcacttggccaagattagccaggcagtaaaccctggygctgattcaatgcactggctgtgtcagtcagagccctctcttaactcttctttttttttttttttggagacagagtcttgctctgtcgcccagcctggagtgcagtggtgtgatctcagctccctgcaacctctgcctcccagattcaagtgattctcctgcctcagcctcctgagtagctgagattacaggcgtcctccaccatgctgagctaagttttgtatttttggtagagatggggtttcgccatgttggccaggctggtcttgaactcctgacctcaagtaatacacctacctcagcctcccaaagtgctgggattacaggcgtgagccaccacacccggccactcctgtgcttttccagttctctgaatcacatcattgcagcaactctgttgatgtatgcatgaatttggaaaatgatccatgtgcctttcccttcaaggaacatggtggtggctttgaaggaactgtccatccgaggygactttaggactaccgtggaatacctcattaacctcctggagaccgagagcttccagaacaacgacatcgacaccgggtggttggactacctcattgctgagaaagtgcaggtagggagtgagctgcctgtgtctcccctctggatggccgagacctcggcttcctgaggatactgaagtgcattttctcctaggcggagaaaccggatatcatgcttggggtggtatgcggggccttgaacgtggccgatgcgatgttcagaacgtgcatgacagatttcttacactccctggaaaggtaggggctgtggcagttcccttctgcttttgtgatatgtgttagyggcttaggaggctgaatctgtctcctttatttgtgtggccagttagtcaccaggcaattggtgagtctctcctccggtcttgcctctgggaaattcctctacagatcaacctaggctacccttgaagaggctgtgggttagggaatgggattctcgaggccagggtggcagtcagtgaacaggctgttgtgtayggatccatgctgacttgtgtaaggtacatcataatagtcaggagttctgagttcaaggaggtggatttgggaagcaaagcggcttaaaggtcatctctacaagcgggtgcattcccagaccctcaccagaatcagagggtcatcatgaaatggaccagaatggaaagcaaccaggcgatctctgttaggataggccggggtttctcagcctcagcaccattaacattttgtgctggatgctttttttttgtttgggaacctgtcccgtgcatcataggatgttagcagcattcctggcctctacccactaaatgccaggagcagcccttccctctgagtcatgacaatcaaatatatctccagacattgcccaatgtcccagggttaggagtagaataatcacccccagttgagaactgctgcaagaggcaaaggaactatcaaaaagaaaataaaaggataawcttttttttttttgagacagagtcttgctctgtcatccaggctatcacccaggctagagtgcagtggtatgatcacagctcactgcagcctggacttcctgggctccagtgatctgcccacctcagcctcccaagtagttgggaccaccggtgcatgccatcatgcctggccaatttttttaactttttgcatagatggggtctcactatgttgccccccaggctggtctcaaactcatggcctcaagcaatcctcctgcctcaactctgaaagtgctgagattataggcgtgagccactgtgcctggtaagaaatgtttttagtgtttggttatgcttttgaacggtagtagaatcacagyccctgctctggtttctttcataagccgaaggcaggatcccatatgtgaaatttttccaagagaccgttatggattttgctcctgaaaagcctttgtaagatttcaaatccctcagcaagtgctgattccttaagttctaagcaatatcaggctgctcagggtgattcaggttctgtgcgtgacttttaatcagatttagcctttttttttttttttttgagacatagtctcgctctgtcacacaggctggagtgcaatggtgtgatctcagctcactgcaacctccgcctcctgcattcaagcaattcttgtgcctcagcctcccgagtagctgggatgacagctgcatgccaccacgcccggctaatttttgtatttttagtagagatggggttttgccatgttggccaggctggtctcgaactcttggcctcaagtgatgtgcctgcctcagcctcccaaggtgcagggattacaggcgtgagccattgcgcccagcccaggcttagcatttttagtgcagtcaggtttgctgatgcagagagttgcgtaatttttttaaatgcaagggatggctgtggagttctcagtccctcccaaggstgaccacaaccctgtcttttctttcaggggccaggtcctcccagcggattcactactgaacctcgtagatgtggaattaatttacggaggtgttaagtacattctcaaggtaaatgcccccgtgcytctccgatgtctccaacactctgcaagcttcagggagtttctttcttccatgaaccatccctggagtggatttgctcatgcttgggtttgagctcttgtgttcctcgggaatccccatgtagtccgtgaccttgacacctaaacactttggcttttagaacatgtagggctgtgcattctgcagagggcacaatggagcgtggataagtttcctgtagctgcggtaacaaggtaccacaaactggtttaaaccaacaaaaatktattgtktcccagttctggaagccaagtctaaaatcgaggtgttggcgggccgtggtctctctgaaggcgctggggcaggatctgttccgagcctccccagcttctggtgctgctggcagtccctggtgatttttggcttgtggatgccttgccccagtctctgtctctgttttttkttgttgttgttgttgttgttgttktttcaaacggagcctcactctgtcacccaggctggagtgcagtggctcaaccttggctcactgcaacctccatctcccaggttcaagcaattcttctgtctcagcctcctgagtagccgagattataggcatatgccaccatgcctggctaatttttgtatttttagtagaaatgggatttcaccatgttgcctaggctggtcttgaactcctgagctcaagtgatctgccctgccttggcctcccaaagtgctgggattacagkcatgagccaccccccggcctctgcctctgtgtgtgtgtgtgtgtgtgtgtgtgtgtgtgtgtgtgtgtgtgtgtgtgtgtgtgtgtgtgtgtgtgtgtgtgtgtgtgttcacattatcttccatgactgtgtctttgtgtctcttctcttgtaagaacaccagtcacattggatttagcgtccaccctaatccagtatgatttcatcttaattacatctgcagagacctcattccaaataaggtcacattccaaggttccaggaaggccatgaattttggaggatattattcaacccctatagaatgtgagctgggcctttgctgagacagaatagtgggcccgggtctgtttccaggggctctgaggctggttttgttctctgtctctgcaccacgtgtagattwctggcrtcttccctggtttactactggagtccctggggcttattccggttgctctcctctgtcagaagtgcctagttgccctttgtgggccatccaaggtcaattcaacagtgtcagaaatgtctctgagatgcacaggtagggggtgaggcttggtgtcctagccatggtgttctgggcccagggtccttgttggggtgagccggctgtggcatcagtgccccgggttccaatgcaatggcaggaggctgtgtcccctgtaagcccaggcctgcccagtacttcccagcctcacattgtcaggagggaaaagaggacagagtttgagtctgcttatgagacagaatttttgttttctttaattagtactttctatttaatattgatgagcatgagtagaactcacaactttggagatttgggggctttagttcaactaaacctgtgtgtcattgatcagggtatgctttcacaatcatcctcctttgcccctaatgcctcttggctacctttggggacctagctgcccccaacttgattttaaatgtcacatatgcacaatgyagaaaatttcaaaatttcaagcgagcataaaaaatcaggaaaacaaatccatcatgtgctaatgcctagaggtaatcctggtaaacattttagcaaatctttgttatatatttttttccttttgcattaattttacaaagttgagatcatggtgcaaatgcagttttacagctttgatatgatcatggcataaagttttccatgttattaacaagttttttttttaacacgagtctaaactcatgtctgtggcactgtctccctgaacttttaatagtgatgggaacattccctatcttctgtgtccaagatgctgcccttatgtggtgactgagagcttgaaagtggccagtgtgactgaggaactgaattttacattttatttcattttgatcartttaaatagctgtgtgtggttaggggtcaccgtatcagacagggcagatctaaagtgttccattgcaaggttgttggcytgctaattttgttctaatttttgttgttattacaaataatgctgcaatacacattcctctatttcttgctgccttgtgtcataaactgtgaattttataggttgaaggccctttagggtgtgtgttttctgagagaaaacygaactgaagtaccagatggggcaggcgctcttcctggagggagatgtagtgctggggccagggcttggctgtgtctctctcacgtgtcccaaagctcttgtgtgctcctgggcagagctgggtctgggaagcagagccctagtccatgtccaggtgtcttagtccatttgggctactgtcgtaaaataccaaagactgagtggcttctaaaccacacactgratttctcacaattctctaggctgggaaggtcaatatcaagatactggcagatttggtatctactgaggacccacctttcgtttcatagatgctgtcctttygctatgtccttagatgtcagaaatgggccacagagctctacaggggatcttttataagggcactaatctcttttacaagggccccaccttcatgatctcatcacctcccaaaggctccacctcctaaagccatcacattaggggttgggatttcaacttatgaattttgcggggacacaaacgtttagtccattgcacctggctgctggtggagtctccagggctgcctcacacagagtgagagctggagacaggaatcagaagggagtctctagccccagaggacatgcagttgccaacacggcttgacagggactatataagcggccattagcctacccacagggcaggtgtggctcgctactccaggcctcccccagccccatcagcagctgctcccttggcaggaattgtgagggctgggtccgagagacgggggtgttcatcttggccctctgtggtggacaaccagctcttgtttgttgttagcggggcccagcagtgctctgggagcacatcctgaacccaggcggtgacaaggggcttgtccccacaggtggcccggcagtctctgaccrtgttcgttctcatcatgaatggctgccacatcgagattgatgcccaccggctgaatgatggggggctcctgctctcctacaatgggaacagctacaccacctacatgaaggaagaggttgacaggtgcgtgggggtgcgagtcccactgtgggctgggcatgcacagctctctgtcctaggcatggaaaacacagcrctggcctgtgtgcaggtccaagggtcttagagaaggtgcctttcyggtaaattctgggggtgtgcagagaagttaatctcttggttggaattctgtgcaactggcagatatttaggggaggatcctaggaggcccttttctagtaacctggttggtggggattcagagctgaacgggacatgactcccagctctgtggcctgcgaggtgtgtgaycaggtgcctgctgcctgtgcatctgggctcyggcatccacccagttagtgcggcagtgacctactaagctcctccgtaccaggcgctgtgctgggtgttgggatagcattctgggtgtgactcgtggagcttccagcccattcgggaagatgacacactgaacaaacagatagtggcaggaaagggtgtcgtgtacctgacgggtaacacacaagatgccctggaagctcttagcacaggggcttgtgagatagtgagataggccccaaagatgccccgcctccagtgtgtctgatcaccccgagatcacgcaatgaaacagaccccagccaaggtgatgaaaggggaggggatgtctgaaaagctccagttagagagtggagactctcttctcaatcctcaatgttttggaagaaggaagactaggtttatgccagagtaatattttgttatctccttttttttctttttgagagagggtctcgctctgtcacccaggcaggagtgcagtggcaccatcatgactcactgcagcctcaacttccctgggctccgagatgatccccccacctcagtcccccaagttgctgggactacgggcaygtgccaccacgcctggctaatttttgtattttttgtagagacggggttttgccatgttgctcaggctggtcttgaacttctggactcaagcagttggccagccttggcctcccaaagtgctgggattgcagtcatgagccactgcaccctgcctgttatctcttttttaacccacgttctatctgccaagaatgttcaggattactataggttctactctccccagttcaaaggttaagactttgaatcagtaaatatttgttgaatcatatccactgattgatttttctgtgtcaggccctgttggaagtatgtcagtaaaaggaaccagctttcagccaaaaaagggtcacatcctttttattattttattttattttaaagactggttcttactctgttgcccagcctgggcaagagtgagaccctgatcgcttgagtccagaagtttgagaccagtctgggcaacatggcaaaaccccatctctataaaatacaatgattagccaagtgtggtggcgtgtgcctgtagtcccagcaatttagggggttgtgatgggaggatcacctgaccccagggaggtcaaggcttcagtgaaccatgattgtgccactgcactccagcctgggtgacagagtaattatagctcacaatagcctcaaactcctgggctcaaaggattctcctgcctcagcctcctgagtagctgggactactggcatatgctaccacgcccagctatttttttttttttattttttgtagaggcagggtctcactgtgttgcccaagcttgtcttgaactcctggcctcaagcsatcctcccacctcggcctcccaaagaaagcatcacagccttggccaggcacagtggctcacgtctgtaatcccagcactttgggaggctgaggcgggcggatcatgaggtcaggagatcgagaccatcctggctaacatggtgaaaccccatctttactaaaaatacaaaaaaaaattagctggatgtggtggtgggcgcctgtagtcccagctatgcgggaggctgaggcaggagaatggcgtgaacccgggaggcggagcttgcagtgagccgagatcgcgccactgcactccagcctgggcaacagagcgagactccgtctcaaaaaaaaaaataaaataagaaagcatcacagcctttttgttcacccacctcactctcagtgtctctgagataactatcaactgccaccctttgggaatgtagagggtacactccccctttaggaaggggaaatggtattgaaagccggactagggcttgctgagttggtagtcctcatcagtctccctacccsactcctcctctctcccagttaccgaattaccatcggcaataagacgtgtgtgtttgagaaggagaacgatcctacagtcctgagatccccctcggctgggaagctgacacagtacacagtggaggatgggggccacgttgaggctgggagcagctacgctgagatggaggtgactgcagagccsgccgtggggaatcctgaaccctcaaactcccactcttctggctttgtcccatgtctgaacaaacaggcctacctctccccttgaccactgtctgcaaatttctaagggaatcagtctgtggatttcagccaaatcccctgaagtattcaaagaaaaaaacttcaggctgggcgtggtggttcacgcctgtaatcccagcactttgggaggctgaggcgggcggatcacgaggtcaggagatcaagaccatcctggctaacatggtgaaaccccgtctctactaaaaatacaaaaaattagccgggcatggtggcaggcgcctgtagtcccagctatgcaggaggctgaggcaggaggatggcgtgaaggcaggaggatggcgtgaacccaggaggcggagcttgcagtgagctgagatggcgccactgcactccagcctgagcgacagagaaagactccgtctcaaaaaaaaaaaaaaaaaacttcaaaaaatgcacatctccccaggaatgagtaagaaggttaatgacagagaaactgggtacagagaatatggaaactctctgtactatttacataactgttctataaactgttgtgtaaatcagtttccttgatttctttattttttttttgagacaagtctcagtctgtcacccgggctggagtgtagtggcgtgatcttgtctcactgcaaactccgcctcccaggctcaagtgatcctcccacctcagccttccaagtagttgggattacaggcacgcaccaacatgcctggcttaattttttgtatttttggtagtgacagggtttcgtcatgctgctcaagctggtcaaatacctgagctcaggtgatccacctgctttggcctctgaaagtgctgggattgcaggcatgagccactgcacacagccaagaattgattgataataacaattattgtcaatcaatgattaaatattaaatattgaccccagcaataattgaaaggtgttaagccaacacttgcaaagccataaccatgtggcaggtgctgttctaagcattttactgatctttattttttaaccttcccagcaaatatatgagatgggcacaaatgtgatccccattttataaaaaagctgggcccaggcaggctaagaaactcactggaggtcacacaaagccaggattcaaacccggaaaataacaacaataatagcaatgaaaatacatcaataatagtagctactgcatattgacctgctgcatggcaggatctgcatctcattcaatcctcgtaagagccctaagaggtgaaactgtcattattcctcattttacacttggggaaactgaggctcaaggaggggagccacttctgaagatcacagaggtattggggggggcagttcctgggattctagtccaggcctggctgacttgggtgcccaagctgtgaactgccaagcaagagagatagcacagtcctggctctgcggccgccaccatggtgacaaagctcatgccacgcacgtatccagacattcgggaaaattaaaagggctgatgagcagattcttcatttcacagagtgttccctgagggttttctaagtgcctttaataaaacaaactgttcacaaaatgtttgatttatgcagtacgttttaggaacgtgtatatgaaccactctatgtaatatgatttaacagtatttctaagagaagactccccctttggaaataaacatcagtttccatatctgtaaaatgggcatcataaacacctccttggctggctttgcagattgaatggcacttgcctggcacttagcaggcttccagtaaaggtcacttttccttgtaccttctgcctgaacactacccagggagtcattctggcgcgtccctgggtagtgtcccggcgcgtccctgctccggcatcactagttctgggtggctctgggtgtcaatcccggtgggctctgtactatttcttctttttacgaaataggtgatgaagatgatcatgaccctgaacgttcaggaaagaggccgggtgaagtacatcaagcgtccaggtgccgtgctggaagcaggctgcgtggtggccaggctggagctcgatgacccttctaaagtccacccggtatgtggctccacrgcccaagtgctctggctggtgcaggtgcactcgtgacctccactggttcagtgagacaggtggactcaaggctggtagcgcttctccygcctccacctgcagacagagctcgtcgcagcagccaccgtgatggtgcagaaacacaaggaagccgcgccctgctttactcagatccctctctgtggctctccatcctgcttagagcaaaacccaatttctgccagtgacctgcaagaccccaaatgagctagctgttccctgctttcttctctgcctttctcctctgtccctctccccatcacttacttgaatacactggacccctccctcctggcggctgtcctctctgctgtgaaggacctaccccagactttgcagggatcactctcaactcctgggagctttgattccaatgtcttcccctcaatgagggcattcttgaccattgaccaccttttctttttaatagacttaatttttagtatagttttagatgtacagaacagttatgtaagtagtgcagagttcccatattctctgtggccagtttccctgtcattcatttaattatcattcaattaattgttagtattattattattattcatttttttttgagacagactctcgctctgtcgcccaggctggagtgcagtggcgtgatctcgactcactgcaacctctgcctccctggttcaagtgattcttctgcctcagcctcctgagtagctggggattataggtgtgtaccaccataccagctaatttttgtatttttagtagagacagggtttcaccatgttggccatgctggtcttgaactcctgacctcaggtgatccaccctcctcagcctcccaaagtgatgggattacaggtgtgagccactgcacctggcctcaattaattactattgttatcaatttactgttattaatttaactattattgcacgagcatggtccatttgtcatatttaatgaaccaatatcgatatattaggtattattgtttaagaataataattaactttaaaatttaactattattgcaataatatggtccatttgtcacatttaatgaaccaatattggtacattattgttcactcagatttctttagttcattttttaaaaattgtggttaaatacacataacaaaatttaccatcttagccatttttaaatgttctcttgagcagtattaaatccattcacattgttgcacarccatcaccatcatccatctccagcacttgcaaaactgaaacttgacactcgttaaatggtaactcctgagtccctcctccctccagcccctggcaaccattgttctgctttctgtctatcaattcaactcctctaggtgcctcatataggtggaatctatatagtatctggccttttgtgactagcttatttcatttagcgtaacgtctccaagtttcatccatctgatagcatgtggcagaatttccctgttttttaaggctgcataatattcccttgtaggggtgaatcacattttgtttatccacccatccactgatggacacttggattgtttctacctgttggctactgtgaataaggcagctatgaacatgagtgtacgattttcttagtttttacctattgtccrggatcccatccaggttagcacattgcatatagttgtcaggtctctttcaaccgccctttaaaaaattgtgctcacctccacccacgtgcaaacacacaccrtacctcacaaagatgatctcactgattgtcttgttgctttattatttggcctccaggagactggaaacaccgtgagaacagggccttttggctttcttgctcgctgctggggccccagtgccaaaaacagggcctagtacatcagaggtgctctgtaaatattggttgttggatgaacgtgtagcaggcaggtgccgggggcgtccccctgtcctcaggaccaccagggggtgcaccagagtgtctgtcatgtgaccctgagctcaggctcttgggggcacctccaatttagattcctcttaatttgtcaagctstgtcattaccgatgagtccctgaggtcaaggactactttcgatgtccactgttgtgatcctggggcttagcacagtgctcggagcatagtgggtgctcagaaataacaagtcttgatgaatgaatgaatgtttacaccctcctaagcaagactctaaaataattagtacatctgtccagtaaaaaaaaaatttaaaaatatcacatggtctcttttctccagagtattctattaattgtatttgttttctttttwaaaaaaattataattattatgggtacataataggtgtacatgtttatgggggtacatgtgatcttttggtataggcataccgtctaataatcaaatcagggtgattggggtatctattacctcaagcatttttcatttctttgcrctaggaacattccagttctactcttttggttagtttaaaatgtacagtcgattttaattgactgtagagtcaccctgttgtgctatcaatactatatctttttttttttttttttttgagatggagttttgctcttgtcgcccaggctggagtgcagtggcgtgatctcagctcactgcaacctctacctccagggttcaagcaattctcgtgcctcagcctcctgagtagctgggacttaaggcacctgccactatgcccagctaatttttgtatttttagtagagatggggtttcaccatgttggccaggctgatctcgaactcctgacctcaggtgatccgcccacctcagcctcccaaagtgctgggattacaggtgtgagccaccatgtccagcctcaatactagatcttattcattctatctaactggatttttgtacccgttaaccatccccactcccaccagccccactacccttcccagaccctggcagccatcactctacattctatttccatgagtttatttgttttaattttcagctcccacatatgagtgagaacatgctaaatttgtctttctgcccagcttatttcacttaatgtaatatcctccagttccatccatgttgctgcacatgactgttgttacaattcttttcattagtctctttctctctttttttgagacagagtctcactctgtcacccaggctggtgtgcagtggcacaatctcagctcactgcaacctccacttcctgggttcaagcaattctcctgcctcagactcccgggtagcaagtacctgggaccacaggtttgtgcgaccatgcctgactaatttttgtatttttagtagtgatggggtttcactaggttggccaggctgatcttgacctcctggcctcaagcgatccgtccaccttggcctcccaaaatgctgggattacaagggtgagccactgtgcctggcatcactagtctctttagggagttcccaaagctaggaatagactgggcctttttggatcagtgggcaggtctgggtacctgcactgtgattcctttcagcacacatttcctgtgctgggttaatgaggcagggcctgcccacccattccctgcagcctcacataaatgcttgtgagacagactgggagatcgagtracttcacttggtgagtgtagttagaagaccgcccttggccctgggctgtggggacccacatggagaagctatgatcagattgtgtaggggaaaaccctcaagtcagctttttttttttttgagacagaatttcactccattacccaggctggagtgcaatggcacaatcttggctcactgcaacctctgcctcccaggttcaactgattctcctgcctcagcctctggagtagctcggattacaggcacgcgccaccatgactggctaatttttgtgtgtatttttagtagagatggggtttcaccatgttggccaggctggtctcgaactcttgacctcagttcatcctcccacctcggactcccaaagtgctgggattatggtcatgagccaccgtgcccggccaagtcatctcttaaaaggggagaaaagcctgcagggctaggggtggggatgggtgtgggtggaggggtagagggtgggcaggaaacrgagtgttctctgctgggagaacagcaccccagcactgtgcgtcatgcacrgtaggtatttgtagaatgaatgagtagacgaatgagcacatttagtctgtgttgccctctagggagctttttatttttccatgtgtttacctaagactgaatttttatgatttacaaaaatcagatgcatttgtatgagatgttcataaattttcatcctactgtgaggtgtttaactttgggattcaatagagaatgaaaataaatacagaacatgagatttgttgattataaagcaaaacaacaacaacaacaaacagatcggccgggcgcagtggctcacccctgtaatcccagcactttgggaggccaaggcgggcagatcatgaggtcaagagatcaagaccatcctggccaacatggtgaaaacctgtctatactaaaaatacaaaaattagctgggcgtggtggcctgcgcctgtagtcccagctactcgggagactgaggcaggagaattgcttgaacccgggaggcagaggttgcagtgagccgaggtcatgccactgcagtccagcctggggacaatgcgagtgtctcaaaaaaaaaaaaaaaaaaacagatctcaccgccaccccacaaaactgtctggggtgtgaaactgtgtactgggccatttgcaaaaggaatggtttggaaaacccacattggggtgtgagtttggccattttaactttccagttcattgtctttgattttttcctcagacctcatcctcacttgattacggaagccggcagatctgtcctgcctcccattctgcccggtcccatttggaattcccagagttttcctgacctgtcgttcttgtggtgtctcatcaggctgaaccrttcacaggagaactccctgcccagcagacactgcccatcctcggagagaaactgcaccaggtcttccacagcgtcctggaaaacctcaccaaygtcatgagtggcttttgtctgccagagcccgtttttagcataaaggtaaagtcacctatgagcgcaggcgtgtagaccagtgcggagggtcagaagatctaccccgtgacagcagaggtcattattgagtaagaaatgagaaaatggtcggtcctctgttgkttttattttatttattttattttttcagacaaggtctcactctgtcacccagactcactgcagcctcgacctcctgggctcaagagatcctaccacctcagcctcccacgtagctgggactataggtgcaccccaccacgcccggctaattttttgtatttttgtagagatggcattttgccatgttccccacgctggtcttgaactcttgggctcaagtgatccatccgcctgggcctcccaaagtgctgggattacaggcctgagccaccgcacccagcccctcggttgtgtttatgaaggacctgtcctcagggaattcctcaattcaattgtaaacattggcctgactttttctccttgatcgtaaactgggcttgtagcagttcagctcaagactgagaatactccagtaggacattaaggaaggagtcagtgggggtcaccctgcttaaggagatgacagacaaggcactttgtttgaaacacacctctgttcgtcattcacccttgctgggtctcatctgctcactcagtagagaaacaagaagttctctgatttgcagacctccttgaaagacccatgatgctcatagcagtgactaagcatcacactgtgtgctgtaccgggtccgtctcaggagagcaaatcatgatggtgatgacgataataaccgccaacccttagcaagtatgtaccatgtgtcacccccctttgtttttgagagggagccttgctctgtcacccacaccaaagtgtggtggcacgatcttgtctcactgtaacctctgcctcccaggttcaagcgattctcctgcctcagcctcccgagtagctgggattacaggcgtgtgccaccatacccagctaatttttgtattttttagtagagacggggttctaccgtgttggccaggctggtcttgaactcctgacctcaggtgatccacccaccttggcctcccaaagtactgggattacaggcgtgagccaccgtgcccgctgtgtcaccttctaactacttaaaagttcaatcatttcatcctcccagcaaccgataaggtaggaactcttatttccacttacagttgaggcaactgagggacacagagactaagagacttgctgtgcttcatacatgaggaggcaaagatgagatctgaaccatggccatcaggattctgactctgtgctcttcgcccccacgttatgctgcctgatgattattaccaccattgcaacattttttttttttttttggagacagggtcttgctctgtctcccaggctggagtacagtgggggaaacactgctcactacaacctcgacctctgggttcaagcaatcatcccacttcagccttccaagtagctggggttacaggtgcctgccaccacacccagctaattttttgtagagacggggtctcgccatgttgcccaggctggtctcgaacttctgggctcaagtgatcctcccgccttggcctcccaaagtgttcagattacaggcatcagccaccgcaccccacaataattgcaacttttattagttggggcacttcgcagtttatgcatcagttcactttgaaacctcacaaccacactaggatgttggccccactatcatcgtcatccaaagaccatcagcattggctactgagacaccccggaaacagcatagggcagcagttcagagtctcaggagctgaatagcctgggtttgcttcttactagctgagtgactttggttaacttaactaacctctctgtgtttcagttgcctcaattgcaaaatggacaaaatcattagacttcctttatatggttgcttttagggatcaaatgataacatgaaaagaaagttcctagaacactgtctggcactaagcaagtatcctataaacatcagctcatcatgtgaccttatgtttgatcccccmcaccatgctggctttctgatgcacagagagggggagtcagggtcttcctatgtagggaaactgagtattcccctgtggtcagggggccattccactctggactgccccagaggctgctgggtctggatcttcagccacttgagtgcatggggtcaggatgggttgagctgtgttgggtgccctgtttggggcggtggtgcccatgcccatgcagggctgggggctgatgctgtggtccccgcttcagctgaaggagtgggtgcagaagctcatgatgaccctccggcacccgtcactgccgctgctggagctgcaggagatcatgaccagcgtggcaggccgcatccccgcccctgtggagaagtctgtccgcagggtgatggcccagtatgccagcaacatcacctcggtgctgtgccagttccccagccagcaggtgcgtgctcccctgcccagccccaccccaccaggatggtcacactgggccggctcccggtctggctcgatatctggcctctgatcaagttgaactccttgagacccacttatagcctaacrtatcaggggccgagggtttccttttgagccttgtctgcagaatcctatcatttactcaaagcaacagttgtttgaatgaacatcagtattccttaggcctcattgcctaaaacccaagattctgaataggagtgagcagttgttgcagatggagtgagcatttcccaaaaaataaactggctgacatcattagaggaaactgcaagtttttttatttttgttttttcactggtttgcagctttgattttctgcccctggattttgtaggtgatcatctgggagctccatgtatgtgtgtgtgtgtgtgtatctgtgtgtatatatatatacacacacatatatatacatatatatacacatacacacacgtgtgtatatatgtatatatacacatacacacacgtgtgtatatatgtatatatacacacacacacacgtgtgtgtatatatgtatatacacacacatatatgtgtatatatgtgtatacacacatatatgtgtatacacacacatatatgtgtatatatacacacatacatgcatgtgtgtatatatgtgtatatatacacacatacatgcatgtgtgtatatatgtgtatatatacacacatacgtatgtgtgtatatatacacacgtacgtatgtgtgtatatatgtgtatatatacacacatacatatgtgtgtatatatgtgtatatatgtatatatacgtatatacacacgtgtgtatatatgtatatatacgtatatacacacgtgtgtatatacgtatatacacacgtgtgtatatacgtatatacacacgtgtgtatatacacgtacatatgtgtatatatgtgtatacacacacgtacatatgtgtatatatacacacgtgtgtgtatatatgtgtatatgtgtatatacacacacgtgtgtatatatgtgtatatatgtatacacacacacgtgtgtatatatgtgtatatatgtatacacacacacgtgtgtatatatgtgtatatatgtatatatacacacgtgtgtgtatatatgtatatatacacacgtgtgtgtatatatgtatatatacacgtacatgtatgtgtgtatatatgtgtatatatacacacatgtgtatatgtatatatgtatatatacacacatgtgtgtatatgtatatatgtatatatacacacatatctgtgtatatatgtatatatgtatatacacgcacacacatgtgtatatatgtatatacacgcacacacatgtgtatatatgtatatacacgcacatacatgtgtatatgtatatatacgcacatacatgtgtatatgtgtatatatacatgtatgtgtatatacgcacatacatgtgtatatgtgtatatatacrtgcatgtatatayacatatatacatgtatgtgtgtatatacatataaacatatatatgtatatatataatattttttaagaattatactgaggtcgggtgcattggctcacrcctgtaatcccagcacgttgggaggccagggcaggtggatcacttgaggtcaggagttcgagaccagcctggtcaacatggtgaaaccccatctatactaaaaaaaaaaaattagctgggcgtggtgttgcacacctgcaatcccaactactcaggaggctgaggcaggagaattgcttgaacccaggaggtggaggttgcagtgagccgagatcgcaccactgtgctccagaaaaaaaaaaaagaatgtactgagatgtcttatcataatcatagttgcatttgtgaacatgttaaaaaaaaaaaaagaatggaagccattccagggaagtaagaaatatctctgttatttacacatcggcctcgcgttgttcattttgttgtggttgttggttttgtggggcatttgaaaggcatttgcactgggaagagcccctctgcctgtttgccttcctgccctctggtgggagggttccccaccatcatcatccacccacccacaaattggtgatttgggaaaccagaggacagtgtagttcaggccattctcggargttaggagttctatgggttggaatgttgttcagccaaagaaagaaagaatactgattcatgctcccacgtggatgaacctattgtgctaagggaaataagccaggcacaaaagaccacatattatgtgattcctctttttttttttttttttttttgagacctcccgaatagttgggattacaggtgtacaccaccattcccagctatttttttgtatttttttagtgragatgggttttcaccatgttggccaggctggtcttgaactcctgacctcaggtgatctgcctgcctcggcctcccagagtgctgggattacaggcatgagccatggtgcccagccctgtgtgattccaattttatgaaatgtccagaataggcacgttcatgaagaaggaagtagattagtggccgccaggggctgcagtgcagggaaaatggagagtgagcgctaatgactacaaggtttctttttagagtgaygaaaatgctttaaaattagatggtggtgatagttgcacaactttatgaatacactaccaaccactgaatgtacactttaaagggagatggtggaatatgatggtgtgtaagttatatctgaactaaaaaataacaaaagccaaactctagaggatcctaactgaaaaagtacacacttggaactttcaggaatttgtcattgatccaggtttttttttctttaaaaatatttttgatgccaaaggcaatacaccgataacattatgtgtaatgataaagacaggacccttccccatgagcaccctggtttttgctagagtgggacattcccatctccttgttccccatcccattgatatgtgcggaatggtataaggcgaatgtgtgcactcctccatgtgatcgctggcattttgagcgcttgaattcctcaccgttgaggggatgaacaggggtgtttcagggtagctggaaggctttgggcctggaattttcaatcttcaaatgagtctcggatgggacctccctgggaggctgtggtgggtcctttaggtcagcagttcccaacctttttagcaccagggaccggttttgtggaagatagtttttccacggaccggggagggggatggtttcgggatgattcaagcacgttacatttatggtgcactttatttctattatgattacattgtaatatataatgaaataattatacaactcaccataatgtagaatctgtgagagccccaggcttgttttcctgcacctagaaggtcccatctgggggtgatgggagacagcgacagatcatcaggccttagattatcgtaacgagcatgcaacctaggtccctcgcatgcacggttcacagcagggtttgcgctcctgtgagaatctaatgctcccgctgatctgacaggaggtggagctcagatggtaatgtgagcaatggggaggggctgtaaatacagatgaagcttcgctccctcacccactgcttacctcccactgttcagccagttcctaacaggccacggaccagtgcycgtttgggtactggtttggggaccctttctttaggggactgctgtgtgtcatytgaatcatcagcagtcagacctgtcttgttttcccatccagatagccaccatcctggactgccatgcagccaccctgcagcggaaggctgatcgagaggtcttcttcatcaacacccagagcatcgtgcagttggtccagaggtgaatcctgggtctccccgtaggatgtggttgtcacctgaatcgtcgcatgcattgcaccagggtggtgctctggggctgtcttcagggcaggcttgaactgagagaaagtgtgttatagtcctgcagtgccattactaacagcagaaccctgggtgaggtactttacttctgtaaatctctgtttgtaaatctcagctcactgcaacctccgcctcccaggttcaagcaattctcctgcctcagcctcccgaatagctgggattacgggcatgtgccaccatgcctggctaattcttgtacttttagtagagacggtgtttcaccatgttggccaggctggtctcgaactcctgacctcaagtgatccattctcctcgacctcccaaagtgctgggattacaggcctgagccaccatgtctggcctataaatgtattaagttttgtgaagtgctgacaaatagtaaatacttgatagatayattagattgagacaatgggatgaaatagctttatgtatgataaaacactgcaaaaattgttattgtggcttttgggacaattgcaaaggaaagtggatgaataattgtatttcatctcaagtagttatttattgtacaggggtttcccgctgcaggactattctgatgacaaaaggattttctttgtttttttgagatggagtttcgctctgtcggccaggctggagtgtaatggttcgatcttggctcactgcaagctccgcctcccgggttcacgccattcttctgctgcctcagcctcccgagtagctggaactacgggcgcccaacaccacgcccggctaatttttttgtgtgtttttagcagagatggagtttcatcatgttagccaggatggtctcaatctcctgacctcgtgatccccctgcctcggcctcccaaagtgctgggattacaggtgtgagccactgcacccggctgacaaaaggattttctgccacttttcatgaaaaatccacctagcaagaaggctttccttatgaagacaatcagggccaggcgctgtggcttatgcctgtaatcccagaattttgggaggccaaggcaagaggatcacttgaggccaggagttggagaccagcctgggtgatgtagcgagaccctgtctctacaaaaaaaaaagaaaaaaaaaatgagtcggggatggtggtgtgtacctataggcccagctactcaggaggctgaggtgagaggactgcttgagcccaggagttcgaggttatagtgagctgtgatcgcgccattgcactccagcctggggacagagcaagaccttgtcttttatgaaaaagaaaaaaggaatcaaagcattcttggatttgaaccagtaaattccaggcatgtttcccatgtgccagaaactcacaggtacaaagaatgtgagattgtagaaaactggcctccttttcaaggagctcctcagctgttagggagagagattttagtgtggattccccacaaactgcaagtttcacagccaagggctaggaagggagtcctcctaaaacacatagactgctaaccttaagcycatcctttaagcttcagagaaacatctaggaaaaatgaaccattaataaattaactgaattttctagcaagttttctgtgctgamcataaatattaaagccctgtcctgtattgtgtaagtatgttttaaaatcacatttgtatcagagtcttttagcatcttggtctgttttgttgtgatttggtgatgctgccatgaagcgtctacttccccacaactcagtggcgcatctcctgagaaacttgactcctgtgttcagatttttggaagaacatccaggttaaaactttgttttaaaagaagcggctaggtgcgatggctcacacctataatcccagcactttgggaggccaaggcggrtggattgcttgagctcagaggttcgagaccagcctgggcaatatggtgaaaccctgtctacaaaatatacaaaaattagccaggcttggtggtggccacctgtggtcccagctactccagaggctgaggtgagaggattgcttgagcccgggaggcagagattacagtgagctgtgattgcaccactgcactccagcctgggtggcagaacaaaacctcgtctcaaaaaaaagaaaaaaaaaaagggagaagcaaaatttacatggggatcttttggtaaatgtttttccagtttgtctttttaaaatggtctctataccttgggtaagtaattgaaaaattttgtttttaacagttaaagcttgctaaaattggctacccctgttcagtatccgaaatctatgaagttttttttttttcttaactctgtggccagaaaggcgccctcccaagtataaggcttgggatctacctactccagttttgcctccagtttgatgtgggactttgggcagggcagtgttctttttggcctgcagatgaatcaactccatatcctttgaaggcctcaggattagagggtgcctctagatactttaaaaaaatttttggctgggcgcggtggctcatgcctgtaatcccagcactttgggaggccaagacagccggatcatgaggtcaggagatcgagaccatcctggctaacacggtgaaaccccgtctctactaaaaatacaaaaaaattagccgagcgtgggtggcaggcgcctgtagtcccagctactcgggaggctgaggcaggagaatggcgtgaacccgggaggtggagcttgcagtgagccgagaatcgtgccaccgcactccagcctggccgactgagcgagactctgtttcaaaaaaaaaaatgtatttttaaattaactaattaattaatttttatttatttattttgagacaagctgtcacccaggctggagtgcagcagtgcaatcatagctcacaacagccttgacctcctgggctcaagcgatcctatcacctcagcctcctatgtagctaggaccacagtcatgcgctaccactcccggctaatttttttgatttttttgtaaagacaaggtctcaccttgttgcccaggytgctcttgaacttctgagctcaaatgatactcacgcctcagcctcccaaagtgctgggattattggtgtgagccaccatgcctggccttaatttttttgttttgttttgtagatatggggtcttggctatattgcccaggcttgaactcctgggctccagtgatcctcccacctcagtgtcctttctaaaatcctttctctctctctcttttttttttttttttttttgagacggagtcttgctctgtcgcccaggctggagtgcagtggtgcgatctcggctcactgcaacctcctcttcccggattcaagctattctcatgcctcagcctcctgagtagctgggactaccggcgcgtgccaccatgcccagctagtttttgtatttttagtagaracagggtttcaccattttggccaggctggtctcgatctcttgacctcgtgatctgcctgcctcggcctcccaaagtgctgggattacaggcatgagccaccatgcccagccaatcctttctctttttaaaaatcataaaaaaaaatactaaatattcaggtactcaaggaagggtgtgagcattaagagcagccttcccttctccccagataccgcagcgggatccgcggctatatgaaaacagtggtgttggatctcctgagaagatacttgcgtgttgagcaccattttcagcaaggcaagagatgctgatgccaacaccagtgggatggtggggggcgtgaggagcctgagctttacctctgtgtggtgttttgtctcccccagcccactacgacaagtgtgtgataaacctcagggagcagttcaagccagacatgtcccaggtgctggactgcatcttctcccacgcacaggtggccaagaagaaccagctggtgatcatgttgatcgtaagcaggaagagggcctgttactagactgggggtgggtcaggagtccacaaacgttttcttaaaagggccagaaagtggctgggtgcggtggctcatgcctgtaatcccatcactttgggaggctgaggcgggcagatcacttgaggttaggagtktgagaccagcctggctaacatagtgaaacctcgtctccactaaaaatacaaaaattagctggccatggtggtgcatacctgtaatcccagctacttgggaggctgaagcagaaggatcgcttgaaccctgaaggcagaggttgcagtgagccgagattgtgccattgcactccagcctgggcaacagggtgagattctgtctcaaaaaataaataaaagaaaaagtaagccagcaagtaaattttttagactttgcaggttggtgtggtckctgtcgtgaccactcaacactgcctttgtacaatgtaagggaatgggcatggctgtgttcccataaaactttgttgggagcccgaggtgggaggatcacttgagcctaggagttcaagtccagcctaggcaacattgcaagactccatttcttagaaaaaaaattaaaactgggcactgtggctcacatctgtaatcccagcactttgggtggctgaggcaggagaatcactcgaggccaggagtttgagacgagcctgggcaacatagggagacccccatctctacaaaaagtacaaaaattagccaggtgtggtggtgtgcacctgtagtcccagctactcagggggctgaggcaggaggattgcttgagcctgggatgttgaggctgcagtaagctgtgatcacaccactacactccagcctgggtgacagaatgagatcctgtctcaaaaaacaacaaaaaaaatcccaactttgtatacaaaaacaggcaatgagtcgggtttgttggcactgggaagatcatgactaatgcaaagcacctagtttgtgccaggtactcctgaagtgctttccaaataaatagttgctcatttaattcacgcagcagtcctagaaagtgggtactgctgtcacagctctttggcagagcacagagaggttaagccacttgcccaagggcacccagctcctaaatgtagagccaggatttgaaccaatagtctgactccagactcatgaactattagccgcaggatattggattttgagtcctgtgtgtggagaagaagaaatatggagtctctgttcttgtttctctttccactcgatgatagcagtcttttgttttttgtctgttttttcttttgagacagggtctcgctctgttgcccaggctggagtgcagtggtgccatcatggctcactgtagcctctatcccctgggcttaagccatcctcccacctcagcctcccaagtagctgggattacagactcacaccaccacgcccagctagtttgtttgtttgtttgtttgtttgtttgtttgttttgtagagatgaggtctcactatgtttcccagtcttgtctcgaactcccgcgctcaagcaatcctcctgccttggcctcccaaagtgctgggattacaggcataagccactgcgcctggccgataatagcagtcttttataactaaaaatatttttctttgatatgtcccttgcaactgacttggaaaatgtaggatcagcagagtaagagcaacttggacttggcttatagtagaaaggggtttggcaatttttttttttttttttttgagatggagtcttgctctgtcgcccaggctggggtgcaatggcayaatcttggctcactgcaacctccgcctcccgggttctatctatcttctatctatctttttttttttttttgaggcagagtctcactctatcccccaggctggagtgcagtggcacgatctctgttcactgcaacctccacctccagggttcaagcaattctcctgtctcagcctcgtttagctgggattacaggcatgcgccaccacgcccggctaatttttgtgtttttagtagagacgtggtttcaccatgttagccaggctggtcttgaattcctgacctcaggtratccaccagcctcggcctcccaaagtgctgggattatagacatgagccaccacgcccggcctggcaacttttttttgtaaagggctccagatagtaaagattttaggcttgaggacgtccaccccctattgccactactcagctctgtgagctctgccactgtagcctgaaaactagacaataggtacatgaatgagggtggctatgttccaataaaactttatttacaaaaacagtcagtaggcagagtttggccacgatctcagagaatagttaataccctgtcccctgtccaagttgcattaataaatattgggatttttggtaaagaatcatttaaaaatctcacgcagcagcttttaatcctggctgtacattagaatcacctagggggtggggagacttaaaaaatacaattgcccatgccccacccttggtcaatttaatcagagtttctaggggtagggcccaggcattagtgctttttgaaagtttccctgtgggaaacctaaatgtgcactgtatattagataatattattggtttaatgttcagtttctttggtgttttaatggttctgtagtaggtggaagggagatatgtgcgaaaatagtgtaaaggattgtggtgtctgcaactgactttcagaaaaagagagagtgtgtatgtgtatgcgcacgtacgttcttattagagaaaaatcaaatatgataatgtggcaaaagttttaacaattagtgaatctaggtgattactatgggtttttaacatactgatcttcaattcttctgtagttttgaagtttgtaaaaattaattgggagagaggactctccaagtgattgcaacacgcagccaggactgggaatttatgcccaaggagatatccactctttggggggagttctattactaaaataatataatgtttttcaaaatacattctttggatggagtttcctggagtttgagtgtttgtcaagcaaaatatgcctgtaatctattacagtcagcttgccattcaaaggcagtgggtctgtgggttattttgctgttcgttcttctgtgcacatattgactctcttctgggcatgaagtcatgaaatatcatgtacaccagaggacagccaagggaagatgggtggagcagcccccagttcttgggaattgggacattttcctggacctccttggtgatagaggctaaaaatgttgaaccaattacagtctcgggataaatgtgagattcattattcttctractttcttggtcccatttgttagaaaatagtgagttctctgcacctgatggtatttggtacctgagaggttttgaacaaagacttgtgaattgaatgattatttcgaaatgaatttttttgaggcttttaaagggacctagtttctgacaccagttcactggtcatgggacttcgttagtgacaaaacgaagcaaacaaaacatgattctgagaactaaaatatacaagatgagactgcttcacaaagttaacaagaaagaaaaatggtgttgttgttgttgttgttgttgtttgtttgttttcgagacagagtcttgctctgtcacccaggttggagtgcagtggcgcaatctcggctcactacaacctctgcctcctgggttcaagtgattctcctgcctcagcctcccgagtagctgggactacaggcacgtaccaccacacctgactaatttttttgtagttttagtaggaaacagggttttgccatgttggccaggctggtcttgaactcttggcctcagatgatttgtccgccttggcctcccaaagtgcagggattacaggcctgagccaccatgccctgcctagaaaaatgtttttgttattattattattatcttttgtatgtagaaggcaatggttagattttttaacattcacacttagatgtgtggggggaaatttaaaaaatgttcacacaaactcttgagtttttcacctcttagaaaagcaccagtctagctgctggccagcacctgtgctgtctggcctgggagccacatgcctaggggattggtggggagttatgccaccaccgtttaataatagaaagcaaatcagagaagggagaggagatttagaacactttcctaccacatttcttcagcattgatgttcctgtgtctttgtgtatgaaatatcaatatgttgaagttttttctgatgataaaatcagtctcggttcattataataggaaaatgcagaaacacatgtagaaaaaaatgccccacagctctaccatctggtgacctcttgaagaccagtcttagtggatgcccggggtggggaatgggggcatattgctcaggagctctgatatttagcattcattgctccatcttcagtgggtggttagggagcacctgcgctgagctgttcccaagccccatatgcacttagggcataagaggagatgcgaacaccggctgcacccaggcctggtctccagcagaaaggcccttctttcagaagcagagaggagggatgcaacacagacacattgtccctccctctcctgcaagattcaaccccacgtccctctcctctgaaaccgtgagcgccttaagtcaggcagcaatgtgtaggggaaggagcgggaggctttgggggcagaatagtgctgtgttcgaatctggctctgtcttgcacatgtttgctggctttggggtgaggcatattgcctctttgagcctcagtgttcctatctgtaaaatgggaatcaaaataagtaactcttcgtgggggtgggagaatttggggagttgtatataaagggtctagctgtttactagccacctggcacatagtatgtgcctgataatcactgacctttttttttttttttgggggggagacagagtctggctctgttgcccaggctggagtacagtggtgcgatctcagctcactgcaacctccacctcccaagggatgatcaaatcatcctcccacctcagccttctgagtagctgggactacaggcatgtgccaccatgcccggctaatttttctatttttttttttgtagagacaaggttttgcgctgttgcccaggctggtctcaaactcctgagctcaagcgatcctcctgcctcagccacccaaagtgctgggattataggtgtgagccaccatgcctggcctaatcactggctattaatagtaacgtaggcagggacttagttgtatttgtttgttcttaccaggcatttagggcatgttgtggggtggatgaatgggtggccgagtgagtgagtgagtgagtgaatgaatgactgactggggtgggtgcacagtagaaagtggtgagggtttgcataacaggctgtgctgggcctgtttggagagtggagcagccgcctggcttttgcggcaggtgctccccaagtcgagatgagtgctgcatgtttccctgggctggagaaaagccatttggcttctttttctgtcccctaaggatgagctgtgtggcccagacccttccctgtcggacgagctgatctccatcctcaacgagctcactcagctgagcaaaagcgagcactgcaaagtggccctcagagcccggcaggtagggtctcagggtgcggtccccacgatgtgcgtttccccccaccctcctatgtgtcccctaccgtgctcagccctcaccatgcacagtcccaccgtgctgccggcccstgcccgagcctctgccttctgccctgggaggttggctcacgccagcgcccccatccctccccctgcagatcctgattgcctcccacctcccctcctacgagctgcggcataaccaggtggagtccattttcctgtctgccattgacatgtacggccaccagttctgccccgagaacctcaaggtgagcccgtctccttcctttcaccatctgcagagcacacactgtggcccaggtgggggcctctggggaaacggctcctcctgccctccaggtgctcagtggggtgcagggcacagccacagatgcagacagttcagcccaatgtggccagggctgcccgaggggtcacctggggagactctaggagaggtgggcatggagcccagtcctccaggaaggacagtgtgacagcagtgggggctcacctggtgcagtttacaaacctcagccatatggagcatatctggaagctgtgagccctcctgtggctgagtcgcggcctcatcttccctattcctggactctggctcatttacatgttctcaggtaccccctcagtgcctgatgggagacctgtcccaggtgccgtcatcccggagttcttcaccagctctcctatgattaaataggggaggagcccagcgcgctgcagggcactgatcgcttttagtggtcaaagcatgacttctgcctgctcccaccgcccccactcatcagactggtgattaaaaaacttactcactggctgggcacggtggctcatgcctgtaatcccagcactcgggaggccaagactggaggaycacttaagcccaggaatttgaggccagcctgggcaacatgtgagaccctgtctctacaaaaaatagacacacaaaaaaaagagccacgatgttggcgcacgctgtagtcccagctgctcaagaggttgaggtggggagatcgcttcagcctgggagtttgaggctgcggtgagctatgatcacaccactgcactccagtttatctcaaataaaaacaaagaaaaacctgaaacttgttcacatttacttttccttgtttccccttttcatttcccttagaaattaatactttcggaaacaaccatcttcgacgtcctgcctactttcttctatcacgcaaacaaagtcgtgtgcatggcgtccttggaggtaagcaggagaggcccagagaacagcactgaccatgccagttctagtgttcactgccgctaccatgcacctgaccctaggccacatgccttggtgaatgtgatcctatccttttctcttcaaggtagctatgttaatagtcccatcttacagaggaaggaactgaggctcagagaggtcaagtgacttatgcaacgtcacacagctagaaagtggcagaaccaggttttgcattattgggtctgcctcattccagattccatgctagtyaccactgctgtctcatgtcattccagcctcttccaggcagggcacattaaatactaatccctgagagccaagtctgaggcacctcatctaaactttctgactcacgtgcattaaatacctttgaaagacttttctgcttggaactgccagagctagaggagcccaggtgacaacttaaggtgaccccctgccccccgagtgatgaggtagaagggcgtggccagtagcaaaacccagattagagccaggtgatcccaggtggtcttgctcccgggagcaagaattcaggtcttcttgaattcaggaaccaagaagtgttgtgttggttccaggaaatcagagttttaaatctgctcttttwttattattattattattattttgagactcgcttgtgcctagggtggagtgcagtggcactatctcggctcactgcagcctctgcctcctgggttcaaatgattctccttcctcagcctccccagtagctgggcctacaggcgcccaccaccacacctggctaatttttgtattgttagyagagacagggtttcaccatgttggccaggctggtctggaactcctgacctcaagtgatctgcctgcctcagcctcccaataaatctgctgcccttttagaatctttttaagaaaatatgtttttaacacggccctcttacccgggtctgctttgctggcagtagtttttccaatattctttatcttctgagctcagagtctcagtcccctgttgcccccactttctcttctgcatccttgggagcctgtgagtcacacagtgagaaggtttactgggtcttctggagaccatcttgggcttgttagcatattacagccacagggtctcctgggcctgcaacttttattcctctatgggtttcacctctggaagaatctttctcaggcctcactctttgtttctaacagggagacctaatacacctcttctgtagttactttaaacacaatttttgttttgttagagacaggtcttgccgtgttgaccaggctggacttgaactgctacgctcaagcgatcctcctgcctcaccctccccagtagcttggactacaggtgcatgccaccatgcttgacttacagttactttttaaagtgctaaatgctgtttgtgtcaattagagatttttctaggatgcttttgggtttttttatttgttttgtttttccaccacgcccagctaatttttgtatatttagtagagatggggttttgccatgtcatccaggctggcctggaattcctgggctcacgcgatccacctgccttggctccccagagtgctgggattacaggcgtgtgccaccatgcctgaccccattcttgacagggaatggtgggaaccttccccaaattcaagttccccagtgctggccaagggcaagtcttttaatggaaagcaattatgtctgctaattgctgtattagctcctgctgcccagttcccgcatttcctgttcagttgaaaagcttccagtgtttaaactccagaactgcattgtccactatggcagccaccagccacgtgtggttagtgagcacttgaactgcatccagtctaaatcgagctgtgctctaagtggaaaatacacactccattccaaagatgtagtactgtatggagaaaagaatgtaaaccatctcaataatttcttatattgattacatgttgaaatgataatatttgcatatgtggggtgaaataaaatatattattaaaattattttttatcttttttctaagtggttactagaaaatttaaaattataggccaggtgaggtggctcatgcctgtaatcccagctctttaggaggctgaggtgggagaatcactgaactcaggagttgcagaccagcctgggcaacataggaagatcctttctttactaaatataaaaaacaaaaaaaattagccaggtgtggtggtgcctgtagtcccagctacttgggaggctgaagtgggaggatcctttgagctcaggagttcaaggctgcagtgggttatgatctcaccactgtactccagcctgggtgatggagtgagaccctgtctcaaaagtaaataaataaaataaagttacatacacagcttgtgttatatttctgttggacagcactgctctaaagcagggtttgataaactatagaccatggaccatatttggcccaccacctgtttctgtaaagttttatcagaacgcggccaggtacggtggctcatgcctgtaatcccagcactttgggaggccaaggcgggcggatcacctgaggtcgggagtttgagaccagactgaccaacatggagaaaccccgtctctactaaaaatacaaaattagccaggcatggtggtgcatgcctgtaatcccagctactcaggaggctgaggcaggagaatcgcttgaacctgggaggaggaggttgtggtgagctgagatcatgccattgcactccagcctgggcaacaagaacaaaactccatctcaaaaaaaaaaaaaaaaaaaagaagaatgcagccacacccattcatttacatgttgtccacagctacgtccgtgctaacagcagaattgagtagttgcagccaagatgatatgtcccacaaagcctaaaatatttactacctatctcttacagaagtttatcaacccctgctctagagtttagagtggattttgtgtaactagtaacactctgaaatatgagcaaatttgctcttaactgctgcttagaaatctttttttttttttaattgaggaaggatttttctctgttgcccaggctgaagtgcagtggtgctatcatagctcattgcagcctcaacatcctgtgctcaagcaatcctcccacctcagcctcccgagtagctgggactacaggcgcctgccaccatgcctggctagtttttgtatttttagtagacatggggatttgccatgttgcccagactggtctcgaactcctgggttcgagtgacctacctgccctggccttccaaaatgctggattgcaggcctgagccactgcacccggcctgcttacagatagatattttagaggtcatttctggtacctgttccccgtgagtgccctcagcttttgagcacactctgcagtggcccctgagagaatgtccgtgtgtttctgccttgtcaggtttacgtgcggaggggctacatcgcctatgagttaaacagcctgcagcaccggcagctcccggacrgcacctgcgtggtagaattccagttcatgctgccgtcctcccacccaaaccggtatggagtggracacacccagggacggcctgtgtttctgttcttcctgacctctgtcgtcctgtctctggaaggacctggcaagtgtgtttgggcacgctgctggggagacatcagcgataagcacttcccctgtgggagctccctgcagcgccattttctcccctctaacatggtgataatgcagagcccacctcctacacctgcactgttcagtacagtagccatgtgtgcctatttacattaaaatgaatgcacatgggccaggcgcggtggctcatgcctgtaatcccagcactttggggggccgaggcgggcagatcacttgaggtcaggagttccagaccagcctggccaacatggtgaaaccccatctctactaaaaatacaaaaattagccgggcgtggtggcacatgcctgtaatcccagctactggggaggctgaggcaggaggatcacttgaacccgggaggcagagtgagtcagtgagctgagattgccccactgcactccagcctgggcgaagaagcgagactccgtctcaaaaaaaaaaaaaaaaagaggccaaacacagtagtggctcacacctgtaatctcagcactttgggaggctgaggtgggtggatcacaaggtcaggggttcgagaccagcctggccaacatggtgaaaccctatctctactaaaaaaaatacaaaaattagcctggcatggtggtgtgcactggtaatcccaggtacccgggaggctgagggagaactgctcgaacccgggaggcagaggttgcagtgagctgagattgcaccactacacgccagcctgggtgacagagcaagagtccatctcaaaaaaaaaaaagagaaaaaacaaagaatgcaaatgagccagccatggtggcccacacctgtaatcctagcacttcggagggctgaagggggcagatcaggaacttgaggcctggagtttgacaccagcccggccaacttggtgaaaccccatctctactaaaaatataaaaatttgccaggcgtggtggcacacccctgtaatcccaggttactcgggaggctgagggatgagaatctcttaaacctgggaggcagaggttgcagtgagccaagattgtgccactgcactccagcctgggtgacagagcgaaactctgtctcaaaaaaaaaaaaaaaaaaaattcagcttctcagtcatactgggtggctcatggctgccatattatttgacagtggagttctagaacattctgtcatggtagaaagttctagtagacaatgccacccaagccattgggaagagtcatgagataaggcacatgtagcattttagacagtgcctggcacaaaggaagttgttgactgtaagtgatcccggagatgatcatgactaacgctgttattaccatctagtggcatgccattggcctgggcactctgctcagtgctcccacactcttttatttatttattttttttgagatggagtctcgctctgttgcccaggctggagtgccagtggcacaatctcagctcccagattcaagcgattctcctgcctcagcctcccgagtagctgggactacaggcgcacaccaccatgctcggctaatttttatatttttagtagagatggggtttcatcatgtcagccaggctgatcttgaatgcctgacctcagatgatccacccgccttggcctcccaaagtgctgggattacaggcgtgagccaccgtgcccagcccacactcttattttattcagctcttatcctctatcggccaaaaatgtgttctcatcctcgttttacagatgggagccctgggccctcacctgacctaggctgagctgcttgtgcacgtggagtgggaatttgagcccaggccacactctcacctccaagtcctttccacagcattcaggggccctctgagccaggtgtgagggcacctgtcctgtctgtgtccactgtagtctgctgtccaagagctgtagttcagtagataccctcagtgttctcacctgagaatatctttttttgatttttttgagatggagtctcactctgtcacccaggctggagtgcaacggcgcgatctcagctcactgcagcctccgcctcctgggttcaagcgattctcctgcctcagcctcctgagtagctgggaccacagtcatgcaccaccaagccccactacttttttttgtaattttagtagagatggggtttcactgcattgaccaggttggtctggaactcctaacctcaaatgatctgtccacctcagcctcccaaagtgatgggatgacaggcgccaccatgcctggctcacctaaaaatatctgatgtgtctgagttcctcactcacagtctttttttcagtccatcttgtttcaggacccaaagtattaataccatttaggtcaggtagagtgggataccttctcttaaagtaattatgtctccttgggattcgaagtgttctctctcacgctccctcacccctctggttttagttcttatgggggtgcccaaggccttacctacggcggcattgatgtcattgtgatttgggagttcggttgatcagatctgtacaggcaatagggttcatgctttggtgaagcggggatttttctggcctcttaggatttttaaaataactttcttttcctgttggttttaagaagaaagatgctgctatgttttggatgaagaaaagggggcttccccacgaggcactgcctttcctagttatttgtttttacccttcttatttccaaaaataggattgtgacattttaccccattgagagaaaggggactgactgcttgcagcctggggtcattctggggatttggagagcagtggtggtgtaagatattttgtagctgtctactcctgagaaggactcttttgatttttttgtttggttgtttagagacagagtctagttctgtcacccaggctagagtgcagtggtgtgatcatagctcactacagccttgaactcctgggctcatgtgatcctcccacctcagctccctgtgtagctgggaccacaggcttgcgccaccacacctggctaattctttaaaaatatttttttgcagagatgggggtctcactatgtggcccaggttggtcttgaactcctgggttcaagtgatcctcctgcctcggcctcccaaagtgctgatattataggcgcgagcccctgtgcctggccttctcttttgatcttattgtcccagcaagtcagccctgttaggaagggaagggcggctctcctgagggctgtgggtcatgccttgtgagctacacgtatatccaggttattggttgtgattttcagtatgggcacagggtccttttttgacccagagagacattgaggaccctgggggattcctggccatctaagattctcatgattgctctcagtgccagaaatgtactctgggcctgtgaagagaccttgcctgcggctgcccccaccaaccagccctttaatgcctctgtaaagggccatgaggaataaagtctatccccaagatggcctggcttggccctcaacacttgtgtgtgtagagccaggcacatggtgctttaggtcaccgagacccaagggaaggtcagatgagaagttggcagggctttgtgccagctgcagcctggacctggacctctgtgctgggtgggaactggctacatccccctgcgatggggctgctgtcctagctctgcccactgttgccctgcaggaaactgaccatcacaaccagacttctccatgattttttccagcagaagcaggaaatctatttttttttaacctgaagtccttccatttttcaatggggacaggtaattcatgttaaatgaatacatgaacacatgttaattcatgtatgttattaaaatgctgcatggaccaaagtcattctgtgagtggcattcagccacactgccactgcaagtttgtgacccctggattgagctgtcggggagcagaggggccatgatcgtgatttcagagcacccaacaggaatgcacacacctgtgtcagggtccccaaaagcacccccaggttcgatcatcgcctaggagaactcacaggtctcgggacatagtcatgcttatagctctgacttattagggggcaaggatacaaagcagttagccaaggcagaaggcatcagggtgaagtccagaggaaagcaggtgtgctgccagggtcctctcccagtggattcacgcagggtgcacttcattcccccagcaaggagttgtgacaacacaagtgaagggttgtcttccagccccgcaccagggattggtggctggtcacatcaccctctgctctgcatcgaaatctcaggcttgcagaagaaagcaggtgttcagcataaaccacactgtttgtgcaaacagttgaggcacagtgagccccccttgtcaccttcagggaacgataggaaccttccccaagtccaagttcccagaggccagccaagggctgtccttgcaagcaagcaggtctcctttctcagaagagcagtgtggggcctgctgtgctgacttcctgcacaccatttcattacccctcccgtatctgattccaaggcccaattctaacaacctcaggtggcccattgagatttgctgctggtgagcagccagttctgggagcatcgttgtctaaactccagaaggctgctgactttgtcccaagggcaagtttgatggagggattacagggagcagaggactggagtgtccgtcaggaccaagcctgactgcctcaccagctgcctggggctggtggatttctccaggagaaattgatgctgggagtgtttcttctctgtggtcaagttcagcacttggggctcccctcgggactgtgttgagactggactctcatgcatgaatcattgattcctacacttgttgagctcttactcttcaccaggtcctgagggatcagatgagaccctcctcaggccccggccccagccattgtctcatcccctgcccattttaagcccccatttggaagagctctaaatctggtccagctcactgaagcttcaggagtaggagcagctcgtagagttgggtctgcaagcagctgcctcatccccgacttgccatcaccytacaggatgaccgtgcccatcagcatcaccaaccctgacctgctgaggcacagcacagagctcttcatggacagcggcttctccccactgtgccagcgcatgggagccatggtagccttcaggagattcgaggacttcaccaggtacccagcatggcccggtctccaacaccctgagcatgggggctgsgcagacttcccttgaatccccccccaattcactggacagatggggtgggagagacccagacaygtggcacagcatgtcaataacaacagaataataatagcattgtagccaagagtatgagcctacatgtcagcttgcctggcacagcacatcaataacaacagaataataagagcatcgtagccaagagtgtgagcctgcgtgtcagcttgcctggtttgaattctggctatgtgctttctaactaagagactgagcaaaatatttttacctctccataccttcgttttcttatctgtaaaatgggaataataaaggactcacttcataggtgcgccatgagaattaaatgagataacatatgtgaaataacatatttaaagtataattagtatgcagataatatagtgactaaatgttagctctcaatagttactgttatagtcttttttcagcctttcactgtgtgttctgctttgtgcttggagtatcttgtggaattttcacaacagcctcatgaggcatagggattactcttattacctttctttgactcggggtgaggtgaggtttctaggatctcccagccagtaaaaatgggagccaagagttgatctcaagcccagctgatgcctgaaagcgctggaatccttccctgtattcctgatcacagatcacttaggttcattcttcccttttgggaaggaccccatcacgggtgctctggacaaagtagacagggaacctcctgagctctgtagagttggataagatcaaagggtgttggctgggaaattgggagggtctggcgttccctgctgcctggcttggaagcttgacctcatccccatgggtcagcagcccctcagccctccctctctacccgcacccccagaaattttgatgaagtcatctcttgcttcgccaacgtgcccaaagacacccccctcttcagcgaggcccgcacctccctatactccgaggatgactgcaaggtaagcgtctaagcccagggagcaacctggggagcaggtgggccgtggyccccaggctttccagccctaycccttgcttctccctmtcagagcctcagagaagagcccatccacattctgaatgtgtccatccagtgtgcagaccacctggaggatgaggcactggtgccgattttacggacattcgtacagtccaaggtactctgggcgtgcctctggttttggtgggggttcttggagaaggaggaggggctgggctcgtcgaggcggcccttggggaggcaggcgtgctgagtacttcagagccacagacctggcttcccactctagctctgctcgcctcatagctggcgaccttgggcagatgtggctgaacgtggggtcagcatttctctcrctcacggtgttgcaatgattcaatgacaaagtatatacacggcttagccagtcccaggtacggagggcacacccaataaatagtttggagattttctgggagtgtttttgttggaataatccagaaactggcagttttaaaatggctacttacattgatgaccaagtgtgccaataacagcaggttgctctgtaagcctgtgatgccattgtatttcagcctgggggacagagcgagaccctgtctcaaaaaaaattatatatatttacagtatacaatgtgatattttttaattatctttttaataacagctttattgagacatcattgacatactacacaattcacccatttaaagtgtgcagttttgcagccataaaaaagaatgagatcatgtcctttgcggggacatggatgaagctggaagccatcatcctcagcaaactaacacaagaacagaaaaccaaacaccgcatgtgctcactcataagtgggagctgaacattgagaacacatgggcagagggagggtaacaacgcacaccggggcctgtcggggggtgggggcygaggggagggaacttagaggacaggtcggtaggtgcagcaaaccaccatggcacatatatacctgtgtaacaagcctgcacgttctgcacatgtatcctgtttttttttttagaagaaataagaaaaaaagtgtacaatttaatatatttttagtatattcaccaggttgtacaaccatcaccagaatcaattttaggacattctcatcactccatagaaaaaccctgtacctgttagcagtcactcccctctgtccccaacccaaaaaccctctccccaccacagccctaggcaaccactaatctactttctctctatatagatttgcctatkctggacgtttcatataaatggaatcagatcacaggaggtctcttatgattgacatcttccacttagcataatgtttacaggttcatccgtgtggtaacatgcagcaatacttcagttccttttacggccaaataatattccattgtgtctttggtttttaatgcagaaaaatatccttgtggattatggactccgacgaatcacattcttgattgcccaagaggttagttcacagttcatctctatgagtctttcccattctccaagccttggtgtgtgccatttatttgatatttattttgtagatttgggtgaaagagatcattagaaaggagaaggatttccaaatgattcattctagaagtgaatgtaatcgtttacaatcactaaataaggatgtacatatttcagtgcgtcttgcttgatttaattgtcttgtgtgtggatttctttttgcagaaagaatttcccaagtttttcacattcagagcaagagatgaggtatggccaaaagtaatgatgttttctcttctctagcatcttgttttattttttaagagatgggatggggccgggtgtggtggctcaagcccgtaatcctagcactttgggaggctgaggcaggaggtttgctagagctcaggagttctagaccagcctgggttatatagtgagaccctgtctctacaaaaaaattaaaaaatcagcctggcattgtgatgcaagcctgtggtcccagctacttgggaggctgaggtgggaggattgcttgaacctgggaaatagaggtttcagtgagccaaggtgattccactgcactctagcctgggtgacagagtgagactctgtctcaaaaaaaaggaaaaaaaagagatggggtctcactatgttgcccaggctggactcgaacttatggctcaagcgattctcttgcttcagcctcccgaatagctgggactataggcacatgccaccgtgcctcccagctccctggcatctttgatattcatgaagaatatagtctgcagtccttaaggcatccccatattcaagaatgtagcaacttttgtgtagactgcagtcttcctctgggattgtatttccattgagagccctctgttccctgcatggcactcagacctgagaatcttgccctttcagcctcactacaggtttctgtcttgcttgaataattttcagtacttgctgatgtactcagtaagacattttttccaaactgtttttcttatgctcgtctagaacagtggttggcaaactcacttgcagaccagctgcctgtttttacgaataaagttttattggaacacagccacacccgttggattccacattgtctactctggctttcactctaacagtagcagaattgagtagttgtgacagagcccgtatgatccatcagcctaaaacatttactctctggccatttaagaaaacgtttaccgatccctgttgtagaacaggtaggtttattcccagcactgattcaagaccccaccaaattcagcattttgcattttaatttatccaaagctttatttttctagctaagacacatccttttcttaatgtcttcattttttttttcagtttagtttccagtactgtcagttgctttcttttcsgggaccaatttccaccaagaaaccaggggttagtggcttcatgagaattgccacaggctgtgacagatggagaacagcctggtcacgctggcaggtgatagggactagctaggttcccccaggagccagcgctgcacccagcacaacaggcttgcaatgcccatagctctcctcagatcttagcaaaaccccaaatatctggagccctgggggtagcttacaattagggaacatcatgaatgctgcattcctgagtgccaaacccatggacaccaggggtctgcagagtagggtgtggaccaagcagggacgcagctccaacgtcacgctgtgtgtgtatgtgtctgtcttctctctctggtccgcctacagtttgcagaagatcgcatttaccgtcacttggaacctgccctggccttccagctggaactyaaccggatgcgtaacttcgatctgaccgccgtgccctgtgccaaccacaagatgcacctttacctgggtgctgccaaggtgaaggaaggtgtggaagtgacggaccataggttcttcatccgcgccatcatcaggcactctgacctgatcacaaaggtaagatgtcgcagagcatttcttcctctctcagaacctggccctcccttccttacattcctgctctgtgctgggtcctgggctgcatgctggggatggagagtacaccaacacccagggtcctgcccttgctatgctccagtccagggcaggaggcggacagcaaagtggcctgtgatcacgtccaggctggtggcacttggatctgtttcttgtattatgtgggtctctgcgcatgagaagaaaatttccaggatagaaaaatactggtttgttcagggaatttcttaatatttgctgactgagtgatcgttttccattgtttcttgcatttagaaaagtaatccatggccgggtgcagtgacccatgcctgtaatcccagtactttgggaggctgaggtgggcggatcacttgaggtcaggggttcaaaaccagcctggccaacatggtgaaaccctgtgtctactaaaaatacaaaaattacctgggcgtggtggcgtacacctgtaattccagctactcaggaggccgaggcatgagaatcgcttgaacctgagaggcggaggttgcagtgagctgagatggagcccttgtacttcagcctgggggatagagtgagaccctatcacaaaaaaaaaaaaaaaagaaaaaaagaaacagaagtaatccatgattatattgtgaaaattttaaataagactgaaaacgatttttaagaacctagcgcaaggaccgagaatcctgtcactgaggggccagcttagttgttgactgtttctagacacaattccgtccctgaaacctagagttgtaggcataagttgcagataagagctgagagtggacagatcatttgaatatattattctttaattggtcagtcacttgtggacctctttcattgttaataaagagtggtccaccacatattatttccttgcatggatgtaccgtgtataattttttttttttttttactaatcccctattgatggaaacatatatatattattatatatataattatatataataatatatataatatattatataatataacatataatatacataatataatatataatatgttatataacattatatatacataatataatacatattatatgtatttatataaatatatatttatataaatgtatatataattattatatatatatwtttttttggagatggagttttgctcttgttgcccaggctggagtgcaatggcacaatctcagttcactgcaacctccgcacccccgggttcaaacaattctcctgcctcagccttctgagtagctaggactacaggcacaccccaccatgcccagctaattttgtatttttagtagagatggggtttctccatgttggtcaggctggtctgaaactgccgacctcaggtgatctgcccacttcggcctcccaaagtgctgggattacaggcgtgagccaccacgcctggccctattgatggatattaagctaactgcagtttttttgctacctgtcagctagatgttttatttttattttgatacagagatttgctcttgtcacccaggctggagtgcagtggcgtgatcttggctcactaccacctctgcctcccgggttcaagcgattctcctgcgtcagcttcctaagtagctgggattataggcgcccaccaccatgcccagctaatttttgtatttttagtagagacggagtttcaccatgttggccaggctggtctcgaactcctgacaactgatccacccatctcggcctcccaaagtgctgggattataggcgtgagccactgtgcctggccaagccgttttaataggttttattattgttgaggtatggtgaggccaacagataaggagacaactgccatcaaaaagacagtttattactcatagttcccaagaagaaggggttttccctgccatggggccacatggggaggctctggggttggtcaggcagcagagggacagaggggaagacatggaagacgtggacgagagccttgattgtggtttcctggagaagaaaaaagtgaggctgagtaaacaggtttaggattggctgtgaatcatctcagcagaccctggcatatagaagctgtctctggttctcaggaatctggccctgggtgattagagcaggtggtttgtgtccccaggtatgatccagggtcagcaaggccccaggtgtcaaagtgtcagaatgcagaaaataggacacatgtcaatacactcaacagctttgcagtcccttcgcctctgagaggcagggctctgctgttcttgcctggcacactttttggaggaggggaatgttttcctcctgtctctgcctctttggggctgagtttccagccagctgggagtaggcctgcacccctggcctgagcagctgcccctcccactctttggcaggaagcctccttcgaatacctgcagaacgagggtgagcggctgctcctggaggccatggacgagctggaggtggcgttcaataacaccagcgtgcgcaccgactgcaaccacatcttcctcaacttcgtgcccactgtcatcatggaccccttcaaggtctcgcctttgcaggggggctctcaccgggctctgggttcaccctctgagccatgctgctttggggtattgtctcttgccactcaagacctgggttccaggatgaaaccatgcgtatctgagcctcagttgctgcgggaggagagcaaaccttctgccattcaattctagagctatgttttagccatgccctgcacgggaatgctttactttaaggatgacaagcatgctcaaaatgtctttcaaaacaaaattttgtcctttccctggttccaggctgcgctggggactgcatgtgggtggggagagacgtgagaccgtgaggtctgtggctgaatgttccctgtcaggtggctcttcacgagcagacagacttttatggtggtgattctggaatgaaagaagccccacttgtaatcccagtactttgggaggctgaggtgggtagattgcttgagcccaggaatttgagacaagcctgggcaacatggagagaccctatctctactaaaaattttaaaaattaaaaaataaaatattaagattattaatcaaattaatattaatatcgatatattaatattattaaaatatataaatgtattttattttattatttaataatatatattattaaaaataattaatacaatagtattattaaaaagagaagtcctgatacatccgtttggtatctgggggattcaggggacccatgtggaggctctggcctcactagttcaggtagttccagaaggaagcagtgcaatggcttgagtcaaaggcatgtaaagatagtataacatagcagtactagttcagtcacttatcagcctcagtttccttatctgtcagtgagggattagaaaagctcgcctctcttgagtacttacgaaggcaaaatgaggtagagttttaaatgcttagcaagagccgttgcttgttattagttaatactttttgttggatacacactatgtcccaggcgtttttgcagtcagtatatctcatcctcttattagtatcagtgctattgcaaatgtccttgggatgtcttggccctgaaactggaattgctgtgttttggggcagatcgaggagtccgtgcgctacatggttatgcgctacggcagccggctgtggaaactccgtgtgctacaggctgaggtcaagatcaacatccgccagaccaccaccggcagtgccgttcccatccgcctgttcatcaccaatgagtcgggctactacctggacatcagcctctacaaagaagtgactgactccagatctggaaatgtaaggctggcccgcgccgtgggggtctaagtcaaagcagaagcaggctkcttgggccatcaatttgtagattaagatggcatttggaggcggtcttgccttgctctcccatgtcattctgggttggggtagccccctctgagtgttatgttaaatgtgttagcctttgaatcttggtttttcactcacctaaaaaggagagtgaatctccaagtttaatccattctgtggccatgttggatttttgatagagacaaggtgtcaccatattggccaggctggtctcgaattcctgacttcaagtgatctgcccgcctcgacctccaaagtgctgggattataggcgtgagccaccacgcctggccatatggccatatttgggataagttgtgcactactgtggttgactgtaatgcagtcctcagattggttcacttagggaaatactttcccaaccatgttctaggacagacttttgtaaagtgaattaaatgttcttttgactgccatttaaattcctatgtgtgtacataaaaatatacatatatatacacgccattttttaaagagatattgcctagactgggcctgaactcctgggttcaagcaatcttctggcctcagcctcccaagtagctgggactacaggcacatgccattgtgcctggtctatgcactttttattttggagtaattgaagactgaagactctcaagcagttgcaaaattagtacagaagaaaaaaaatagtgcagaggattttcacccagtttcccccaatggtaatgttgattgaacttcaccattgcacatcattaaaacaggaaattgacattggcacaggactgttcgcaccaacactgaccacgttcggatttcaccagcgtttccatgcatgcctgttgttgggagtgtgwgatgccttgatcactgtatttttggaactgcattccacagcccctgttgtcccttcttgttctggccctccacagtggtgaagaagggagttttacrtagcccaggcactcactttgtcatgccatgtgacatgctttgcttcccccacctgcattttcattgaggactgggcagaaataaattgggggagatgtgtgattctctctcactckctgttttcccycctttctggtccagatcatgtttcactccttcggcaacaagcaagggcsccagcacgggatgctgatcaatactscctacgtcaccaaggatctgctccaggccaagcgattccaggcccagaccctgggaaccacctacatctatgacttcccggaaatgttcaggcaggcaagtccggcggctcagacgcggtaccccctgggtcctcccagcagactccaccagaaccaaagcccatccttaattctccttctaaagacctagtctaaaggacaaggtcttgccaggtgcggtggctcacgcctataatcccagcacttcgggaggccgaggagggaggattgcttgagcccaggagttgaagaaccccatctctacaaaatatacaaaaattaaccgggcgtggtggcgcatgcctgtagtcccagctacttgaaggctgaggcaggaaggatcacctgagcctgggaggtcgaggctgcagtgagccatgatgtcaccactgcactccaggctgggtgaccgagtgagaccccgtcttcaaaaaaaaagaacaaggtctgcattgaagaaaaagaaatgaatgtgttgagaacgacttcatagtatttttctccaaataagactaatttatcccaatgataaaagtcataggatatagaaacttcagaaaataaaggaggttggaacaaagaaaaaataattcctagtcccacactctgatgacaaattgcttaacattttgatgtgtttccttctggtctttttaatggtcatttattaagtacctgctacttaccaggcaccattcgaagtctagacagctgtgggaaagaggagggggtcactgccttgagtaatttttagtctactcttaaaaaataatgttttgggttgggcacagtggctcacgcctgtaatcccagcactttgggaggctgaggcaggtggatcatttgaggtcaggagtttaagaccagcctggccaacatggtgaaaccccatctctactaaaaatacgaaaattaaccaggcgtagtggcaggcacctgtagtcccagctactcgggaggctgaggcaggagaattgcttgaacccgggaggtggaggctgcagtgagctgagatggccccactgcactctagccctggtgacagagcgagactctgtctcaaaaacaaaaacaaaaacaaaaaaataatgttttattatgtttttctgatgattaaagtatacataggaaactatggaaaggtaagaataaggaagtaaaattctattcatatgtaattttcccaccatcaatgcctgaaagaacatttgggtgcattttcttcaagtattttttatgcctttatatgtttatgccctaggggctttaaaggagcctgaaccactgacattggtgatgtgaatgtctcttcattttccaggattgctttggaatgacattatatatatatatatwttatttatttatttatttattatactttaagttctagggtacatgtgcacaatgtgcaggtttgttacatatgtatacatgtgccatgttggtatgggatctaattaaactaaagagcttctgcacagcaaaagaaactaccattagagtgaacaggcagcctacagaatgggagaaaatttttgcaatctactcatctgacaaagggctaatatccagaatctacaaagaacgcaaacaaatttacaagaaaaacaacaaccccatcaacaagtgaatgacgttcatgaaaccaaggtcaaggaccttccagtgtaggcaggaagcatctgttcctacctctgcctatgcctcatgcatagaggatatgaaagagtaggaaaagctgctctttagagtaactcgggcctcagctcgaatgctggatctgtccccttgcttcctgctgtccctagccaagttccttcacctctctgggcctcagtttcctcttctgtaaaataagaataataacagtacctaccaaaagttgttggaaaagtgtatgtattcagtgggcgcttaataagtggaaacttatgattaagaatgtcattgtctgtatccttttgcctttgacctcaagagctataagggaagaaacatgactgaaccagaagcaaatccatcgtctcttttttagataaatccattgtctcttttttacaggcatgagccaccatgcctggctaatttttttatttatagtggagacagggtttcactatgttggccaggctggtctcaaactcccggcctcaggtgatctgcctgcctcagcctcccgaagtgtttggattacaggcatgagccaccacacccagctgtctgtctgtctgtctgcctctatatctatatctatgtctatatctatctatttatctatctatctatcgagagaatggaaaactgaacagcagaccagagctaaatttatcaatatggataaatctctcaaacaaagaggagtagaaaaagtaatttgctgccgggcgtggtggctcacgcctgtaatcccagcactttgggaggctatggtgggtggatcacctgaggtcaggaatttgagactagcctgaccaacatggagaaaccctgtctctactaaaaatacaaaattagccaggtgtggtggtgcctcaacccgggaggttgaggcaggagaatcactgaatccgggaggcagaggttgcrgtgagctgagattgcgccattgcactccagcctgggcaacaagagaaaaaaaaaatagaaaaagtaatttgcggaaggatgtgtacagtgtggtactctttatttaaagtttgcagtgcaaaacgataytgtatgtttccaatgtatgcatacaggataaaggaaaatgaaaaaaaaagcatgcataggactgggtaggcactgaattcaagggaatggtcacctgtgggttggagttgggaggaagaatgagctggggcttcaatcgcatctttcttctttctttcaaaaactttaaacaactatggaaaaatcaagatttgacagagccactggatgggtgctcatatttaaatatgctttaaatatttcatgattcaaaaagagagagtgaactacagaattcaccctggaatcatgacagatcatctctgtctgggaaagatagttcttccctactgatgacttcaagttttttctctttcctcttctctccccaggctctctttaaactgtggggctccccagacaagtatcccaaagacatcctgacatacactgaattagtgttggactctcagggccagctggtggagatgaaccgacttcctggtggaaatgaggtaatagctcagcggagcctarcccctggctggagtcacccccttaaaaatatttttgggccaggtgcagtagctcacacctgtaatcccagtgctttgggaggccaaggtgggtggatcacttgaggtcagaagttcaagrccagcctgggctacatggtgagaacctgtctctacataaaattttaaaattagctgtgtgtggtggtgtgctcctatagtcccagctactcgagagactgaggcaggagtgattgcttaagcccagaaagttgaggctgcaatgagctgtgattgcaccactgcactctggcctgcgcaacagagcaagaccctgtatctaaaaaaaataataataactaaaataaaataaaaagttttcccccaaagaaacaaactcattttccttgtrcattcatccccttgccaggtgggcatggtggccttcaaaatgaggtttaagacccaggagtacccggaaggacgggatgtgatcgtcatcggcaatgacatcacctttcgcattggatcctttggccctggagaggaccttctgtacctgcgggcatccragatggcccgggcagagggcattcccaaaatttacgtggcagccaacagtggcgcccgtattggcatggcagaggagatcaaacacatgttccacgtggcttgggtggacccagaagacccccacaaagtaygtcgtgaaactggcggggcagggtgattctgctcagctactactgtattttcagtgggagtgctagcacctgcaagaggtgaaaaaaatctcacttatgtataaagcacagatgtacatgtagtgtataaacaggcatacagtgtatcagtgatactaacatttcactgtggcgggggggatggtgatgagaaaaaaaagatctaaaaaggctccttaacggggataatgaaaaaagtctataaaccctgagctgatatacactgagcgctcctgaatgcagtgtgcactgagaatgcagaggtgattgtgtcaactccctggcctcatagcgttcttagaattatggctcacacctgtcatcccagcaactcaggaggcttgggtgggaggatagcttgaagccaggaattcatgaccaagctaggtaacctaggcagcatagccagacttcgtctctactaatgaaaaaactaggtgagcatgatggtgcctgcctgtagtcagcctcagctacttgggaagttgaagtgggaggatcacttggagcccaggagttcaaggctgcagtgagccatgatcatcataccactgcactccagactgggcaactgagtgagaccccccatctcaaaaaaaaagaaaaatctttggggagttgtatagataccagcttgccataaaaggcaagatgaatgagggaagcgcacgcattctgtgatgtgaaatgacaggggacagtcatcctttccattcagagcatgcattctcgggggcgatattgcccactacccccaagaagacagaaaaataatttttggggtggcaataaaataktttttaacatatatacatatacrgagtatgtaaatagtggttaaacagtgtatcttgaaaattaaaatttcatgttggggtgctggcaataagaaataaaaatgagatagtccttagaggagagcttagctcaaagcagaacttcagtttatggctgttattaatacggtatttacatgagatgtgttaatgtgtcattgacatgttactaacatgttattaacatccatccctacratgttcacattaagaaaaaaaaaacagtggctttcagtgcagggaactggattcgtagcctcactaaagtattttttaagggatttaaatacctgtacctgactccccaagactacaccagaatcagctccctgaactccgtccactgtaaacacatcgaggaaggaggagagtccaggtaaataacttatcaggtagctccttarttttgctcrtggttaatttcagctgtcttctttcctcggggcttgtggcgatattttccagtggggtggtggtgtttgtatgatgggaaccaatgcctgttgggggcactgatgccttaaacatttgttaaactctccaaggtgagtccatccttgtcattctaaaatgagtgactcctttcacaaaaaatagcacgtcatgtagggagaatgagattggattctcgtgaatctcctaggagccgcaggctcacattttgtgaccaaactgatgcagcggtgacttggcaaactgggaaggtatgggtggggcagagagaggtctgttcttcgagagcattcaaaggctactatcttttccaggacaagttatgtttttctcagtgggattaactgactcaggatttcctagactgggttttttgcaatgttagtgacaagctggggggaaattccatagtcagatgagtttgggaaacactgggttaaatgagatctcataaacatctttattgcagaccttcttagtacctgtagcatgctgtattagtcagcgttctccagagggacaggactagtaggatatatgtatatatgaaagggactttattaaggagaattgactcacatgatcataaggtgaagtcccatgataggctgtctgcaagctgaggagcaaggaagccagtagtggctcggtctgagtctaaaagcctcaaaagtagggaagccaatagtgcagccttcagtggccaaaggcctgagggcccctggcaaaccactggcgtgagtccaagagtccaaaggccgaagaacctggagtctgatgtttgagggcaggaagcttccagcatgtgagaaagatgaaagccagaagactcagcaaggcagcttactccaccttctttcacctgctttttctagccgcgctggcagctggatgactggatggtgcgcacccacattgaggatgggtcttcctctcccagtccactgactcaaatgttaatctcctctagcaacaccctcaaagacacacccagaaacagtactttgcatcctaaagttgacacttaatattaaccatcacacatgctaaagtgcattgtgaatctctaacagaggctggcgggacagtgtttctcattatgtggccctggaatttttgattgattgattgtgaaygggtttcctctgtgtacccccatctctctgtagaccgttggaggaatatgggccgagggtsatatttcactgagacagcccctgaacaggcagatatctttggttgtataaaccaaaaagtatctgagacaggtctcaatcaattgagaagtttattttgccaaggttagggacacatccagaagcaaagaacacggaatcatagaaaccgtctgtggcgtgtrcctttcttcaaagatgatttggagggcttcagtatttaaaggagaaaagcaggctggaggggaaagagggaagttctggtaatcacatgttgcaggagaaaaggcgcaggcaggggaagtcagttatgtattcttcctgcgctcagtaagtcagcactttctataagataaggtggacatagaggaactacctgtggagatatttcagcttttatctgtatctatctgcttactaaagaaacaaaaggaaaggcagcttgcacaactcagcttcagcttaaattgttccttttggcattgtgaatcgtggtcctagtttttattttcctttcacagatgggagcagtgtgatgatttatttatttatttgagacagaatcccgctctgtcacccaggctggagtgcagtggtgtaatcttggctcactgcaacctccacttcccaggttcaagcgattcttctgcctcagcttcccaagtagctgggattacaggcgtgcaccaccacgcccagctaacttttgtatttttagtagagatggggtttcgccatattggccaggctggtctcaaactcctgacctcaagtaatctgcccgcctcgtcctcccaaactgctgggattacagagcagggtgatgattgttgatgctgcacttgcccttttagaaatcttagcactcattttgagggttctagatgccaatttcattttgcctctggatgctttgtctgcttccaatctctcaccttgctgcccagtcagtcccttcttgggaaatgcatccaccttggattttttggggctagagcccagcctttaacctgtgcttgcttttgaagatacatgatcacggatatcatcrggaaggatgatggcttgggcgtggagaatctgaggggctcaggcatgattgctggggagtcctctctggcttacgaagagatcgtcaccattagcttggtgagtcttcttctattttctcttacttttcaactttccattatagaaactttaaaattgtcacaaaattagagagaatcaataataagccccatgtgcccgtcacatacctcctacagttaccacatgccagcccactgatatttcctcaatctcacccccatcccctgcacctgttttagagtattttaaagccagcccccatcatgtcttttcatccataaatacgtaagggtagatctttaacagataatgactctcaccctcttcccccrgtttttaaaaacataactgaaatactaatattacacccaacagaatcagcaatatcattgaaacccagtgtggtttaacagttatctcaaaatacccttttctagtggtttgtttgaatcagggtccaatctcatcttattttcaaggtactgaatgtttagaagaacttttctctgactttaactggcatataaggagtagtccccatcccatccccatggcctttccaaaaatgttttctgtttctagtagtagtactactgtagtagtagtagtagtactagtagtaattctagtactagcagtggtggtagtagtggtggtggtagtagtagtagtggtagtagtgtttgtggtggtgaatctgtatgggtctaaggcagagtgagagaccgaggcaagtytctcagcaggagtgaaagtttattaaaaagttttaaagcaagaatgaaatgaagtacacttggaagagggccaaacaaggcaacctgagagatccaagtgcctcatccaacccttttgaggttttatgcattggcatgattccagggtttgtgtttcttctcccctgattcttcccttggggtgggctgtctgcatgcacgtggtctgccagcacttaggaggggccgcatgaacagtgtgtttactgaagttgtgtgcatgctcacttgaggctttcctcctttaccagtcgagtgttcctagaagaagggcacggtaccagataaactctgccatcttacctcttagcatgcatgcttgagcccacccacccagctcctgagatcttatggggaagctgcttatcactagcttcaggtgttttctatctatcaggagattgcctttccctggagscagctgtgaccaatattaattttagagagacactttagcaactgcctaactatcacctgatggttgccttcctctcctgccctgctcatgtctgcttaactacctactctaacagcagcagcagcaggaataatagtactctttaatgataaactgccttggaaggccttatttgtacatgcaatgttgaatcttcagtttccaagtggaaaatgttggtcataagcatcttccttgggcttgttttctagattatatgtatagtctttttattttgaagtcatctaggacccaccgtaagttataagatactacagagaatttccaagtacccttcacccagcttyccctatggtacttacataaccgtagtacattatcgaaaccaggaaactgacattggcacaatattgttaactcagtacagaccttattttgaatttcaccagtttttacatgcactcctaggtgtccttttggttgttaagaggctgcaatggcccatgaatgcccaggctcagaagagctgcacacaagcctcttaaaatctgaaacattcactgtctgctgcttgtctttacagcaatctttgttaaccatgttatttccagataggaatccaagctcaataaagtggcctgaagaataggcttttgcctctactgtggtttggctccaaatygggttgccattggtcaaaacataacttccatttggtcccagcaggttcctggactcttccctgctgtggggggtgggtccctcgccactctccagaattcagagggggtcctctctccacaggtgacctgccgagccattgggattggggcctacttggtgaggctgggccagcgagtgatccaggtggagaattcccacatcatcctcacaggagcaagtgctctcaacaaggtgaccaaaaaggggcctgtgcagagtggatccttgggggccaggagtcattttaacattcccattggtctctggtgggggatttttctcaatatgaagccagtttcattcctactgatacaagagctctttttttccaatttgcagctatctgggtccttatgagaaaaaaaaaattagttttaggcaattctggtcgatctaactccctgtattactgacattttaaaacaaattattgaagtgccattacacattgcagaaaattagaaaaggaaccccccaaaaaagtaattttgcagcttctatcattctggtatagttccctctcatcttctgtctttatgtggttwatttatagtgaatatgcagttttgtattctacttttttcactgtattaaaacattttccttgttgaaaagtctctatacttaatgtctgctcaaatctcagccaaagtctcaaagcctggttcttgaaccaacagcatcagcatcagatgggaacttgtcagaaatgcacatcctcaagccctgctgcagacctgctgaatcagaaacactagctagggttttgcttttgagatggtcaaggtagaagtcagctgcatcaccagttctcaaattggcctgcatattggaattatctagaaactaaaaaacaaacaaaacacaaaaactaattcctcgaagattctgatataattggtctggatgtagcctgagcatcaggatttgtgaaatctcctgggtgattctaatgtgtagccaggattgagaagcactgagatgatttccaaacaggtggtagagccctgcaccgtgcaggacattgctaaccatgttgtgtcaaagcaggtcctgggaagagaggtctacacatccaacaaccagctgggtggcgttcagatcatgcattacaatggtgtctcccacatcaccgtgccagatgactttgagggggtttataccatcctggagtggctgtcctatatgccaaaggtgcagtactccccctgcagcttagaacctggaaractcttattaagctcattggctaattctgtccctgtcacctcctgggtggtgtgggaggctgaggagcaggaagcactgcacatgtggctggggttgatttttcttactccttcttccttctctgatgcccagccctgtactaggtgtcctttgctcttttggtggcactaatgccattgtaaggatgctatctgttaatcctttagaaagaggtagtattgcctcttgacaagaggcagcattggacaatactgagtctttaagctttacagtcaggctggatttgattcctgccttcctcctcggtagctgtaagacactgggagagtccctaagtttttctgagcctgtttcctcatctgtgaaatgagaataataatagcacctaactcatggtgttatcatgatgattaagtgaagtgatatttaaagcacaacgtttggtaggtcctcaccaaagtaagaaggggacaatcgtgggcacagttcttggttaactgtaacattccttacaaatgagtgaggttgtcattcttcattataaccatttctgagaggttgggtttacagagttcaggtcattccagatcttctgccaagaaccccaagtcacaaatgtcagtttgtattcccaagtgccccttttccccatctgcatgccatctgttaccaytctctgcaaccaatctctttttctttcttttaagatgtttttcctcctatctgaccatatatagcagtagcaaccctttcctgcgtttctgtaacttcccagcatcagtgacaccatctgaaccgggaagcacactcaggagttcataaactagatttcagaagaatccatgggatggccagtccttatctggcattttccaatcagagcagtggcttcaggagccctagggaggggatattgctgcataaccaggcataatcatagtcagaggagcaaagtgctgatcagaggtattattgacaagcaccacagactragtcagagacttggctttcttttttaggataatcacagccctgtccctatcatcacacccaytgaccccattgacagagaaattgaattcctcccatccagagctccctacgacccccggtggatgcttgcaggaaggcctcacccaagtaagttctaaagtattttgcctaggacctggtctcgggtttctttctagggcttgagacaaaggagcactttgtctcaagcgcttgagacaaaggcttgatattcgttctcatatcccagagaggtatacctgaaatcaaatgcagggaaagtagagaaatggagattttactctaggcttttcctgagccattgaccaagaaggggtggaaacagcctccagtttctggagctaatagatggaggtggggtgcaatggtggtcctggtctccctcccctgatgctccatgctccgtggtctctaactgccccactgtctcatcagtagaaaattcagtgctgaaacatcagagtttcaaagagaagactgcatctttctctttctttctctcttacaaaggaactctgtgagtttacacaggataggcaatctggtctcctcttctttttttttttttgagacagtgttgctctgtcgcccaggctggagtgcagtggcgcgatcttggcttactgcaatctctacctcctgggttcaagtgattctcctgactcagtctaccgagtagctgggattacaggtgcctgccaccacacccagctaatttttgtatttttagtagaggcggagtttcaccatgttggccaggctggtcttgaacacgtgacctcaagtgatctgcctgcctcagcctcccaaagtgctggaattacagacatgagccaccatgcctggccaattttacctcttctatacctacacacacacacacacacacacgcacgtggacacgtgaacacacatgcacatgcacacacatttttgcacacacacattctctctctgaaagggatgagtttctctcttggaggtatattatttcagtctgagcaaccagaacacaacaggaaagttgagctgctcccgtcactatatcccaaatctagaatttcacatgctgctacctttagacttggctgctccttggctgtgcaatgcaggagaggtgaccctcgggagtgtgctagactccagccagtgcaaggagtcctgtggcttccttctcttgcttttcatttctcttgggctttctggcctgtaaacactgagggggctgcttatctcaattaaaaaatgttcggcttctcactgtcaggccagtcctcggcagatgctgaagctgtgctgttgcatgcctgggtgccgggcctcccatgcctgagatgcctcttactctggctgccccctcctggtcagagccacagccatttacgctgttgcatggatttaagtcatcatttcttccccaccaatggctgtcattgacatcatcatattctctctctgtctctctgggaaattgaaacttttttcccaattaagtggttatgaagctgcagccagcagctagcaggtgagggatgagtttttcgggaaaggtggtcccttcctaaaatcccaccttctggaggtgtctgtccactctctgcatcttaggaagagaaggcagagaccatgattagaatctatgtgtttggagttggctggctgttgatggtagtcacatattccatacagactgaattcttgacttggtatatttattgcagccctgtttgtcttttgaggcattttgggaaggagggaaggggttgggctgtgtggttttaggtagaaaggggtatctgggctatgaggttaaagccaggctgtccttagggagcttttgcacagccaggagtgtcctgggggcccccagccacctggccctccagcctgggcttctgcccttctgtccacagctctgaagggaacgtggcagagcggattctttgaccayggcagtttcaaggaaatcatggcaccctgggcgcagaccgtggtgacaggacgagcaaggtaatcatgaagacgggagcaggctgcccatgtctgactcaccaggcattggggccccgaggtgtgaggccagggacctccaggggcaattttcttcttggcctcaggattttctaaaagaaaaaaccaatttggggaatgatttctgcagtgtctgtgtgtgcccttagaaggtatctcagccagcctcctcctgaggcctgggaccctgtagtcagtccccaggccacaagggctaacaacccctttgggcatcagaaggtggccttgggtgctctccccagaaaacttcacagacactggcactctgaattccatcttargagagccatggacaggagccctgttgtatgccactgttggtgggaggctgcaatgcttgcatgctttccaagctgggcagctcacccttcagccttgtagctttcatctctttggacagctccacctgcctgaaagttcctccttataatgagccccgagctccctcctcatcatttaccactcattcctggtacgatgtcgcagctataagtccaggctctgcattagacctgaggccaagccccatctccatcactcaccctctctggtccttcacatctgtaaaatagggataataattctaccccaaaggattattgtgatgattagatgcaataacatgtgtgaaatatttaaaatcgacatactccataagtgggaatggctgctatcatttacatcttcggcaataaatactaaagtgcagccagggccgggcgtggcagctcacacctgtaatcccagcacgttgggaggccaaggcgggtggatcacctgcagtcaggagttcgagaccagcctggccaacatggcgaaaccccgtctctactgaaaatacaaaaattagctgggcgtggtggcaggcacctgtaatcccagctactcggggggctgaagcagcagaattgcttgaacccagaaggtggatgttgcagtgagccgagattgcgccattgcactccagcctgggtgacagagcgagactccatcttcaaaataaataaaataaaataaattatatttttaaaagcaaaaaataaaaaaaaaaaaatccactccttcttccatgtgaaaacactttgatttgaagactgctctcccccacccctgcatcatagggtaaacgagaaccatgtagtgatgcacagttcagtagcaagtaactgatgtcatggcatcccctgagctgagtctctgtccagttcaatatccctcagccctttccaagtgcaacttgatgtctagaccagtgtagtagctgctggctacatgtgatgctttagtttcattattattattattattttgagacaaggtcttgctctgtcacccaggctggagtgcagaggcatgatcgctgttcactgcagccttgacctcctgggctcaagcaatcctcccacctcagcctcccaagtagctgggactagaggtgtgcgccaccacacctagccagtttttttattttttgcagatacagggtctcactatgctgtccaggctggtctcaaactcctggactcaagcaatcctcctgcttcagactctcaaagtgctgggattacaggcataagccaccatgcccggctccttcagtttaaattgaactaagtcaaagtgacagaggatgacctgttccattcctcacacttgccacgttccacgtgcagcccacagctcctgtattggacagtgcagatggagaacgtggccctcgtcacagaaagttctagtggttcatgctgctccaggccctataccatcccagccctcctctgatggttcttgcctcaaaaagggcaccrataggtctgctacctttcgaggctcttaccatttgggggctttttctttgccttccaataaaataatccgccagattaaaaagagcattctcctccacgtgccctcacccccacacccagaggtccccaaatgcacctggggtgctgcccagggcctggctcactggtgctcattttccaggcttggggggattcccgtgggagtgattgctgtggagacacggactgtggaggtggcagtccctgcagaccctgccaacctggattctgaggccaaggtgagggggccgggagctgtggctgctggtttagccagcggtactgtcgagagtgggtcctgggcrtgggggtcccatccctgccctgccaacttaggtggagaagcaggggacccagtgcagtccctggccctggggggctcagtgcctgtttctctgacactttctctatgggttgcataaatggctgcaccatcttgcttcttcctcagcagatgataaaggtccctagaaacccctcccacctcctgccctgcctctgttgctgtttctgcgctaggccagggcacagactgagaagagctcaggagtcaagagggctgggttccagggccggctttaccccaactcagtgtgaccttgacgagcttggcacccctcggagcctgtaaaggagggcaacgggaaccttgctgggctgcaatgggagggtcagcctggtcctgagcggaggagatggggcttccatccttctgagccctggctctggtgctggggccagcacagatcagatcgcctgccatccagagcgaggttctggcagccgtccctctgtcctgggttgtggttgtgcagagacatctgatccccgcagctctgtgttccagataattcagcaggcaggacaggtgtggttcccagactcagcctacaaaacygcccaggccrtcaaggacttcaaccgggagaagttgcccctgatgatctttgccaactggagggggttctccggtggcatgaaaggtaagcccctccctgcctatgttaccccaaagccttggggtcagcacccaggacagcaccctctgggtggtgatgctaatgtcstagtctgtgcccatcatcatcttagctgtgtctcccaacaaccctgaggagaaaatattgttcaggtgccccactaccccgttttaaagatgaggaactgctgggcacagtggcagacacctgtaatcccggtgctttgggaggccaaggcagaaagatcatttgaggccaggagtttgagaccagcctggggcagtatagcaagaccctgtctctacaaaaaaacaaaataaatgtttaaaaaattagctgggcatggtggcacatgcctattgtcccagctatttgggaggctgaggtgggaggattgcttgagcccaggaggttgaggctgtactccagcctgggcaacggagtgagacccccatctcaaaaaaaaaaacaaaaaaacaaaaaaaaaacaatgaggaactgagggttggaggcaaagtgtcactttctagaggtcacaccatgaggtgcaggtcagggaggggcagccccaggagctgccgggtgacctgggcaggcacctccccatttggcaaggtgaggaggatgtttgtccacccttccctctgcagaaagctgctctgagcctcatgtgaccttacaattgtgtgagggctttttaagccaccaagcatgttttgggagagagtggctgttggatcactggggtgttgaggacagagctggatgggaggcagacagacctgctgtgagtccttgttaactgggtgacatcactgagcctcagtttccctcctttgtaaaagggggttaagaacaggaccaacctcagagggccgaggtaagrgtctgatgagctaattgctgacatgcagtgtgattgtcagtgctgttattattgcattcttgttttcatgtagggtgcctggggacctggagagatgtgtcttggtggaagataagggccatgttgcccatgcacattggggaaggatcagtgtgactgttagtgagggttttctttgctggaaatggtggggcagggcagggacagtcatgggtgagggcatttcaattccagttggaaagaatcctagagattggtttttccctgtgccttcacagatgaggccactgaggcccacactgggtgaatgacctgttcgaggtcacacagccacttagagagtgatcagtactctcaaatcccagcccagtgctctccaagcctctcagctgggctcactctcccaggacccccaggacaactagggcagtgggtttcatgtgtggatgagtgagggccctgaactgggaggctgctttgcttttcagacatgtatgaccaggtgctgaagtttggagcctacatcgtggacggccttagacaatacaaacagcccatcctgatctatatcccgccctatgcggagctccggggaggctcctgggtggtcatagatgccaccatcaaccckctgtgcatagaaatgtatgcagacaaagagagcaggtgggtgtgttgcccttagcctggcttagccttttcttgttctcccagccttgagagcccatgaccttgggagatcatggagggatgcagtggctggaacctgwaagtggtggagaaatgttgtctcttctttcatggtttccacttccccttcccaaggaagtttgcaatcaaaaaataaaaaggaaagaccaaaagcacttgaacttcctggcagccaggatgaaaagggaaatatgatgagccatttatctctcattagactctgagctatgagttcctataggaaatgttttattcagttttatatcccagggtctagcacagtgccttactctcctggtaggtggtcagaaaatactggctaaacaaatgactgaatgaatacttgcatgagaggataccggttcttcgcgggagaggtaacctccttggcactttccttaggaggaatttattccagagattcttacagaaaggatgatgacaataatgttcacagcacagtgactgatgactttgaagtgaaaactacatgctacacaggatgtcaaggcctcaagagtcattctactccaaatataggcacggcattcctgtgttcactccctcattcatttgctaattcaatgaatatccattgattacctcactgtatgccagccattctggtagacattatgatatggtggcaaatgggccaagcttgtcctgcattcagggcacttagacccttgttagggactgctgaggtcagtcctccaggaagactcaggatactgagcagcacttgaatggagtcattgctaacttttcatgctggccaccaggaagctcagagctactgatagcattcttcagggcttctaagctgtcaaaagcaaaagggggcagggggagaataaggggtaaataaaaatgttggaaatgaggccaggcgtggtggctcacgcctgtaatcccagcattttgggaggctaagggsggcagatcacttgaggccaggagttcaagaccagcctggccaacacagtgaaaccccgtctctactaaaaatacaaaaattagctgggcatggtggtacacgcctgtaatccaagctgctcggggggctgaggcaggagaatcacttgaacccgggaggcagagattgcagtgaaccgagatagtgccactgcactccagcctgggtgacagagtgagaccctgtctaaaaaaaaaacaaaaaaaaaaaaaaagaaagaaaagaaaatgtatgttggaaatgggaggacagctcacacaagactacactgggctctcaaggtgcttttgtgagatttaaagcgatcagaaacagtgcccctcctctaggagggcagaaattagcaaagttagagaggactgtggctggagagcaggagggttatgctgccatggaaaaagtcgtacactcttagacctgaaaggggccctccagagttcagaaagcattattttaaacagttggctcagtctttccatctgtgggtaaagatacagaggcccagagagggaaagtgacttgtctaagggcacacagcatgtgtgggggtaaaagagctgaggactgacacccagatcttctggctctcttccctccagctccccccacatccattagcccttgcttgctgggcaatgcctcatatacccccatccctgcctcttctcttttaaggggtggtgttctggaaccagaggggacagtggagattaagttccgaaagaaagatctgataaagtccatgagaaggatcgatccagcttacaagaagctcatggaacagctaggtaagggggtcccaaaggcttcacctctcagaggtcaagagaggcccagctggcccactgctgggggtttctaggatgttmaaaataaaatgaaaaaataccaaaatacagctataataactgtgagatttttaaagatattcacatttgtctgtttgttttgttttgtttttttgaggtctggctctattgcctaggctggagtgcagggtgcaatctcagctcactgcaacctctgcctcccaggcataagccatcctcccatctcagcctgagtagctgggactacaagtacgcaacaccatgcctagctaatttttgtatttttgtagatgtggggtttcgccatgttgcccaggctgttctcaaactcctgggctcaagcaatccacctacctcagcctcccaaaatgctggggttacaggcatgagctaccatgattggaggacattcacatttctaaatcaacctttttaacattttatatatatatatatatatatatatatatatatatatatatatatatatattgccatcgtgaatttatttctcagcatacacaaaagatagcaattgaagtatttggggctgatggggattatcagaattttggtggcaaaatgttcctttagaattcccaatcagagataagatattttactaattttgtttgaatgacagctttgttttacttgtcatctttagatgtaattatctttatttatttatttgtttatttttgagacagagtcttgctctgttgcccaggctggggtgcagtggcgcaatctcagctcactgcaacctctgcctcccaggttcaagcgattctcatgcctcagcctctcaagtagcaggaattacaggtgtgtgccaccacacctggctaatttttgtgtttttagtagagacagggtttcaccatgttggccaggctggtcttgaactcctggcctcaagtgatttgcctgcgtcagcctcccaaagtgctgggattacaggcgtgagccactaagtctggccacaagatgatatttaaatatccattttaagtgtcagtgtctttataactgtgctattcacaagattttttacagtgtgtgcgtgtaatttctttggctggtatcagggtaatgctgatctcatagaatgagttgaagtgttcgctcctattttctgagtttttgcagaattggcattatttctttatgtttttgatagaggtttttacctataaattcaacttctttgttatatataggactatttgtgttatctgtttcctcctaggtgagctttggtggtttgtgtgtttcaaggaatttgtctatttcatcttaagttgtcaatttggcatagagttgcttataatattcccttatcatattttacaatgtgtactaaaaatcattgatatagtatcctacaagcacgatgggtctgatggaaggggaaaatgtagagttgcatgttgaatgctgtcttgcaattgtgagtgcatttctgagactgtactagctatttgatctgagacaaagggggccatcaagatgggcctggggtgggggccaggccagtggactctgggggacctagggggctgagggcagcctgtgtagcagcaggggtaatatcagagttaaagctcagacctctcacaaggcaaggcctgtcctgcaaatcctgatttgtgccttcttcaaaaaaaaaaaaaatctccaccccatcacatatgaccagcttccatggcttgactggcctttctgctcacctgcaggggaacctgatctctccgacaaggaccgaaaggacctggagggccggctaaaggctcgcgaggacctgctgctccccatctaccaccaggtggcggtgcagttcgccgacttccatgacacacccggccggatgctggagaagggcgtcatatctgtgagagccacagctgccgtgtagggtgcaaagagcccaccctgttttccaaaacatggaggacatttgggctcgggggcggggagggcggtggtggttgggatgggtcaaatgctgcaggaggtgggagtcacctgggaactttaaaataatcccgatccccaggtggcactgcagaccagtgaaatccaaacacctggatggaagccaggcggtcgtattttttaaagatccccaagagattctaataagcagcaaagttcagggaccactagtctgatggctcggtcagtttggacctggaccaggggtagaaaccgttgttcctgtccagcattcacccacccctcaccattgcaaggactcccacagtcacctcctacccatgtccagtgctcattggttctcttgctgcattgttctccctcccagctgactcatgcctcacacgagcctgtgtttgtgtcggttgaggtagaagtgggtgccaggtttttatgggggacattttttcaactatggccagtctggagtcctggtgacrtcctgcctctgagcaggtgccttctcctccctgagcctcagcttacttgcctgggatgatctgggaatgatctcagagcctgggcccagccccgggcagccactgtcatgggtgtggtcagagccagtgtcccgtctcctccttccctttccggggattcaagcctggctcgtccacaggacatcctggagtggaagaccgcacgcaccttcctgtattggcgtctgcgccgcctcctcctggaggaccaggtcaagcaggagatcctgcaggccagcggggagctgagtcacgtgcatatccagtccatgctgcgtcgctggttcgtggagacggagggggctgtcaaggtgggcctggggtgagaacgaggccggtgagcacagggggtgctgggggctgagacagctggcccacagctgggtccctctctgaggcatcctctgccccctccccaggcctacttgtgggacaacaaccaggtggttgtgcagtggctggaacagcactggcaggcaggggatggcccgcgctccaccatccgtgagaacatcacgtacctgaagcacgactctgtcctcaagaccatccgagggtgagtggccaccgcacctgcttcccagcctcctggcaaggacccgagcctggattgacccctagctacccgactcctatgcagccacttgaacccgccaccctgtgcagtctggggttgtccccrccccctccccgctccccagcaaagagaccacactccctaatgtcgggtctcccagcacagtggctggggtgggacagagagcctagaggtactctgaaggccgtgtgagatgcttccaactcatgaaccttgctggaatatggacttgtccaaagtcacagctggagcagggttggtcacagaacccacatttggaaccgctagccttcaggctgctgtcttccacgccagtgttgacctttccagagggtcccctcccccaattgccatggggtcaccccgtgaaggagggagtcgagcacaggggaccccattttggggatgaagctgagactcaaggcagtgtcttgtctcaggtcatgtcacaaagcagtgaccagtagggacggtggtgcctcaaggcattctgaacttcaggtcacagcccctcctgctgcacaggaccatcacccccatggggaccacagcagggactcgggagctctgggttctggggtgtggccccacacaaggactctgccacccttggggccactgaaaaagtggctggagtgatcccagccctcctctcacctcccccacagcctggttgaagaaaaccccgaggtggccgtggactgtgtgatatacctgagccagcacatcagcccagctgagcgggcgcaggtcgttcacctgctgtctaccatggacagcccggcctccacctgaccgtggcccrcccagccactcccgggaccacggcaaaaggaaccacccagacccaccacccgtacaccctcagcagaccctgaagacttgcttttaaacaaagaaaatcctgggcacttctgcagggctgctggttccgagctgacacccgtcttaayaaaaggcccaggagtgcctcttccaaacaaaaacagcctcctctccatagctgggaagtttattttgttttgtctctgaagacagcagttttattgcatcactaaatctaatcaagctaaaacatccctgtttccttttgcaaaacagtgcctggcatgtgggatccaggcgttctttaggatccttggataccacatcgtgaaatcttttatttttttactctgagaccagcaccagatgtaagtaagcatctcatatatttcagccaaataaatgggccaagggaaaaaaatatatatatatagacaggactagagaaaacctatttttgtaatgatgtttctttggatactgtctagtcacccagaaaaatgtatggatgaattttttttttttttttttgagacaaagtctcactgtgtcatgcaggctggagtgcagtggcatgatctcactgcaacctccatctcctgtctcagcctcctagataactgggattacaggtgcccaccaccatgcccggctaatttttgtatttttggtagagacagagtttcaccaggttggtcaggctggtctcaaactcttgacttcaggtaatccacccaccttggcctcccaaagtgmtgggattacaggcatgagccaccatcttcagccagatgatttttttattgagagagtgaaatgctattttgttccccaaatggcgctagtgaatcactaggagggtcccactgataggccatgtttagcactggttgccagggattctctttttgagagagggaaagcaaaatgaatggaagtacccagctggaggtttcagggcttctggaggatgctctcgcatagctcgaggtcctctgcccacctcttctctccaaggaaaatgaggactgccccttccccctgcaggattggcccccagcctgcgcatgcaccctcctcttgcccaagtggggagcacagaggcggagaggaatcccttaccacacccacggcccagcttgctcacgagtgtcacctctgtgacggtcaccactgctcccttggagggccacttgagttactgttgcttcctcgcctgctggcttgatgagcaccgatggtgggatctgaccccgaggggcagagctgtcggtgactgaggactggactgtggtgaccatgccgatttgctcagggagaacgttgcaatgcacccagcagctcctggctctgcaggcggcacagcctggggccctgtgatcctctggtttcttccaytggggcggagtcggggrtggagggagctggccacaacccactgctctgatgggtggtttgtccaargatgctgaatgtaatgcctggtcaatgtggaagcccatgaggttgcccagggaagcctccaaaagctgggatgcttgagggtatccaagttgaaaaagacaaaatctgaccatcagccagtgacagtcctggcaaatgaaggtggggcggggcagtgaggggtgggagaaggtgaatgattcattattccaccccgaggtttgctggggtgaggggaagaatcgatgctgctttgggaactgaaggtttttctgttgggaaggccctcttggttttggagagaaagacaagttatgagtagctgctaccctggaacggtgggcagagagcctactaggaaatgtgcagaataaactattttttgaaggaaacactttggccttgactttattatctggattggagaaggcaggttgcctccaggagcaaaggtaggcgttcacctttgcaccctccattcctgacaccacagctgagaccttgagtgagttcccatcacaggggcagacggggatgcagtgaaggaagctgaaggctagactgaaatggacaaagtcatccctttttgaaagcactggggaaaaatgttttagaaaattatatgcaagcctagtctataccacaggcaaaaagggagcttctctggaagaaggggttgggggttggcccaggcacttcacgtgcgagttccattcctttccaccaccttgatccacccctgttgtgcagatgaggaagctgaggcacagagaggtgaaggcatttgtccatggttatgcagagacggaatcaagtctgcttggctccagaacccagccctttccttttatgacctaggtccttggtgggcaggcttaagccacacttaggagttggttttacatggacccaaactgcagaagaaccccctacccgccccccaccgtggcttctcagcacacagtgactattcaattttgtctccaaaacacgtaacaacaactgttaccttgattctgcctgacaccttttccaggcaattccccctcaccagggatgggccaatcagagttctccattccccctgacagtgactgacgcaggtatgggcgtgtatccccagtagagccgatcagaattctttagggatggctgacagtgctgatgtggagagaacctaccaatgcagggggaagccaagcccagagatagagggggagatccagtcctgttggtggtacttggatgcctggatcaagccatgcctgaagtcagtagcccagtcccaggaacctatccatggtttttgtttgtttgttttaatgtttgcactagtttgagttggagctctatccttagccctggagatggcccagttagcccagaagacagcagttaatttccacccacagcagcacctaatggtggtctgtatcagcagaccctccaggcagggaggcgaggacctgagaacaagctgaaatgcagccctctgggatggggaggaggaagctctgatttggttttgcatcctgaagactacaggtcaattgtttgttttcatccggatttgaaacccggacacaagttgctatctgctgctaaggatgctggagtttactctgtggacatcagctgaaagtgctttctctgacaaggctaacttttctcccttgaaggacttagtgtagccagtcacaaggggaagggagaaaggatcagacaactgagtgtggacagaggtcttgttgggcaggttgggtgctaactgaacactccctacgatggccactggtcacgtgccaggttctggcctctttccacacaatcctcatgtgacccttggaggtggctgctacatacactctatcctcattttttttttttatgagacagggtctcgctctgttgcccaggctggagtccagtgatgtgatttcagctcactgcagcctcaacctcccaggcacaaataatcctcccacctcagcctcccgagtagctgggactacaggcatgcaccaccatgcccagctagcttttttggtttttgtagagacagggtctatctatgttgtccaggctggtctcaaactcctggcctcaagcgatcctcccacttcagcatcctggagtgctagaattagaggtgtgagctgctatacccagcttctatcctcatttttatagaagagaaaacccaggctcagagatgagcagacttctccaagtgcacatagcaggtaaaaggaggggccaggctaggaacccaggctggctcagacccaatccccctgggcttaatgcctttccgtaaatcctgaacctttgcaagggttagatcccaaaacatgagagcatcctgtagaccaagctccactcctcctgcctccctgacttcctggctaattcagccaatggcatcattcagatcctcatcaaaagcctcatgctctccatgccaagagcccacactagggtgggctgccctctttcccgattggcagatttttcagcccttgattggcagattctgtagcccctaaaccactcagaggaacctcacatttctgcatgcacagtgggctcctccacatcacaaatgtaaatgtggactgggttatccccatttctactcctttctttggcctccccaattgattattttatttattatcttgttattttgccttcctctgctccaaaagtcagttggccttttttctcagggtcattcttttcccctaacgttttactatgaaaatttccaaatgccaaaaagtcaaaatatttcatagcactcaccccaacccaccatcttgatgccaccattgacatctgactgtgcttgtaccttctttaacaccattctctccatctgtccatctctctgtgaatgcatgttattattttgtcacatttcagagtaaattgcagacattaatacatttctccagagttatttttgcatttcaaaaccagttgtttgttttgtaaatcacttcctgagcttttttgcagctgagagcacatccagatcaacagagctgtgttgagacgaagcagccagccgcgtggccagagagggagctccagttctcacagtgcacacagcaccagaaaaacgctttttttccattattttatgagcatatgccacaggctgagcactgtgagagggtgctgccatgagcaaggcaagccactcctgcccttggggactgatatcctggggttcccaacaggtagaaattgcaagtggctaaccataaggagatgtttagggtcacgactagtcaaaacagtgactgttaaatccagaaatgtccagggtccacttttcagagttcttgtgacaggaacgtgatagagaagagaacaaggaccatccacacaggccacagaaaggttctgaatgaccaccacgcacagcaaagcctccctatggcttctgctaactcaaccagtgtggacaaatcagccctcttctgggcactggccgtgcagccgatgcaccgagccacgctgcttgacgtccagacagatctgccgaaaatgccacttccttgtactaagtgcccttgggacaaaagtatcactcaatcccataagacatggcatgagtcctggggcccaacttcagctatgcgagagcatcttgttactaccgtgaaccaaccagtctaaactgtcagttcacctccaggtgagcactggctgtttctcctggggaacctcttcccccttggcctttgtctggctgactcctactcatccctcaaaacccaactcaaatggcacttcccccaggcagccttctttgaccacctctcccatgggttgggagccctcctctgtgctctgacagcccctgttctctctcttttgtgcaacatatgtgaaacagatttctaactaaaacacacagctagggatccctaggtgtttccggttgctgaaccagggctggattttggagaacagtctgctgacagagaggtggtcctctcctgggaggggaggtgagaggatgctcctgaggatgttctgtattttgtaataccctgaccaacgcggtatgtctctggatggaatactgtgtaggaaacacaggcaaagagcctacatgtttttttgtttttgtttttttgagacagagtcttgctctgtcgcccaggctggagttcagtggtgcaatcttagcacaccacaatctctgccacctgggttcaagcgattctccaccctcagcctcccaagtagctgggattacaggcacatgccaccatgcctggctaacttttgtatctttagtagagacggggttttgccctgttggccaggctggtcttgaacccctgacctcaagtgatccacctacctccacctcccaaagtgctgggattataggtgtgagccaccacacctggtctagtattttgtattttgtatatttttattgtggtaaaatatacataagaaaatcttaaccatttttaagcgtatagttcagtagtgttaagcgcgtccacactgctgtgcagtccatctccagaatgcttttcatcttgcaagagtgaagctctgtaccattaaacactaactccccactcccctcccctcccagcccctggcaaccaccattctactttctgtgtctatgaatttgactactctaggtacctcatgtaagtggaatcatatagtatttgtcctctttgtgactggcttatcccacttagcataatgtccttagggttcatccatgtttagcatgggtcagaatttccttcctttttaaggctgaataatactccattgcgtggctagagcacagtttatgtatccacgcatccatcagtgaattacttggtggcttccaccttttggtggttgtgaatactgctgctatgaaaatgggggtacagagtcaggtgcagtggctcgcacctataatcccagcactttaggaggctgaggcgggtggatcacctgaggtcaggagttcaagaccagcctggctaacaaggtgaaaccccatttctacaaaaaatacaaaaattagccaggtgtggtggtacgcacctgtagtcccagctactcgggaggctggggcaggagaatggcttgaacctgggaggcagaggttgcagtgagctgagatcgtaccactcactccagcctgggcaacagagcgagactacatctcagaaaaaaaaaaaaaagcaaacgggattgctggacctggcggtaattctttttaattctttgcacaatcagcatactgtttttccaacgctgctgtgccattttacattcccaccaacaatgcacaaacttccctaatttctccacatccttgcccatactatttgttttcctctttttgtttttggtttttatgtgtttgtttgataatagccatctaaggggtggagtctagaagcaattgaactcaaaagtcattgcacctttttacttgcatgcctcgatcgtcacggacgggatatatagaccccacctgtgacccggacatccaattcctctgcctcttgcttccctcgctcacccagctggccccgccccgctgcagccacgcctccctctcttctctcccacctgctccccattctgcgatgatgctgaaatccagacgcccgcagacccaggcggtggcagaactcctgggggccggtggagaaggaagcagctggccagccaggctcattctccgtgaggcggcacccaaggtactttgttcatctttccccatctcactcccactgcctgaacctttctgggagcctcctcttccctttagttgccgccagggtcacctgcaggccgcacaagtgtaaggcctttctcagttcaagtcagaggaatgttccgtgtccctagccctcgggtctgccttatctcagttcacaggcccaccctgcgatccgctcctcactctgtcttagaatcttctcacccttcccctcaccagctcccaagcgtagcaggggtgcttgtttaaaaagctcagattgactctggccctgcctcagtctctctctctctctctctctcttttttttttttttttttttgagatggagtttcactctgtcacccaggctggagcacagtggcatgatctcagctcactgcaacctccacctactgggttcaagcgattctcctgcctcagcctcctgagtagctgggattacagatgtgcaccaccacacacagctaatttttgtatttttagtagagacggggtttcatcatgttggccacgctggtctcaaactcctgaccttaagtgatcccgtcaacttggcctcccaaagtgctgggattacaggtgtgagccaccgtgcccggccatgcctcagaatcccaga

SEQ ID NO: 8736 - DNA, 97952 bp, Homo sapiens
ctgaatgactactgggtaaataacgaaattcaggcagaaataaataagtcctttgaaaccaatgagaacgaagacacaatgtacctgaatcacttggacacatttaaagcagtgtgtagagggaaatttatagcactaaatgcccacaggagaaagcaggaaagatgtaaaattgacaccctaacatcacaattaaaagaactagagaagcaagagcaaacaaattcaaaagctagcagaagacaagaaataactaagatcagagcagaactgaaggagttaaagacatgaaaaacccttcaaaaaatcaatgaatccaggagctggttttttgaaaagagtaacaaaatagaccactagccagactaataaagaagaaaagagagaagaatcaaatagacacaataaaaactgataaaggggagatcaccactgatcccacagaaatacaaactaccatcagagaatactataaacacctctatgcaaataaactagaaaatctagaagaaatggataaatttctggacacatacaccctccccaagatgaaaccaggaagaagtcgagtccctgaacagaccaataacaagttctgaaattgaggcagtaattaatagcctaccaaccaaagaaagcccaggaccagacagattcacagccgaattctaccagatgtacaaagaggagctggtatgattccttctgaaactattccaaacaacagaaaaagagggactcctccctaactcattttataaggctagcttcatcttgataccaaaacctggcagagacacaacagaaaaaggaaaatttcaggccaatatccctgatgaacatcgatgtgaaaatcctcaataaaatagtggcaaaccgaatccagcagcacatcaaaaagcttatccaccacaatcaagtcggcttcatccctggcatgcaaggctggttcaacatacataaatcaaatcaataaacataatccatcacataaacagaaccaatgacaaaaaccacataattatctcaatagatgcagaaaaggcctttgataaaattcaacaccacttcatgctaaaaactctcaataaacaggtattgatggaacatatctcaaaataataagagctatttatggcaaacccacarccaatatcatactgaatgggcaaaagctggaagcattccctttgaaaactggcacaagacaaggatgccctctctcaccactcctatttaacctggtattggaagttctggccagcacaatcaggcaagggaaagcaataaagggtagaggaagtcaaattgtctctgtttgcagatgacattattgtatttttagaaaatcccattgtctcagcccaaagtctccttaagctgataagcaacttcagcaaagtctcaggatacaaaatcaatgtgtaaaaatcacaggcattcgtatacaccaataacagacaaacagagagccacatcataagtgaactcccattcacaactgctgcaaagagaataaaatacctagcaatacaacttacaagggaggtgaaggacctcttcaaggagaactacaaaccactgctcaaggaaataagagaggacacaaacaaatggaaaaacattccatgctcatggataggaagaatcaatatcgtgaaaatggccatactgcccaaagtaatttatacattcaatgctatcctcatcaagctaccactgactttcttccaagaattagaaaaaactactttaaatttcatatggaaccaaaaaagagcccacatagccaagacaatcctaagcaaaaagaacgaagctggaggcatcacgctacctgacttcaaactatactacaaggctacagtaaccaaaacagcatgttactgttaccaaaacagacatagagaccaatggagcagaacagagacctcagaaataatgccacacatctacaaccatctgatcttcgacaaacctgacaaaaacaagcaatggggaaaggatctcctgttcagtaaatggtgctcggaaaactggctagccatacacagaaaactgaaactggaccccttccttacaccttatacaaaaattaactcaagatggattaaagacttaaatgtaagacctaaaaccataaaaaccctagaagaaaacctaggcaataccattcacaacacaggcatgggcaaagacttcatgacaaaaacgccaaaagcagtggcaaccaaagccaaaactgacaaaatgggatctagttaaactaaagagcttttgcacagcaaaagaagctgtcatcagagtgaacaggcagcctacagaatgggagaaaacttctgcaatctacccatctgaaaaaggtttaatatccacaatttacaaggaacttaaacatatttacaataaaaaaaacaaaccaccccatcaaaaagtgggtgaaggatatgaacagacacttcttaaaagaagacatttacatagccaacaaacatatgaaaaaaagcttaacrtcactaatcatctgagaaatgcaaatcaaaaccacaatgacataccatctcacgccagtcagaatggcaattattaaaaagtcaggaaacaatagatgctggcaaggctgtggagaaataggaacacttttacactgttggtgggaatgtaaattagttcaaccattgtggaagacagtataaggattcctgaaggatctagaaccagaaataccatttgatccagcaatcccattactgggtatattcccaaaggaacataaatcattctactataaagacacatgcacacgtatgtttattgcagcactgttcacaatagcaaatacatggaaccaacccaaatgcctgtcagtgatagactggataaagaaaatgtggtacatacacatcatggaatactatgcagccataaaaaggaatgagattgtgtcctttgcagggacatggatgaagctgaaagccatcatcctcagcaaactaacacaggaaaagaaaaccaaacactgtgtgttctcacttgtaagtgggagttgaatattgagaacacatgaacacagattggggaacaacacacaccagggcctgttagtgggtggagggtgaggggagaaaacttagaggatgggtcaataggtgcagcaaatcaccatggcatatgtatacctatgtaacaaacctgcacgttctgtgcatgtatcctgctttttttttttttagaagaaataaaaaaacaaattttgatcacctactatgtgcaaagccctctgtcaagagcctttggagcaagagagctctgctttccccaccaaaaaaaaggaaccatccaacctaaaatgtcaatagtgccaaggttgtgaaattctgtactagaagataaactttaaacaaaagatgaatggagaaactacaagataactggtaaccttgagctgtaaatctgcatactgtattattacagaacagattgtaaatgcagaacattatagaaatgtagaaatgatgatgtaaaaatcatgtaacaaaagttgggagagaaagtaggagaggaaattgtggcagtattacaggtaagttgagttacctaytgttaatagccataggtcaaaagatgataatttaacattataaatcaagttatagactaggtatatttgaacagtataaatgttgacactaaaactgcaatcaactaaaatcagatggaagaggaaactgagaaggggaaaatgagaaaatatgctaattgtattgcttataataaggagggaatagaaaccatacacagaaatagaggattaagcattagataaagttatagttataaaagtggctcatctttacttcatagcacttatcacagggtaattttgcatttacttatatgattgattgattacaatcactatcccagtgggtaactaatgaagggaacaggtaaggtctgtttttgctcactaaatatattcggtccttgttatttgcagtagttctgttctacaaacaatgaattactcattactgaaccatttctcctggaagaaatatggggctaggttcctgcaaacctctggtttcaacattttcatcaactgatcaacactaattttgttttatatttgtttctatttaaagacactttaataaatataaacagttgatttgttaacattgaacttagggccaacaacactactcacacctgaaggaaacttatctaacacatatcttgttctctgtaaggcccatcacagccttcttgtgctcaggaacactagacagtacttcaacactatgcttggggcccacagtgaaatcactaactaaaagcacaaacattcaagaaacatagagctaaacagacagggaaaacagtacccgtttacaatatgagagctgaaacaagaaggtagaggtagccttgttccacctcagctggaggcatgtgtgttgggtgactcattttcagtgctctgcacatatccacgcatgactgagaaagccctttgagtaccaattctggggttacaagtaaattttatcgatgagataaacttgaatctactaagtccaccaataagtatcagtaaatgcatctgtggaattgaattggatgttatcacctgacaacaaacatttgtaagttattagtgagtgtatttattgtgattctgagctgtgcaagtcaaggaatttctatgaaagatacataaatgttaatacacatatctgattaatacacatacctgtatgggtttttttctcatgtaaagacagcttagtgaattttggaggtaagggtcttcgaagaagcagtgggggcttttgcattttaatgaataataagtgctgtttttcataatccttggtttaaatgagaattgaaaaggttttgaatatgtttgaattgttgaaaaataataagaatttagattacatcttaaagaaaatcattctgtaccaatactctactgaatccaggcagaattcctttatgaaaaaaaaagagggtaagaaaataattctttaaaacttctattaatagaaagaatccagttaaaatgtagggttataagtaaacatagaattttaaaaatatgtgtattattactacccaggatcattctacaattttccatgttagtacaaagttcaatttgccaatgctatttcaactagtaaatactgatttttcagaatagtcgaaatgacattttttttctctctctccaaaatgttatcgctataaatgtagaaagagaatttggtcagaaatgtgtagaagatgccttcattagataagcctctgaagacccaccatatctaaccattcacaaacaaattgttttctttctataatggcttgtttttcaaccactatgcttgggccaaaacaattcaatcctaaaataagatgggtttcactataatgagatttcccagggctgctggatcccaactcatactgtttagaaataatgcgagaagatgcacccccaaaatgtgcttttagtttgcagggcaacatcaaaagtgcctggcacggcattattccattgatagcctagaagggaacaccctgaaactgcacaaatgggccgtttaccgccaaaagataactgcacacaagcgctcaaggtgtactccctggtcatatgttccacacgatgctggaaatctcccttccgtagtacccaaagaggggcatggaagtgctggactcccacactaccctttaggataatcggccgctttccaaaccaactggcttttcgtctcctatctccttttcctcggaatctaggcagcgaggtaaaggtccagcgagggtcttcctgcaggaggctgttcccgaagaagcaccacggatccccaccctctaggaggccaaggagacacaccctagcaaccggagtccgctaagccagcccagccacttgacgcgcaggcgcgggggcgggacaggcgaggcgggcgcgggacaggcgaggcgaggcgggcgccgggaggggcaggcccagcccacggtgcagcgcgcgcggagccctcgccttcctccgacgcactgtggggctgcaggggaagctgcgggccgtgggggccggaggagaagccggctccacgcgcagctgctgtacggaacgccgtggtgacaattgttattactatttttatgcttaatggcaatgaccactattatttattattttctctcgattacaggatgctttacttgggtgtctagaatatgggctggcattctttaaggctgcacttttgtgcagccgggtcccggggctaattttgcagtgctctcgaaaagcgggcattcggttttctttctcttcctttcatgcaacctgttttctctttctgatcctttaaagttcctggctgaggctggattgtgtagaaataagggcattagggatccaagcgggccataaaagaaacccatttctcactgtcatcgtcctctkttctggttatcatattgtgacgtgtcgcctctgtcatggtgttgatgaacctgtgtgtgcagtcatagatacatcgtgtgtgtttgcaaaaatgtgcgtgtttctctggagatttgarggggaaagagcactagaaagagctcatctgatagatgcggaaatccgaactcagaaagtaaactaggtagagcttccttccaggtttggttttttctaagtactagcgcaggaactttataacagaagttggaaaatgagagacttctgtataaatctttctagctttggggatctttcaagattcacaccataaccatgtcttcctttttctccttagtagcaaacatgttttaaaacaatcaatgaaaaaagtagaaaagttttaacaaaaaagtaatcagactctggaaaatattatgcaacttgttttcctttacagtagtagtgtactgtttcttttccttgtaagtttactgtgtcccaattatactgctgccccagactatgaatttatttccacttttgctgttatctacaccatagattcattagtttctcagaaatacaaagctgaaaataaaaggcagctctgtggctaagattagtctcaagtaatatatatcgtgcatattttgtaaatgtgaaaaaaggtttatatttttaagcataaaaaatgacagtgtaaattgagtcaggtacctatgctcttcaagatcgttggaaccatgagaactacaggaattcagttttactgactgacgtttggcctttaaaatttatgcttagctttgtgtagtcgaaagcaaggcttctgaatgctttttcaaaaaatgctttgtcacacttggaatccgcaggcatccaggtatcattccttgcagatttcttctagcaagtatgagactaaaacctagggcggtttaatatgtaatctcaggtgtgaacattttgtcttctatttctaccacttagtaccaaacatttaggcaaatgagatagttattatgaaaattaaatccatggcttggtatattttatatgtatatatgttattctaacacatctgactcgctttgtctatggaaatgatatatcagtataggatgagtttagacaggacaaacraaattcaatttagattattttatagttcttatatttttgaaaatattatcccctcaattttctttcttcttttgtaaaataacgtgtttttgaaataatgaataactcccttttggattttaagggtctgctttttctgatgtatgtacggtcagcctatttatttgttccgtcccctttgcagtttggcagaaccttatgaagaagcttcccaaactgaaccacagtgctttcactctattagcaaattgtactaaagatgccagcgtaatgatgagtgccaaggttatagacatcctgcattttttaaatgttgctaaaatgagataaaagccttatgcagaagcaaccgcaggcaccccgcaggtaatgctatcgatttccctaataagtgggaaacgcttggggaaccttagatttgctgttggttctgttgaaatggtggaagtgatgtgaaaagtgttgctagacaacttcattattttccatagacctatctcttatttatttatttccctttaaaataggacagaggtttgctaaacagtttggccattgtagttttaacctaatattttaccttatggaaataatggagtaatttgtgtttttatgttcatattaatttttttaagtactgttaaagaatgaatagttatttttgagcacatatttgttcaactactgagtctccagagtaacacagggcactaaaatgcttttgagaaagaagtgttttattggtctgaatttacctgtttatattaattatatgtacggggaaatgtcttcttcaccagtmacagtggcttaaatgtacccacttatttcatgtgttttcatgctgttgcctagagaatagttttatattttctcaaatgttaataaagatattttgaagaagctgctactctttttatccccatatctcactgtaaagacaaacacttcatttgtttttaattattttcagccaattatttctttttgtctttcaaggtgatagttatttcctttgtttgaactggagatcctgggattcctttaaaaaaattactaataaggaaatgtcatgcaacctttatcatggaattaaaaaaaaaaatcaaacacaaggaaaggacaatgtctgtctgttttcaaaagtgccttcatgaatttagtcattcattccagaatcatttattggaaacctactatgcataagttacttcactaggtgctaaactttaaactttattaaaacaacttataatgattaatttgaggctttataatttagacattgaaatgaaattttaaatcatttccaaagactacacttatctgcattataactacttgagggttttttttaaaacaattttttattttattgctttggtagaatagtgttgtttattcacactcctttgattctcagaaacattttgaggttttttttttagctgcagtgatcattttagactgtctgcaaccagctaatattagatatttgtatatattgtatgattgtgtccttcaccaaaaaaagttaaataatatttgtttccttaatattaagcgcttagcatgagcaatgtacattagtatggggaaggcactgttttaaatgttgattttattttagcttcacaattgttatattaattgaggatgctggcatctgcattaaatttcaagcacaggaagcatagcacagctctacccagctgggttcacatttggctgccacttgtcagccctgtgcccttggaccagctacttaacctaagccccagggtttcctcatttgtaaaactgggttaaaatggtacttaccaaagggtcttgtgaggagttaaagagataatctgtgtcagaggcttagttctgtgccagccacagagtcagtgcgcagtagatgttgttagaaaattaaaataaaacagcccagttttccggtctccacacccctgctttatgtgatgatagttgacgttaattgaaatgttggagggctatacatcctgggcatttatccacaaaatttatccacaaaatttcacatttaactttcctaatgtctccaaatgttggcaactctagtttgcagttctcagactgtggcacaaatgctatgctctaggcagtgtcccacattctgtcacaggtctttatactccyctgggyggcacaggagctgtgggagagctcgtgcctgaaggagtcctggtacagtgttgtaaggaggccttgactctcccccacgtgagttgggtctgcgagctgctgtcaccattgattgagccgggctgaatcgatgatgtatttcaaccggtaacccaaggaagaaagcctctttgttctcagcatcttccaggccacttggtgtgcctaacaaaggtgaaaaagggctgcaatgtgaagctcctttgaatggctagagggaaaggtgttaaatgcacatgatctttcttaggtttttttctaatgtgcacaccggactttggtagatgagtctactgagtccctgtactggctgggatttagtcctaaacttaggaggaacatgtactatatcaataaagtgtctgaactgcatgctctctattcaaccctcagcaaacacctgtagcaattagaaccgcaggtgagaaaaaatgctttataatgacttattcttcattctaatgtcaacatatgaccttaaacagtagatatgatttccttttcaaacctagcattctgcttwtgcctactgccctattgagtatatgttttattcgtaagtacatgaggctaaaagttgtgtatgggagtaagggcgggacatgtaagagtccattgtattctgtgggttgagtgttggtaaagaatttgtatttcttataccagaactagacaactagaagtgtaactcacatttcagtgtcacatagtttagtatgctgttgacagttctgctacatttctgacaattgcaatctccactttataatatgttgccaaatttataatacgatgccaaattttatcagggtagaattaaagtttcaggatatttctctctccaccctgccccaggtagcagaaaatttcttcatttcctttgccaggttttccaggtgaggtaatccctaaccaaggaaaagaatatagtgtctagctctattcagaagscatggggaagacagtttgtggggctttattcttctccccactgcaattccaagaaagcaactatgcttgtatgagtttgacatattaggctctgctgtttgaagaaaaggtcctatggctataagaggttgcatgcaaaccaccaaatcagatggttttaggtgttttcagccttgagacagtctgtgtttctgcttctcattggatggtaccttgccctggaaagttttctcatggaaaacttgcatggccattgctggggtaccttccttgtgcccaggagctacacacacaccatcacttcccaaaccatctgaattaggcccagtggaggctctgggtcaccactgctctcagtgggagcaaaggaagccagaacgttcctttcttcccaactccctacttctctcccagactcacaacattagaagggattgcttccagaggatttgtaacttggtgtatcactttacccaagtgttcctacttaagaaaagaaaaagcaaagtgcctcaccctgtacactcactgactgaggacattggcagtacatagttgtgagacacttgatgtccccagtgaaggtaaaaagaagacagcactaatggggtcaatgatgataccagctttctgaaaggagttaaagtgagagaccacaggggttgaaagtggagccatgagtataacaaatccggtttggcaccatttgcttaatagaaatcagttagttaaaaaccagaagggctggttttgctaatcttgtactgtgcactgtaggacaagctgtgatgaattggaatggctatgatttctagacccataccagagggctagagttagttggcctagtgtgtttcttaataaatatatttatgtttcctacttactttcatggggcaaagagtcaaagataaatgttttctgtgagctgtaaaagtaatagagcattgagggctttgagagcttcttacagtcgtggagatgtggattttaaaggccagaacttcctgaatgagttgatgacatgttctggctaaagggttaaggaaccccagaagggaatgactccagccaaaatggaagaccggctcttctgcttgatctctagacctccctcagatgacctctgcccttcagaaacatctgcccaaagattaacaggcacccttctttctagtacttcatagcacctctcccaagtagaagggacagacttttgatggaacagggtgaagcacaggaagtgagtaccctctggggaggccacacagccatagtcagagatragattaagatcttgtcttctgaaactaataaaatgctctttatatgattttatactgttttgggtattttggatatagggtctcactctgtccccaggctggagtgcagtggcatagtcatagctcgctgcagcctcgaactcccaggctcaggcgatcctcccacctccgcctcctgagtagctgggaattacaagcacccatcactgtgcccagctcatttttaaattttttttgtagagcagagtctcacagtgttgcccaggctggtctcaaactcctgctgaggagatcctcccacctcagcctcccaaagcactgggattacaggcatgagccaccatgcccgaccttgtatgttgtctttcgagaaatgtttattcaagtcctttgcccattttttagtaagattatttgtcttcttgttcttgagtactttaagttggatgttagccccttatccagtatatgatttgcagatattttctcccagtccatgggttatctcttcattctattgtttcctttgcagtacagaaagaaaatagcatcttattgtaattagtatttgattattaatgagtttaaactttttttgtatgtttatkactgagtgtattctgttgtaaatggcttatccagtcccttgtccatttttacatggtagtattttttcttcctccaatgattttttttttaattttaatttttttttttttttgagacaggtgttgctctgttgcccaggctggaatgcagtaggatgatcatagctcactgcagccttgacctcctgggcttaagcaatcttcccacctcagccttctgagtagctgggactatagcgcatgccaccacaccaggctaatttttwaaaaagtttttgtggacacggggttttgacatgttgcccaggctggtctcaaactcctgggctagagcgagctgcctaccccagcctcccaaagtgctggaattacaggcatgagccaccatgcctggcccctgtatgatttttaagagatccctaatgattttaaagagatactatggatactcaatatgccccgtttgcctactgaagctgtgtaagatgaaatatgaagtggttacatatgtgagccctaaagttagatagacctggtttgaatatgacagcaccatttaccagttatatgactttggtcaagttaaccctttaagtcttagtttccacatctgtaaaattgaggcaataatggcacctaccccaaacagagttgtgaaaattaaatgagaaaatcctgaaaatgcttcaacacagttcctggatcactgaaaatgttcaataaatgtcaactactattttttctcaatgataattcaaaagttgattgtataaaggtagtaccatactcattactgttacatattactgatttgtgacatataactgatttgttgctaaatcactctaaaatggttcttgtgctctttatatacatacacacatatacatacatatatatatatataatgtaaacaaagtcattttacattcaagcatgtatagtttgtttagttagttagaaatcaatgctagcattttcagtctatgtgaccagtagtgctgatgtggatggcctcttgtccacccaaaatacataggaatgcsagataaaatatgtagctgagatgaacagaaaaggaaatccctgatgttgggagaagaaaaagaacttaatgtcagcgaagtgagctggagatgaagtcctggtggtccacggggggtctgatttttaggggtggggaactgggattgtcctacctacatgggaagtggagatgaactccctagtctgcagcaagcagagaactgaaataaaacagcctgcataaatctgagagcctcaaaattgagaccctttctctgaaacagggactagagaatccattctctagcccacagcatatcaaggaagctgaccataggctaggcaaacaatatattaatactggacaaagtagactctaatrggcttattttttaaggatacaaagaaatgattcatcaaggtgatgtgccagcatatgactgtytgcacttaactgcataacttctaaataccagaaacaacaatggacaaaatgacaaggagctattgataaatctacctctaaaatgagaacctttttttaaaaaaagcacgtctcttagaaaataaaagctcaagcaagcaaaagattcctaaggatatgggagatttcaataaaccaagtaatacacttgatctgatcgatatatagatccctgtatccaataaataaagaacacacattccccttcagtatacttgaaatatttaccaagatgggccacaaaggaaatcttaaaaaattctaaaggggmgcttagtagatattccagtttgactagagaagaagttgggtaggtcaggctaggaatgtaartctgagaggatcttaaatattaggatattgacaggcagtggagagctactggaagatttagarcaggaaagctacaggatctgcattaagagatgaatctggaattgaggccaagttattctcttaattttcaagggcgaatgaggaaagatccagctctgacagaataatgagttgtgcaaagtgaaggccaaatgacatcaccggagatagcagtagttcaaagaaagcaaagcagaggaattgaactgctgcaaaatgcacggtaggtaacagggcagtgaacgcagaccaccctgggcctcgggggtcagcaccaggttcacagggcaaagcatgaatttaattccagaaagtcactactaacctcattagaaatcttagtgtgattttcctgtgtgttttgaacttaattttaagcttatttggatttatagttatgatctaactgcactagcagcttaccccaagtttgctgtttgcttatgtaacagaaataggtaaagacaactctggaagtctgggatagttttttcatgtatgtattcatgctagagaagttctagtctagttgattctcctcactctacagatatggaaaattaagcacagaagggtgactaatcattaattatagtaataaaaatgattaamtattagtactagcacttttagaacgtatgctgtgtgttagtcattatactaagtactctccatgcatttcttcatttatgcctcgcaactaggctatgatgtaagtgctatttacttttcctgtctgctaataaggatactgaggcttagatagattaagaagaccataaacccagggactagatttgggacccaggcctttgtaactccacagaatgagctcttacccactttgctatcccaacttgacttggacacacaagttgccacccaatcaaatttagattcaagatctcttgacttgtggtctagtgtatttcctgtctcacctcaggcctctattctctacatttctttgagagtacacagctaaagccacagagtagttttagatcttattgtaagaaaaatgcttagttaggctcatctcctatgtcagaagttcagaataattaatcatatttccgctttctgacttttcagagttcctgggatgttttaattagacacttgacatatttttaattttctctatcacttgtagcacacaccaggtgttcaggttttggtccagatattggttcaataaggatttattggatgcattaatgaaaatctagaacctccaaatctagaacctccttacttatggacatgttaaatttcagaaggctattttccaatacatttgtgtataaatccttagtgactaaaacagattaaggagtatttcttagaggtccccagaagcatttccactaaagatgggtataaaagttagtcctgtgaaactttaaaatcaggtctgttttccgcctttgagatcatataaaatctatcagacattctttctattaatataattgattgttttggtctacatcaaaaatctattgaggcagttaaccctcctcttgaatgacatctgcaactgttttaggttacgctttaaggtgctcacttgataaaccacaatattaaatcaactctccacttactcaatacctacaccagtggaactgaacagggtgggagaaagcccacttggaatgcccttattttaaattcataatcacctactttttttttttttttttttttttgagatggagtctcgctctgtcacccagcctggagtacagtggcacgatctcggctcactgcaagctccgcctcccgggttcaagcgattctcctgcctcagcctcctgagtagctgggattacaggtgcccgccacgacgcccagctaatttttgtatttttagtagagacagggtttcaccatattaggctggtctcgaactcctgacctcaggcgatccactcgccttggcctcccaaagtgctgggattacaggcgtgagccaccgtgcccggccagtcaactactttttaattacaaagggaaaaatagtaactttacagtgggggggcccctgcagacatcatgtaccccacaatatgatgtgctgagagagaacaacatcactaatgtgttactcttgccaaaaatacatacctgaattaaattgtgaggaaacagacaagcccacactgagggacagtctatgatggactttttcgaaagtgtcacgatgatgaaagacagattgaagaactgtcccagattaatggaggctaaggagatatcacaactaaatggaatgtgagatctggattggatcctagtccagaaaaaggatacttactaataggataatctatcaaagttgaaaaaggtctgtagtttagttaataatggtggatcaatgataatttcccaatattgataattatactatggtactgtattaatgttaagatgctaatatttgggaaagttgggtgaagggtatatgggaattcttttaactatttttccaccttttttataattctgaaattatttcaaaattaaaagttaattaaaagaaaaatatttttaaactgatcatcactagccttgaatattactcagccattataccatcttccccaaagcattcattcttccaaactcctaaacaatatttcagacactctcctttcactacagcccttgtgtagctccttccccagcctcaytcattgtgaaaataggggcaattagaagaatttccccaggtgcacctcccagcacctgcgaccctttactgtgctttctctcctgcccttgtggataagctgtctctgcagctagccagggtcaagtcctccacttgtttagtagatcttatcctctcatctattcaagaaaattgctcccgcaagtctctctctctctctctctctctctctctctctctctccgtctctctttctccatccccaccccaaccctttctctctgctgctgggtaattcccggaatcatagaaatatgctactatttctttcttcttaaaaaagaaaaacaactcttgagcccacttcccctttcagccagcttcaacatttctcttcttccttttacaataaatcttctgaaattgtttacaattactgtctccaatttctcccctctcattcttttgggaaaccgttccagtgggactttagcttcactcttccatcaaactatctttacacgattcctagtggcctccatgtttgcgccttctgtggtcagttggttctccatcctcttacatggcctatcagcagctcttcagagcggctccctctcctcccctacagatcagtcttcattaggcctctaagtcatcacaatcacctgatttatctcctgcctctctgaaaacttcttcttagtatcctttggtggttcctctttaatttcctaacctcttatgttggaatgccccagaatttggagtttatctcttcttttttttttcatttccatagctttagaggtacaaatgggttttggttacatgaatgaattgtatagtggtaaagcctgaaatgttagtgcacctgtcaccctagtagtttacactgtacccaatatgtagttttattatcccttaccctgctaccaccctcccttctccttcatatttactccataggtgatctcaaccaatctcacagctttattatttatttttattttttgagacggagtcttgctttgtcatccaggctggagtgcagtggtgtgacctcgactcactgcaacctccgcctcccaggttcaagcaattctcctgcctcagcctcccaagtagctgggattacaggcatgggctaccaagcctggctaatttttgtatttttagtagagatagagtttcaccatgttggcctgtctggtctcaagctcctgacttcaggtggtccacccaccttagcctcccaaagtgctgagattataggcgtgagccactgcactcagccctcacagctttaaataccattgatatgctgatgacttcaacttagtatctacagtgagacctgcagacacctatatccaactgtctactcagatctcctgattggaaccctaataggataaacaggtctaaaattgagcttctgcaattctccatccccaggcctgattttcatcccgtcttctccatgtcagttaatggcaactccatccttctagcagttcaggccaaaggccttagattcatacttacctcttcactttctcatgtgccacaaagaatctgtcagcaaatcctatcagctctactgtcacaatgtacacagaatctgacaacttttgtctcctctgctaagagtttggtccaagccacatcatctctcacctagattattgcaacagcctcccaatttgtctcactgcwtctgacattgcccttctttggtttaatcatgacacagcagttagaaagatctttttaaaaatgtgtatcagatcttgtaactctgttgatgagaccaccctccctgcaatagcttcttgcctcctctgctgtaaaaggcaacgccctgtgtgatcaggcctctctgaccttatctgctactactctacccctcttttgcctcttcgcattggccttgaaaatgaaacacacactcttccctcggggcctttgcgcttattccttctgccgggaattctcttacccctgatatcttcagggcttgctccacttgcactccctcactgtctgcccttacctccctcatgtttttgttcaaatgtcactttctcagaaaggcctttcctggtaacgtcattaagaattttaattccacacyaccctcaaccctgawtgcatacacacacatagacttacattccccttctgcgctttaatttttttctccctaagacttattactatctaatatgtacttagttatcttaaatatcgtctgtctctctcaactggaatgtcaattccataaggttaggaactaatgtcttatttatgcatttgtatctccagtgcctctaaaagtacctgagataaagtaagtactcaagtatttgttgaacaaatgaatgaatggatgaatgaatctgcactggaaccccaatacaaattttggtgaagcaggcattgaaccaatggaatcatccaggccttgcgacaacttttagcagcaattcaccatgatacgttactcaaaattcctagacttcttctaaattaacattagccatccaatatttaccacaccaaagatttcttcctagttcctagctaatgatgatgattgcatagatcaagcccatttcaacattttgcatgatttattatcagtctctcagtgttattgttactgctcaaccaattcactccatatgcaccagtaatactcatttcatcaccatttttatgtgtttaaaagatctctgttttaaacacataattataattgtatgccccttctttatgttctttcagcattcttaagtcttttgcactctttgtaaatgctgaagttatgtttctaaccctgcagtgacttccatgtttctgtacaaacaytgcaaacttgccacagaccagaagttgtaaattagtgatgtctagatgagtcagttacagattagccaacatgatatttaattgaaaaaatgttgccagtatattaaaaatcagacaactttttatgtaaaaatccagatttctggtttctcttaagcctacattctttctgctgctacctttagataagacttacattttcccgtgtgtggcaatccctgtgacatctgtgcaacctgtttcacttcattgagttacctgcctgacccctgtagatatttgacattgattcaaaccacagtcagggaaatgacttagagacttaagcaaccctgtgtgctcaccaatggcacctactgggaccggcagagttatccacttattcggaagcactgctttctatctccggacaattataaaatgaaagtttctaagttcagtaggtttgctaaatctaccaaaagcagttttggaaagcccctgttttattcattctggtacttttttttaaattaaaaaatgtattttgtttctcttcccttatccttcctttcccttgatttagacaggaaagagcaatgagaggggagatgtggtgagaggatccctttccctcctatggtctcattcctttgactggagttcataagggagtaggcggccttcataagtctgaaaccctctgctgtgtagactactgacacagccctgtagagtggtcgtgggagcccctcaatcagttgggttaaaatgtgtggccacttgcacttatatttatcaccttttgtggttacctcataattcgtctaaaagaagacctccctctgctgattaacaggcaccctgccttcatctataaaargtacatagccaaaggacaataggaaagacaagtagaactagttaaatgtcactgaggttcaatcctgataactttgtataggaaagaggtgggatgcagattgtccaaggctagactatgaattccaccagagcagagagtatgtctgcctgctgcgcctctctgttgtcaaagtttggctgagtgagtagcttgtgaaaagtaggatgaatgaggaaaggaatgtatgaatttagaggctgtagtcattgcaggcagaagcaagttctcagatttgctggacatttccagagtttggatgatagaagcagatcttacacactggtaaattggaaatgggttattgatattcaagggactttatttttagccatgattttcttgctgtgaatattatttttcttaaartaaacataatgtatagtgctcgtacctcctcctttattgatacttatcttttattgggcacagaaaaacaggaataaaaggtagtcctttattattgaaatacattccattaaggtgcacaccaaaaattgattaaatgggcctttcttcttttttcccctcttaattttagatgtcagtttttaaacttcttctcatttgcatccaatgcgtcctcctagacagttaactctttcctacagttgtagtcatctccrtgctaatgaggctccaatctatatcttctgccctgacctagcactaagctctggatacataccttgcattatccacaggccagctctcctgagcttcttcagtgttgcctcaacctcattgtaatccattggatttcatctttatcttccctaaatgccacagttctgtccagggcatcaccactctctaaattctttagatgatgtcttggtccatttgtgttgctataaaggaatacctgaggctgggcaatttatgaagaaacagacacatttggctcatggttcagcaggctgtacaagaagcatggtgccagcatctgcttgtggtgagggtccaggctgctttcactcatggcggaaggcaaaggggagctggtgtgcagagatcacacagcaacagcagaagcaagagagaggggtaaggtgccagactctatttaacaaccagttattatgggaaccaacagcgaggactcactcactcacttgctcagtagtaccaagccattcatgagggatccacccccatgacctagacacctcccacctcacattaagctttaccttccacattggagatcaaatttcaatatgagcttaaggggacaaacatccaagcatccaatagcagataattaacctcaaaattatccttgacttgtccttctcatttaccctcagtagcctctgaaatatctcttatgtttgcctcttgctccccatgccccttgctaccatcccaggcctagcggtcattgcctcaaaccttgtccacagccatggtttcctaacccttcttgtttccagccacgtcccctccattccatttttctgccaccaaactaacctaaaatggccaatttcatagtttcactctctgctgatcaaatttcctgattctttttacctatgtttgttttgtgtcatcttcaacattttcttayatacagtaaatacttgcttaataaaaagtactaagagtgattgaaataaggaagttcggtcatgtgaattcattggagctatgttgactatcctttggcctagtttatagaaaattaccagctgattcatatctctatttaaggaatggagaactttgccagaaatatttttatattgcagctgcaaataagatagagttttcatctggacctcaatttccttaccttacaatagagaaaaatgccacctatggatatcctagatttgctggaagtattacatgtgatggattaaggcacccagcatgggatatcccacagatgcaaaatgaatcctacttgagtcttagtacaaaaagattgaatgaatgaatttgatggcaaaatgaaatgatgaatcattttatataaatcacaatttataaaattcagattcaactaaaatttggcactaattatgacctctgtgttaggtatattaacacatacgtcatcttctcatgtattcttagaagtaaccctgtgatacaggtggtctttttttcaatgtacagacaagtttagctgagaaaagggaaaatgccttactccaggattgttggtatatactggaattagggtttgtctctaagatttatgattccatatctttttgttttacatttttctttactttctttcttttttttttaagatggagtcttgctctgtcgcccaggctggagtatagtggcactatctaagctcactgcaacctctgcctcccaggttcaagcgattctcctgcctcaacctcctgagtagctgggacaacagatgtgcgccaccatgtcccgctaatttttgtgttttcagtagacacagggtttcaccatgttggccaggctggtcttgaactgctgacctcaagtgatcctcccgcctcagcctcccaagatgttgggattacatgagtgagccaccacatctggcctyttttgctttttctacgtatcatgctctcaaatatttttcttaccagtttttttcgtgtttttttttcaccttttaacatgagcattgttaaaatgctcacgacttaacgtttttactctcccattgaattacttagttcacactctttttcttttattttctgtatgcttattttaaaacctttgttcctatatttgtattctcggtggttcgaagagtctcaaacattgtctcagcagcagcatcatatcttacaaaagttgaggaaatactgtatttccagcttaggaaactgaaggtaagtagcacaatcaatttcaactggcatctgtttcaatgactctgtaaatgcaaatgggttgtaaaatgtcagtaaatatctagggagttgttataagctacaggtaagtgaattttctacttttgaaatggttgtagcctgcatcatttgctgagttccactttttaatacataggaatactgcagagacaacatttttatgtgtttgacattttatgaaaaaaaattgcaagtcatgaacagccctctttctttcttaagctacctgaaaataataactataattaacttttsttacattgttatcagaaaggaatagtcaaattagcattaaacagatgtaaagtcaaccttcatatggcagctgtgtatataaattctctggaagacctatcgtgcttagagaatgaattttagatatatatttattttattttattttattttwttttttttgagacagggtctcgtactttcgcccaggccggactgcagtggcgctatctcggctcactgcaagctccgccttctgggttcacgccattctcctgcctcaaccttccgagtagctgggaccacaggcacccgccaccgtgtccagctaattttttgtatttttaatagagacggggtttcaccgtgttagccaggatggtctcgatctcctgacctcgtgatccgccggcctcggcctcccaaagtgctgggattacaagcgtgagccaccgtgcctggccgaattttagatatatatttaaaatgtctaattactttagctctttggtttaatgttaaaacgccatattgtttatagaatcagcttgctttctcaactaatgaaatatgcattgaaattgctctatgtgcaacgcaccatgttaggtgctgtggaagggtgcaattcctgtactccagaagctgacatttcagttagatgtatatagcatcccgctctgttcatatatgctggcccctctgttcgaaatggccttcatcacttttctccctcctttatctggccagcttctatatatttctcaaggcccagctatacatcattttmgtttttaactgacaaataaaagaatatatatttatggtatacagtgtgatgttttaatgtatgtatacattgcggaataattaaactaagctaattaacttacctatcccctcatatacttttttttttcccgtgagaatatttaaaatctccyttagcaattttcaaggatatagtacattaactatagttacccttttgtacaataggtctctaggagttattcctcctgtctaactgaaattttgtactctatgaccaacatcttcccrtttttcttaccctccccccattgctcaactactccctgcttctataagtcaactttttaagatttcacataaaagtgagattaggcagtatttgtctttctgtgccaggcttattttacttagcataatgtccccctgattaatctatgatgtcacacatgacaaaatttccttctcttttaaagctgaatagtattccattgtgtatagagaccacattttctttattcattcatgtgatgctggatacttagaytgatgtcacatcttggctgtcatgaataatgctgcagtgaacatgggagtgcaggtatctgttctgagtgcatttcctttgggtatatgcctctgccatgcctggcacatttctcattaagcctttgagatttttgcactccctctcgctgcctgtctctgcactccccttgtctataaatctgaatcattctcctagaaccaagaacagaaccaactacataatttgtggccctcagtgcaaaataaaattgtggagtcctttgtttaaaaatgaagaatttttagacagcgacagcagagcattaaaycaagtgtggaggccttctgggcacaggcctgtgtgagactgcacaggcggctggattatatggtagttctacttttaattttttgaggaacctccatattctccagaatggctatactaatttgcactgaatccccaccaacagtgtacaaggtttccttttttctccatatccttgccaatgcttaccttctatccttttgataatagccatcctaacaggggtgagatggtatctcattgtgattaaagctatacttcttctaagatgccttcctacctggcaccttactgtcattttgcttttggtaccatatgcatctttctatcagagtttatcacaaggtattataattatgtttggcaacctccctgattgcaaacttcccaaatttatatgactgagtcttttaggtttgttttctgagtacctggtacatggtatgatcctaataagagcttgaggaatgaataaaaatgcaacaaacacatagagatatatagtcataaagattagttgacaaatgtggcatgcaataagtgtcaagaatgtcttataaaaagtactataggctttagcgggagaggaaaggatagattggtggtcacgggaagattcttggtcaggctagcctcctagcctgtgcccagaagggcttcacacttggtttaatgctctgctgtcactgtctaaaaattcctaatttttaaacaaaggactccacatttttattttgcactgrgggccacaaattatgtagttggttctgttcttggttctaggagagtgattcagatttatagacaaggggagtggagagacaggcagggagagtgagcacaaaaatctcacaggcataatgagaaatgtgtgaggcttccagagggtcaaggacaggccagcctgaagacactagagggcttacgttgttgctctgaggcttggaagatggattgagccaaagtttggacatttttctagcagcaatgagtaacttcagatgcacagggagcaggagaatgaagggagagaactgtagccttatgaagagtcatgtggtgctgctatgcaggatggagagaggagcactgagacaaaaaaaaacagggaaatcaggaagctaatccaaatgtgataaggcaaaagtggcaaagaaagaacaaaaccgagaaatactatgagggaaaaataaatgaaactttgaccacatgtgggaattgcaaaaaaaaaaaaaaaaagtaggactcaaggagtactctggaccatcctgggggtgtagtccactcttggcagaatgaaggaagagatgggctaggggcagcttctttgtcaaatgaatgatgagttcagttttagacactggagattattattggaatttcaaaatagacttgtttatttttcacttaaatatgaataactgttcatggagaagagaaattggaaaaggaaaggattgttaacagtgtcaaatattgcataaaaacaaggacattgaagactgagtagagtccagtttcagaagagtgatgagaacagcagcccaatagagattctatggaaatgaacaaaggtagcatttcttaaattcataatcctcttgtccaaaccactcctcctgaattcctcatctcattgaatgttactactctctaccacccagtttcccatgctccttccattatattcaatctctctcttcctctatagtcaatcagtcttttcttctcctttctgcctatcaactgtctctggaattcacccacatatcattatcccactgccaccatcatcaccttatgccctgccaaggcaaaggcctctgggatggtccagtctttattctccccactcttcttatagtccttgccatcttattcttctcactggagctagggggatttttctaaaactcaagtataattgtgtcactttccacttatgactctgttaggaattgtgccctaccaaaaatattgaagtgctaaatccaaatgcctatgaatgtggccttatttagaaatagggtctttgcagacaatcaagttaagatgagatcattaggatgggccctgatccaatatgactgtcatcttttttaaaaaggggaaatttagatgcaaatgtgtagataaaagcagaaattggggtgatgcctttataagccaaggataacaaatgttgccagcaaacccaccagaagctgggagagacacatggaataaattatctctcacaactctcagaaggaaccagtcctacaacactgtagttccatatttttaacttcagaactgtgagacaattcattttcgttattttaaaccactcagtttttggtactttgttaaaacagccctagaaagtaaatatggatcctaaaatggctccccattgcttgcagggtggtggttaatttttcatgtgtcaacttgactgggccatggagtgcccagatacttggtcaaacattattctgggtgttttggtgacagtgtttttgggtgatgttaacatttaacttggtagactgagttaagcaaatggccctccctaagggagtggccctcatccaatcagctgaaggcctgaatagagcaaaaaggttgaccaccccttgagtaagagagaattcttcctgactgactgcctttgaggtgagactggcttttttctccctttagactcaaactgaaacgctggctcttcctgggtctcaggcctgccagccttcaggctagaactacaccactggctctcctgggtctccagcttgctgaatcgtcatgaagatcttgggacttgtcagcctscctaatcacatgaagcaattccttgtaataaatctctttatacatacacatacatgcatacataaatacatacacacacacacacatacacacacatcctattgttctgtttcactggaaaactgattaatacacagggcaaagcccaaattccttaacacagttaaaagatccactatgacttggtctctgcaaaatcctccagcttttctctttctctgcactttcccccagcttcgctctcttgactgcagtagcatccagctttggtcatatttttgacatacctttatttctcccacctgatctttcacacatgccattcctttatgcttatagtacatttccacctttcctttccatgtcattcttcattaatttattcaacaaacatttctgaaatgttggatatggtgtttagaagttaataaagcaaacacggcccttggcctcatggaattcctagtaggagacaccaatatcaaatgaggcaataagtataccagagatgtcagcagtatgttggagaccatgaaataggtgataacactagccttaacacatatggaaaagctgaattctaaccctataatgagagacgccaaagagaagtaattcaaatcccaccatggacactcagcaaagctcagaactccgaggcaccagatacctttggaggcagagtgcaagagggacttgaaaaataggaagattagtagaaagtttatataaggagcagtaagacattccccaccttatccccacccacatgttgctwtataaaataaaaaaagaaacattcagaaaaaaagagtttttagctattgctatggtttgaatgtcccctccaaaactcatgttgaaatttaattgccaatgtgatagtattaagaggtgaggcctttaaggggtgattggccatcagggcactgccccatgtagaattgatgccattataagaaagcaagtttatcccagtcttgctttcttgccttcttgccttctgccacgggatgaggcagcaagaagaccctcataagatgctggcaccttatattggacttcccagcctccagaactgtgagccaatgaatttctgtttattataacttacccagtctgagatattttgttataacagcacaaaacagactacgagagaaattttgaggtgaaagcagaaataaaacgttcaatggaagttttgaagaaaatgtagaaaaattctctctgacagtagaataggaaggctaagaggcaggaaatgggaggaaaaaaagaaaattagaagattaatccaagaggcataacatgcaaataaatgtaatcccagggaaatagggcataggaaacagaggaaaggaaatgagagatggagagagaaaatatttcccagaactgagagacttgaatttcccaattagaaaagaccactgagtaacttgcacagtagatgaaaacagacttacactaggacaaatcaccaacaattttcagaacacctggcattaaaaaaaattctaaaaattttcagagagaaaccaaaaatgatgtgagagggaccataagtcagaatgatatcagatgtctcaacagcaaccttggaacctagaacacacaggaacaatcccttccaaattctgagaaaatgatttccagtgtggatttcaaagaatggagatcgttttcagctataaaatgtctcaagaaatttacgttccatagaacgtttctcaagaatctactagaggatatgctcattaaaacaaggaagtagacaaagaaagtggatggcatgtggtccagaaataggagattcagcctagatggagaataaaggagtccccagagtgatgaggtagggaagcttctagaaggcagctgggcagcaggaccgaacagaggaagggcctctccaagggggaaacaaggaatggattcatttcttgatgttttaaattgaattttagctctgttggagagtttatacagaattagtaataagtacrtagaaacctagcatatcaaaaaaagatacaaaaacataatgcaaaatattcctaactcagttatgaatattttgagttactgtaaaagctgagtattgatttaaataaaagggtattataaactgttctggaggatgatgggaaggttaacatgtatatgttggactgggggatgtgagagggtcaaatatttatctctcaagtaggaaggaaaaaatatatgaacatatatatacatatacataaatatatgtaggtatctgaacccaatcaagatacaccataagcataacatctagaaatatgtaataaaataacagaagaattagctaaaactgttcaaaatacttggttctagggaatgggaatcagaggtgaaggagtgtgtcgggagactggtgtttcatgagaagccttgaggtaatatttgacttctaaaaccaaatacatatattactttgattaataaattaaagaaaacatatgtccacacgcacaaagtgtacacaaatgttaattgcagcatttttataatatcaaatagtaggcagcatccaaatatccatcagctgatgagtaaataaaatgtgatatattcatacagtggaatagcattcttcyataaaaaggagtgaaggtcaggtgcagtggctcatgtctgtaatcccagcactttgggaggccgaggcaagaggatcacctgagcccaggaattcgagaccggcctggccaacatgacaagaccctgtctctatagaaaaaaaaaaaatttaaatatccaggtgtgatggtgcgtgcctgtagacccagctactcaggaagctgaggcgggaggatggcttgagcctaggagttcaaggcctcagcaagctataatcacaccactgcacttcagcctgggcgacagagtgagcccctatctcaaaataaatgaataaataataaaatgaagtagtgacatgttacaacatggatggaccttgaaaacatgctaagtgaaagaagctcgtcacaaaagagcatgtattgtgtaattccctttatatgaaatgtcccgaataggcaaatttatagagagagaaaataaactagtggttggctgtggctgggaatttgggagatgggggtgaatggggaggaatctctaacaggtacagagtttcttttggggatgatgaaaatgttctggaattatatagtgtaattgttgcacaactctgttaaaatacaacaaaccactgaattgtatactttttaaaggtgaattttatggtatgtaaatcatattgcaatgaagccattattttaaaaattaaagaaaaaaattaacaatcatacctaattcatagagttgttgtgaggaataaatgaaataatggatgttaggggtctagtccagagcctgacgtaaatattaagmgattagttaacacgtacataggatatactacgtgccaggcactcttctaagttctttacatatatcaattcacttaccccttgcaacaactgtctaaaatagacactgttcttacccccattttatagactaggaaactgaggccagtgcaagtaactaatttgcccaagatcacacagctagtacaacagtagagctggaacttgaccccagccagctggcccagcatctttactcttcaccactttgatgctccctctctctgcctcccaggtcccatgtctgggttagtgctgtgtgctcctagggacgctgcttttcgtctgttgtgcttccaagtagataactcttcacttgccttttttccttgtctgtgtcttcaactasagtggacattctacaatggcaaggactgtacccatcttaattcatcttcattccctgcccatgatatrttgggatgagggtgggctgcagagtgaagcaaaggtgtttttctcttcatacaaatcccatgagtgcatggagaggaagtggggagagctgaagatgctagcattaagatgctagagaaacacgagacaattgatggagcaagatatctaaggaagtagaatattaagagtgagatagtgttgaaacactgaccttgggaagaaagaagaatgccgcttccattaagactgaaagagaggaggaagaggtggatattgtggaagtagagaggaagctcataccagackacttggatcatctcagtcaagaaggggcaacagaagaatcttgggccaggacaaagcataggagggtgaagtggaaggttgaggcaagaggagagagtttagaataaatacccaactttttggggtctgtgatctctttactaatacaatggacccttctcccagaaaaaaagtacatacacacaaaattgtgcatttagttttaggggtctatggactccaggttgagaatgcctgttctcaagacttagtaaaattgaatagaagtatttctgaaagtaatttgaagtcaagcatcttgactttttagcattccaagtttgtgtttctgtgactttcctcagcaatatttagaggcctgagagtagcaggtgatctgatatctgggactgaggccagaggcttcagggcaggagagggtgrratgaagtctgagagggtggtagggcttagaggaaggcaaaacccaggccaggaacaggtggcagtggaggctcatagagggtgggctgagaaaggtccactccggcttcaggccataagggggcgcactgtctgtacagaacataaaaacgtaagaaaaccaaaagtcagtcttctgtttactagtactatgctgcacaagcaatttaaaacaccaacagcaaaaaaatacacttctctgaaaaagtcttggtctaggacctaaacaattgcctgaaactgggtagacttacaccaatgagaggcagataaagagattaagattgagggagtagggcagggcttgcaatggtgccggccaggatgtggctgagggggtgtgggtgcctgccgtggatgctagggtagaagacgactctattaactgggtggctgtaagcagtacccaggtcaatgcctttcatcttctacaacctcgacgttgcctggaatcctaaatctttttcttcacttaacaaacatcacctctgctcaaatctgcaactgctttgatatcacactgcctttttcacccctctattatagatggcatttatttacttacatgttttttccccactagactatactccttgagaacagcgattgtgtcttatttatttctgaatcaccaattcagacaggcatgcaaacacttgytgaacyaatgcacaaatrtattttgctcttcttcatagattcctccggcctcagatgaccaggcaccactagatacagaayactgtgctttccttctccaaggtaaaggaataaatatctgttccccttcatgaagtgttactgttgggcctttatgccatcctgaagccaccaggatgtggaaccagatcagggaggtccacagttacaaccccttgtatctgtaacaccagcaggacattatctacagagtcctgctgcagggccccgaatgaagacagcattttgctgctttgtagcgtgagcagtgctgtaacagtgatgcatggatgttcctctggtgtcctgaaagaatgtaggtgcttcttgaaagctctctgcaacttattaattgggagtgattatgcgatggagaaaacagagtcccatcaccccctsagtcttccctgggaaatcacaagagggctgatagctctctgtgaggtgaaccgtttctagaatccccaccgtctcgtcctgttcttccgcccacccagttcctcaagatagcccctgtgggcttctgatgaagtcaccacaccactggctaatgaagtagataaaccagaacagtttggtttaacatttaaggtcagaaacaggaactttctagaggagaaatcaaaaaagcaaaagaagtataagggcagccctccaaccagtcagaataccgtgaccacctgagaggcccgtggcccagcggacacggacgcatgtcaactctggagcagatatcttcagcgcagcatctgacctgggagtacagccacataccctcattcctaaacggcagattgactactgsagycacacacagtctccgggcaatgtggagacatgtctaatatttagtcaacataactcagggtgccacagtcttcacaactgttgtgagcacttgaggatgctscatttgaagataggaatttgccctcaagcatctggggtttgggtacagaacagagcttcccctgccaccacctgctaattttataaaatgtgcattcaaaaaaaaatcctgcctgtaagaaggaattaagctacccatttaaatataacagctgcctgtgcaatctactgctgctctttataggaaacgcttaaataattgagatacttaattgggttaaagagatccctagcacatagatgttctataaataaaagaatgagtaaataatctagtaaccttccttttcatgtccttcacttaaagagatcgttctgttttgtttgcaccaataagatcactgttagaggactccagagaggtttgatttcaggtggggtggggctttcccaaggaagtcccttttcatttgtttcaggtgtactgccacctttttccctggctctttcactaaaaatgaaaaatttgttgatctttgctgtaagtaggtaggcatctgggctttgcttttgcaactagagtcaaagaagtcaagttatcaggctgatcttgccttgctatctagaatcagaaaggtttaagtagcccagggactactcaaagacagctggaggagaaagggagagagaaaaatgcttataaagaggtgggcaaaagagcgggaccttgtctcaaaaaaaaaaaaaaaaaagaggaagtggtaggaggtgtctgaatttcactgtgacctgttctgtcaggtgatttttggtggggcggggacatgaaaaaaaagttaaaatgtccttataaagacaaaatctttttctttcctggctgatgatttgtcattctagtcacttcctgccttgtgaccacacacccrggcttgacaaagctgttctgcagatcagaaagaaggggttcctggtcatacaccagtactaccaaggacagcttttttcctgcaaggtaaatgttcttcatgtgtttttgttggttttaagcgcttgtgatgcacttcggcactgtttctgtggattgtgggttttgccttcaggggaccagagatctgagcatgtcacctgagacctctgtgattcctgccactgtctaactggccaggacatctgccgccacctcgcgtggccatccaagatggagcacctcggctctctgggctgggttcttctcaacttatctgcagttatcacccctgcccaaaattaaggtttctttttccttttaaaaccaaaccatgttctggtttatttctattgctctatttcacggaggctatttactgtgattttatcttctttaaaatgttttcaggaaaagcgcgtattgataatttagattgtayggcttattggcccaatgggggtagtttaattttagttcctgcggttctgtttttctaaaaaacttctttacagtactttagtggataaattatctagagtcatatgttactgaatgtgatactggttatttgagtgatttttggcgccaagggtttttaatgggtgtgctttataaccacatggaattagaggttttctcttttccatttgttctctaaaaataaaagcaatttgtataatgcttaattgtagtgtttttgtaggattgtctgaattatttgttatgcttatgaccatatcaatgaatattcactcaaattctgggagaaaggcttttatctacaatagaaatttttacacagttgatatgggatatttatttcagaaactgcccaaacatagacactttggattttgtagtataagcttttacttaattaccactatcacataacactaagaaccattgacaaatgataactataaaagccattcagactggaaatgcgaacattaatcaggatgtttatcaaaaccgaacttttcttttacacagcaacttgttttctaaaattactctgtcagaactatcagtaagcaaataaaggtggcttatccacacacatcttgattttgaatttacatacatttgtcataagtttggtttctattaagtataattgtttaaagaatgtctgtgtagacaaatttgaatagaattaatcatttacctataaatgtgaatttctggaaactgcaaaatgtgaccaccaatgttactttgcacatctcacctgaatagtttcaaacaagcaaaaatgtgaaactgagataagagggacttgaaccccgtaaaagaacagactaaaaatatgttgtgtcttattttaagtaaaactattaatgagaataaaataaattcgaatgtgaaggaatgtcagtatttttcttatatttacgaaggaataaaaaagaactatgcgaaagttaattcaaaatataaaggtcccctgtttaaagttaagtttacattgctaaagcatcaaccccatatgttacaaagatattcctcttcattctagctcacccccaggaacatcaggggaaaaatcttctaggtcttgccctttgaacaagcactgctgtggtgggatggagttgtgcctaggaggacatttccttagcaatcccagagacccttttctttgtagcatttaaatttttgtctcttttgtaaattatgccttgaaacaattggtaatttgggaaacaatttcagtgctttaacttcatttataattctatctctgaaccctttggggaagggaagaccaacaagtaaagtctcatttacttgttgttaaagtaccatttaacttggagaggacaggaaattaataatagcactcaataattatgagcacgtagtgtaagcagctactctttatgcattacctcgtttaatcctctcagctacctttagagataaggaatgggctagataattgaaggaaccggccataggtcactgggcagttggggtggggggcagtagatggccaggatttcaggctcctactgactgtgtgtgttacagatcctcccttccaggccagcatatttttctcagaggtaggtgattatagacttttattactgaagctagctaacaagatcttggcactcacagttttaagagagaataaaagagagagagcaagagaaagaagagagagagagagagaagaaaaactttgtaataaatttacaaacatttttatttttataaataagagataccattgcaggttttatataataatgggctgaagaactatttttaaattaatgcataattttactaaagaattgtgtgcctttacaaacttgcctcgacccacttccccaatcttatttcttgtcacttccttctgttcaacctcccactaccccatcccctcccccgccactgctaacccacattttggtgcaccagaccacaagccaccagaaagttccattctctttcaccttttttcactgcaactgtttctttaattgcattcttctttatttttaaaacttctgatcatttttcaaggcggacttcaagaaacatacccttttggaggccttcccatcttctccctgcccccactaaatgtttctttggtgtgcatttgctcaatgctttgatcttggagtaagtataacattaatcacattgtcttagtttcaagtacttatttgctgacagacctgagctccttctccatctytcctggcacatgtagatactaaaggcatttattgaattgaaaatttgtcacaagtattttttttctcagcttcttacatacgcatgaaagactttgattgtacttattaacttaatatttactgagtttccatttattgctatgaatgaagatgcaacaataatataatattttgcattctaccatgtttcagctttaccgaagccctagtctcattttagcttcaaagtatcatatagacattgacctcaagaaatttaaaaaattgtacaatgactaacaaacagggaaaattacaatctcatttttttagtataaatacattggttgggccaaaacttagctacccttgccaaaactatatrcccaataatgggcctctttgatgacaaagaacacaagggcagttgttaacttttacttagtcactttggattattctcagaaaattctcaagtcaacttctccttgttacctaaagagtacaggcccttctgtgtatacaggagagatggcaagcaacttttaaaatcagcttaggtaaaataaaattaagaaatctgcttataaggttatacttatgaagagtcaaacacttataaaataagattataaaggcttggactttattactaatagtagattttatagtagagtgacattatttcagttaatctaattttcttcctagtgtttttttatctgctagtttcccaacttacagatatcaaatgaaatgatactatttcatctgtataytgaacactgcagaaataaacattagaattaggacacatcaaaatataaaactaatcagtgtccacagatttgaagagtttcaagtgttcctattttgccagatggaagygcactycttaaaaaagtgttaatgttctacagkgtcttcattttgaggctctcggaagtcacctcctgattagatgttggtttcctagggatatctccctatagctgctgtggccgtggtgttccccagatggcatctccttgttgctttcctcagttcccttctgatccaacttcctgccttatactattgactgttcctgttgttttggtttgtcagtttcaatgcttacatcagtctgcccagaaattgcataactgctccatcttgtaagatatcggtgggggatgggggggagtggaaggcgcttcaattaatcatcctaataataacgttaatacttacattgaatcaggtgtttttctaagtgctttaaccctatgaaagcatttagttgtcatacagtcctgtgaggtagtgtctggtgtcctcttcatatttgaaggcaagttcattcattcacgtattttatttaattttctacaattggatcaattttgtcttaactgttgaatttcaaggcaacttcctggaataaacaggtagcaaaccatggtgcttatttgtaactaagccctcaagttgagctcaaataatcataatacttccccaaataaatgcatctatatgataagtgcttttataaacaaattattctgtgtcatcatatcatcatcatcatcattatcatcaccatcagcagcagcagcagcarcaacagcatcagtagtcagcccctctgtacacttgactgagtagaagttggttgttaacaattacaggcctctgcatgggtcacaaaacatgatctccaccctcaaaaactttaaaaggttcttagtcttttgtttgtttgtttgtttgttttttgagacagagtttcactctgtcgcccaggctggagtgcagtggcgcgatctcggctcactgaaacctctgcctcctggctcacccaggctggagtacagttgcgtgatctcggcttactgaaacctccgcctcctgggttcaagcgattctcctgcctcagcctcccgagtagctgggactacaggcgcccaccaccacgcccggctaattttttgtatttttagtagagacgggtttcaccttgttagccaggacggtctcgatctcctgacctcgtgatctgcctgcctcggcctcccaaagtgctgggattacaggcgtgagccaccgcgcccggcctttaaagtttagaataattttagtcaagtggcattcacattttctagtctgttgtgactgatagacatgaatagattaaacattctactttttatacccaagtacacatatctatgattgtatagtaatggccaaatataagtgtcctaaaaactgagaaagaatgaaacattgctttaaatgttagtggaagaagagaggtaaaagtgaaccacttactgggtttaagtaagttttgctcaacttcagagccatggctgtgtcagccccacttgcaagtacaaggagcctgttactcaaagatggtcagttgttctttctggcggaaggaaaagctatgttaaattggggaactagcaaacccacagttctgtggttgcagcattgattcttatttcagcatctgttacatggacagaagggagggtctccctccctctctctctctcgctctctyacacacacacacacacacacacacacaaataaacacacatacacggaaacacacacacacactcactcacacactccttcttgactggataagctaaagtgaaaaagagattatgttttccatagcagaaaagctgacaccaaattcagcaagcagattaattatgcatgtgaattgcaatctcccagataatttgctttccttctttttctggttgcactttctagagggaagtgaattaatggaacaattaccttgtatttaaataataccctgcattttgtttcctcagtctggtagtagtcactaaaatttatccaagctatgtatccaaatgtgtgaagtaaaaggatacacaaatgttatttgtataaaatttgcatattttccctattcagcattccttaggcaaagtttaaaattagaagtggatctttattaacctcaggtgcaactttttttccataaaaaccttttataataattcatgagattataatagatgtgwgtgcattcaatatagcttccatcctgaaaatgttttttcagtttttatttatttttaaattgacatataacggtatgtatttatggggtacctagtaatgtttcaatacatacaatgtctagtgatgagatcagggtaatcagcatatccatcatctcaaacattttttatttcttgtgctggaaacattcaatcgcctctcttctagccattttaaaactatgtactgttaactatagttatcctatagtgctatagaacatgagagcttattcctcctgtctagctataattttgtatctaaacaaatctctcctatcctccaccttccccctacccttcccagcctctagtaatctcaggtgtaacatttaaaaagtagatcctttgtacctccttgacatcatctgctcatatcaccctcaccagaaaggccagcttgaacaaagaagagtgggatataaattctttatagagaaagctaggtaataggtgcaaagtgggagtaaggaaaaaagagaagatcaygcctgtagttttgcactgttgagcactcttttgtcatcttaaaaatgcgaactgaacttcccccactgtttctaatgctttataaacagttttaaagtttccctttgaaaatatggaatatggtaggcaccttggaaaactttggattttttccttttcttgctgtcattcatgttgggactgttcctcaaaatatcatggattctgtttcttttctgtgaccactgagaatgacagttgtgatacttcatctacctggtgatgttcacacagtttttctcctccctccgtacccaccctactgttcactgcacgcagttcttcctccagtatcatatctccagtaccagttctttaaagctgagtgtctgcagctcccaggcacaaaagaggcaaatgtggtataaagaaaggggagcaaaggtagagacagatttggatttatattctgggctcttggtaaatgtggaggctgagcaagtctctggagcctctgaagttcagtttcctcatctataaaatcaggcaagtgctatctactcgctaggtgtgatgtgggttattttccccttccattttcccatgttgtcgtctakgtagatatggagcatatctactccacccagcgtcaccactgacttactgagcccctaatatttactaggcatcatgccaaacgcttgaaagataattactcttttattttcatacatagctaggtaaagttgttattaattatatccttattccagatgaccaarctgaggttcagggagggttaagtgacttgtctggggtcacagaaccagtaactggcagagtcaagatycacacctttcctctctctcattttatgttggcagtttcttaaaagtataatccatgtctatttaaactgttttgtatcttctaacatgatccactagttgcttcctgataatatgtctatatacttttttgtgtttccatgattattgaatgattatttgtaattccacattttctttcttttttctttttttttttttttttgaagatggagttttcgctcttgttgcccaggcacaatcttagctcactgcaacttccgcctactgggttcaagagattctcctgcctcagcctcctgagtagctgggattacaggcacacaccaccacgctcagctaatgtttttgtatttttagtagagacagggtttcaccacattggccaggctggtcttgaactcctgacctcaggcgatccccctacttcggcctcccaaagttctgggattacaagtgtgagtcactgcacccggcctataattccacatgttctatcaggaagagatcccaagtctccttttgttaggtcggctggtataccaaacatatttgagaaataaatataaatgcttgaggattttatggtgggaagtctttaaaataatagctgtgaagatattagattaggctatttaggcacttaaaattttgataaaagaaatgttatacatattccattgtacgttggtattggtaaatatttaccaactaaactgtaacttttaaaaaaaatgaagataaagagagcccatcaaattaatacaaatttcctgtctcaatttatctgtaacttctccttttgtttttttctgcaaataagcttgtcattagagattctaaaatccaagaagcctattgagaatgagatcacattattacaaataaatagaagtttctgttatcattgcttgtatacaaatgtctgctgtacattgtctcactgtttttcagctcagactacaatggtaaaaatgcctggagaattagagagtggagaggaggtagagtgtagtgcaggataacagaatcagttctgagcattggtgcatctgacagagaggagatgttgcccagtggtcctcatcacagatgcccagagatctcttttcttttcatggctcatagtgtatgtggttgggcttttcttaagattgctgtacatttttccactctggccatacttcctcaactgttagaaggtactttccactgtcagtactcaggcaaggcaaagcccggagccccttcaccactcaggatgagctaataccaatgctgttggctttgggttggtatcatgtaccagttctgcaatacctgacttcaaggactccgaataagaaatgtggtaccaaagccaaaataagccagactgagaacattaaaacatagagcatggatgtgagatctagatttacacccacacaaaacacatagtatacacacaactaatctttgcttttaagttgcgacttgacaatatttcctacagtttatactagaaattgggatttgttctccaagataattttgcaaaagttctagttcttttacattttcttttaacttcctctgttccttcccttttccttctttctttccttcctctcttcctctctttctcccttcagtcaccaggcactgttgtatatattttaaacactctgtctcacctaatcctaatgctgccctatgaaatgaacggtgtgattgcattattagcaccccttctttaaagatgaagaaactgaggctcggaaaatttaagtaacacattcaaatacacacagcaaaaaatagttgagtcagaaaattcagcatttcaccataccatgtcactgcctagttgattcattttaaaaacaatatataatgatcctaatttcataaaggaagcgaggaacattagcttttgtttggaatgcctttacatgggtgtatccctgtatcctagatccacacatctaagaagtaaagcacatttcayggaccgtgcatctcaaaggttttttaaataaaactttaggttcttaaaatgccarctgacttgtgtttttcccacgcattgcttcraccaaactaagactccagaggttccacttacttctctttttggaccagtcactgacttactttgagactttggggagtgacttcaccctccagggcccctatttccccattctaacatgttcagttccctcctgtctttgcagtattttctaaatgggagataatgacataaggagaaagctatgcacacacaaaccaaaatggtttccgggcagaattattttgttgtttgtattcacattacctgtggtgagtggagtatagcctgcatcaccgaggttttgcctctagaaacaagagctagtgagaacgagcagcacgctgacaccacctcaccaacctctcatcctggaggtctcctcctgcatccctgtctgtagccacacccaacctgccacagcttcctgtgtgtgcttttgctttgcactttgtagagctattttctctttcttttcttttctttcttccttttttttaatgtaatggagccttgctctgtggcccagactggagtgcaatggcgtgatctcagctcactgcaacctctgcctcccgggttcaagtgattctcctgcctcagcctcatgagtagctgggattacaggcacccatcaccatgcctggctaatttttgtatttttagtagagatgggttttcaccatgttggccaggctggttttgaactcctgacctcaggtgatccacccatctcagcctcccaaagtacagggattacaggcgtgagccaccatgcctcgccctgcagagctattttctctgcctgaaatgcccttttctattttgtctgtttggaaaactactggttccctaagacttagctcagtgggcaacatcaccttctctggaaaaccttcttttgccttcccaggcagagttaaatacagttgttccatggtatccacagggcactggttccagtaaccccctcggtactaaaatccatacatactcaagtcctgcagtcagccctgtggtacccacatgtacgaaaagttggcccttggtcgccctgagtttcgcattctgcgaatacttgtattttccatccacatttggttgcagatgctgaccctgaggacaatgagggctgactgtattgaagaaaattgcgtataattggacgcacaccattgaaacctgtgttgttcataggtccactgcacttcattctctgtgctcctgtagctccatgcaaataatatctttaaaatattcatattagtgtagtcttgcatttgcgtgactattttgtttactggactgtgtgcccctcaggagcaaggattctctgctgttcatcttggtatctttagtacttaggacaaggtatgtgctttattaaatgtgagtgaatgactgaggtgtggaggccacgggcaaagaggacccttttctccaccagtggcaggggggacacaggcagaaaagatcaagcctggttgtgttcttgctcttcttaatacttcctttaaagatgttgagaaaccgaagacacatttagaacttccctaaagagcctaggaagggcccagtcctaagtaaaaycttgcagaaatatgtgtttccctaattaacatgaggtcagagctttgaccttcaagggcaaccccaaaggatggcagggaaactcgagatacaggaatcccatagccagaaatgataggaaaggcaggaggccactccagtttatagctgtgcgaccctgggccagctatttaaacctcagtttcctcaaagtgggaatcatagtaataccctataggattgtggtgagaattaaatgtgaatgcatgtaaaacatttagcactgagttaaccactcattaatgttaacggctattattactgaccaactggtcttttcatttgttctttagctatttgccctttctctgactccaaatagataggctttctatagagagagcatggagtctctgatgaatgaagaaaaaaacagactgatctttaagcaatctcctactgctctgttgaaatctaggtcaaatgtcacttcctctagggggccgcctttggctctccaggggagagctattttttccctcttcctgtggatctaaaaagtttcgctgtattctagttactgtgtctctctcccctactcaacaggccaaagccacgtctgtgtgttctcagcatctaacacaggacctggcatatagtaggtgtttggcagatgtctattgaaggaagaaatttacaaatgtatgaatttttttagtgacagacatttagaattactgggggatgaatagcattgttcagatagtgagacgcaaattacatgcaggtaaatgctagcacctatatttccagcttgctccttggtacaccgcatatgtgcatcccaggtgggtttgcccctcattcagtcactgctctgtctccaaggttcctttccctcccacctcagcagcgctcagcttacaagcaggccctacagagttggatagagacccactgccaagcattaccggcagccagcaggttttacagcaacagtgccaagaagcccagcctcaggatctgcaatctcagacagaatcgcttttgcggctggcaaggtagggctaggcagcaggcacaggtgccatttcacagaytacctcgggccagcagctgccctttagacaccaaattaactcaccaaagttgtctttccagcaaagtggtttaatgtgaatttgaagcatttagtagccttgttttgggtgtctgtacctttcagtggatgggattgtctaagtatgtacacaagaatattattgttaaattcctcaaagaaggtgataggggacttttcaagtcctgtataccattaggttatggattgttttgttcatgtacacagctcatttactgagtacctcacatgggccagacactaatctgctaggagagatgaatggwaacagggaccacactacagagatctggaccaaagctcagaggaagggctcactgattctccccagcctccagaacaggatgcctgaaaccatgatgattgttgcgataagtctgagggtgtcattttattattgatctatgaatttggctgtcttgtcttttgaacatttcatctcgtggtgagttgttttaattgggtttgctctttggttgctaaggaaatttggagggccttagtgcaaggtcaagaatcaatgtacaacaaggtgtggtggtgcacgcctgtagtcctagctacttgggaggctgaggcaggagggtggcttgagtccaggagttctgggctgtagtgtgccatgtcaattgggtgtcagcactaagtttggcatcaatatgggagcaggggaccactaggttgtttaaggaggagtgggtgcactggctcacaccagaaatggagcaggtcaaaactcctgtgctgatcagtagtgggatcacacctgtgaagagccactgcactcctgcctaggcaacatagtgagatctgtctctttaaggaaaaaaaatagaataaatgtatagagacaaatgcagggggtaagaatcatcgtgacctagaagatgccagtgtacacaatatttgtatgtgatttggcacatgttaattgcagcctaaacctgaacagtgcctttgccatacctagaaaaattccccttcatgtacaagaaacatacatgaaattatattcgtaagacatttgaaatcttgggggattgttcttactatatgtgaagaaggtcttaattaaagagaagagtcctatcttagggtttaaaacttattaaagaggaaagaagagaaataaggaggcctggactctggtcccagccacacctccaataagctctgtgatgttaggcatgtcctttaacttgggtgtcatttcatgcctctgtgacaggggagtggccagatagatcatctctaagatccctccacctctacattctatgactgctattcttactacattcattctataaggaagttggcatagacccagaagatagcaaagaaaactatgaaagatttggagaataagccctaaaaaagcaggttacaagaatataaagagaccaaggcatgtgatggaatctttatgaattgaacagctcctgttatttcctctgagaatagcccaagagagaccttcaatcgtatcagaaaagatttaggttacaaagtagggatatgagacaccagagaggttgtaggatttccttatttggatatttttaacaaaatagtagatgactctctttctgggacagtttgagtaccgtcttgcctagaaactaggagtgaactggatcaacgtgtcttaagctgtgtgtggtaacatcccataaaacaggtctcacgtgctgctctgggaacttccctgatctgtgcgggggcagtccagcagctaggcagctgagcagagcgcatctgcctggggccagtgaggagaatgcatctagacagagcttttcgtgctgctgaggtaagagcaggaacacagccccccagcccccaggagcgaggctgggctgggagctgcccactccctcacttgctccatttcacagaaggcacctccgagccaaagctacagctgctgatggcgccagcagctatttctcagctcatttgcaatactttctaatctagctctaatttgtatgtatacttgtcagctactgcatagaattttggaacttttaacatagaacggactccgcttctcaatttatgaatgagaaaactgagtcccatagaggcaagatggagcctaaagttacacagcctaggtctcctgactgccaagcttggcacttccttctatttcctgccagttatttccattttgatttctttggagatgttcaagtatattaattgtctcaatatcttaattgcctgggctgctttaggtattttatatttttatttttttgataagcctctgtgctaatttcttacacttatctagttttatttttccctcagagccttgtgtttaaccttttcacttgttcgtttttgatcgtcagaactcttttcattgcattaactatttcacagtaaattagctgtaatccatgtgctgcatttgaaacttgatatttaactgtgggcttcatgcctgaagcccctcaccaaccccctagcagccagggcagtactttgcatacagacacatatatggagtgaaagaatgaatgaatggcatttgatatcaaggtaatagtgcaatcatggttaaacagctagcccataatattcaatttattgaaaagatgcatttggggtactctgagctttcagtaggggaaagtctggatcttaaattgcttctggtagaatgtgggctaaagggtagctgtagaatttaaagatgttagtatcaggagcatcactgtctaaagctcagggaaggagagagatgctaaggcacagaaaggcctccccaagccccagcctggagtatccccttttcttgcaggaggcttgttcttgtgtcacacccttaatgggattgggcaacttggtagaaaacagaggtatcaggaatgtactaagggagagaaggaaggaatgagaactccttagctggcgacagagccaggctctgtaagatgtgctacacagcttcagaagcccctcggtgtagtggtcaaaccagaggtacccagagcaatatgaggttgatgaagtttggagtaatctggattgctagcttcccataagtgtttatgtggcctgagataatagtgtcagaggagagccgttgagtctctcctcctgaatagccttccccctaccttccaccctgtggcatttacatcagagcctgcagagagaagaattctgtaggctttgagagaatccatgtatctgcagggagaaaaaggacaatctggaggagattctgacttgacaaaaagattcatcagagtccctttaactggccatctgtttttaaggccatttataattatttggtttcttaaaaacaaagtcattttaaaattatattttctgaatcatcctttatgtaaaagttagtcatatctgtatccatagagatatgatatcccaagaatatatagtaaattccatatattcgcaaagtaagatctcctacagtggtctactttataaaatgaaggggacaggattaagtaaaagcaatgttttttccttaaatagattaatcttgatggctttttaaaaatgtatgggtattttattttgcttcatagtcctacatattttatttttcgtttctttagttgtcatagtctaatgctaaagcttacaatattaatgttattctagatgatgtgttcttttggattactgattgttcttgagatgtttggaagttgtataatttcccctctggaaatgtactgaaatttattgaggcagagctaggaacttgagtcctgagtgtccggtttgactttaactactgaatcaagttgcaggaaaagtggggcacattcaaaagagtcccttggcaaggtgataccaggtcacagatgcctccctgatcctggcaggttatatgattcagcatcagtatattgaatcaaaatactgactagcccagcactaccatctttcagaaatgattccaccccttgagcatctctctctagacaggtcaccttttctagcctttctgcttttaattatcagttatgaaactccccagagaaaattccatttacatttttacatttactttagaggatgttttttcttctgtaaattctgcagcactgtgttcaagagtaaactcccacaaattgtttctatattcagactttagagaacttaagttcaggtacttttatgataactcatcctcagaaattcccttcgctactgacttgggaaataccagcaccctttaagcagaaactcaaaactcactgatttaagaaatgaacaggctttgtggcttttgcagtttgaggtggggctttttttttcttaaggttttaaaaataatataattttttaaaatgaacaaccaatgctttttttttggccaacgtcttgagattctacaactattgatttaataaatttaagtgctctcacatgcactcacacaaaaaactagcagcccagacgtgaccttgatgaatgagttgtctttttataatagatttttgatttgggcagtaattcagaaggggatttcccagattgaccacggatttgcagaagacctgaaaatggtttgtggcagggcatatttagatgatgtagtcattaaaaagggccacactcaatgcaggagcagtcgggcagagctgaagaaaccactcacttataccttggaagatacatgctttctttagcccctccttttaagctccagatgcctcagcatgcccattactgcagcagtatctgtatagtttgctgcctatatggtgccagtaatttgcaaactaaagccatcaccaactaatcttacttatattacttattaatcttataatattatcataacccatattttcaaatatgcgtgaattaaaatgggtgcatttttgttttttttttgtttttgaaatggggtctcgctctgtcacccaggttggagtgcagtggcatgatctcagttcactgcaacctccgcttcctgggttcaagtgatcctcccacctcagcctcccgagtagctgggatcacaggcatgcaccaccacacctagataatttttgtatttttggtagagatggggtttcaccatgttgcccaggctggtctcgaacacctaagctcaaagcaatccgtgcacctcggcctcccaacatgttgggatcacaggcatgagccactgcacctggctcaatgtctttcttaaaaatgatctggtctgcctgtttttacactaattatgtcctcttcctgctgctttgctttgtgaaattactgccctttgcacattcagtttaattacttaaaggtctctgctcagttatggaccttaggggcccttttaatggtaactccatccttttcctgctctgctcatcagcacctgcatttacaagctccagcctggcattgccttgagaatttgtacatggataaaacatttcttctcattagaacttcagtttccttatttataaaatgaggacattgtaataaattatttatgaggttccttctgtctccaaaagttaggttgtgtttccaggatatgctgctcatgctgatggtaaaagggactctctccagatatctattcatgtttctgcccaacaacaacaaacagtatcacagcaatgtcagttgctgattatcccttctccactttaccttttaaactaagttaatccacttctcttttgcatttgctgttaaatcactgaagcattttggattttttaaatttaaaggtgttcttgctgtttgacttctctgagtttatcctctccactcataaatctcgtagaaaaatattgttacagatgctcaaggcttttcatcttgacctacctgctgtggtttaaaaataatatgattttaaaatacatgtactttctatgtcttttaaatgaatgggccactgcaatttttatggtaaaaaaaatttcccattataccatgatctttagatattttttagattttctttttttacccaacactgtaattgttttgtttcttcattggccctacttgtgacacttagaatgtagtcttgttctctgcttctacttatatttatcgctagctgctgatagcgctctaaaatctaacattcttgtgtcaagggataaggccaggtttagagtcagagatcttgtttgtcctccttacctttgacattgttccatgctttcaggataactaactgggtcaatatagacgtgcttacctaaaatgaagaatagcacctggcttatagtaggcattcataaaatatttgttaaatgaatgaatgtatcttataatcccataaacacctatgaaccaagaggtcttaagacatttaaaaacatgaagggctggacagccggagagctggagagccttctattcatgcatatgtggatatggtagagggtatagaagagacctaagccaagttagtcacaaggatttagcaaagtatattaatacaaagttctatactaattccttaaaacagaagccttgatttctgagcacaggaaagcaaaagctttctactagaatgactggacaagctcactatattgtagttttaaaaatctcccatggggctatccatagtccatatacttaataactcattgkttttttttttttttttttaattgatcattcttgggtgtttctcgcagagggggatttggcagggtcacaggacaatagtggagggaaggtcagcagataaacaagtgaacaaaggtgtctggttttcctaggcagaggaccctgcggccttccgcagtgtttgtgtccctgggtacttgagattagggagtggtgatgactcttaacgagcatgctgccttcaagcatctgtttaacaaagcacatctggcaccgcccttaatccatttaaccctgagtggacacagcacatgtttcagagagcacggggttgggggtaaggttatagattaacagcatcccaaggcagaagaatttttcttaatacagaacaaaatggagcctcctatgtctacttctttctacacagacacagcaacaatctgatttctctatcttttccccacatttcccccttttctgttccacaaaaccgccattgtcatcmtggcccgttctcaatgagctgttgggtacacctcccagacggggtggcggccgggcagaggggctcctcacttctcagaaggggcggcagggcagaggcgccccccacctccctcccggacggggcggctggccgggcgggggctgccccccacctccctccccgacggggcggctgccggctggagacgctcctcacttcccagacggggtggctgccaggcggaggggcgcctcacttttcagacagggcggctgccgggcggaggggctcctcacttctcagacggggcagccgtgcagagacgctcctcacctcccagacggggtcgcggccgggcagaggcgctcctcacatcccagacggggcggcggggcagaggcgctccccacatctcagacgatgggcggccaggcagagacgctcctcacttcccggaaggggtggcggctgggcagaggctgcaatctcggcactttgggaggccaaggcaggcggctgggaggtggaggttgtagctagccgagatcacgccactgcactccagcctgggcaacattgagcactgagtgaacgagactccgcctgcaatcccagcacctccggaggccgaggctggcagatcactcacggttaggagctggagaccagcccggccaacacagcgaaaccccgtctccaccaaaaaaatacgaaaacgagtcaggcgtggaggcgcgcgcctgcaatcgcaggcacttggcaggctgaggcaggagaatcaggcagggaggttgcagtgagcccatacggcagcagtacagtccagcttctgctcggcatcagagggagaacgtggaaagagagggagagggagaccgtgggttgagggagacgggagagggagggggagggggagggagggggagggggagggagagggagaactcattgtttagtgaataaatggatggatgggatgtgtgtctaacaggaacatgaaggcagagaacccgagtagacagcctgggagaggagaaaagacttggggattggagttttggctgcttctccacccagctgagtgatttgagatctgtatcttaacttctctgagatactgttttctgatctatacaatgagaatatacatacctatgccatcagcctatattgaaggacattgtaagaaacacaaaacctgtgtttaccccatcccacaaatggcctcttcttaaagcctstgtgaagattttgctgtcagacatcagatctgctgccctaagaaaattggtttgtctcatagatagtgaattgtataaccgatgatactttcctttttgccttagcttctagagaacttggagatagattttcagcctacttgtagcaaaacatgcggggtcttaggcatgtattttaagtattagagttcctcccgaccatcatcttatttcagttacgctttctttcttatcaattacatcatttagttggtttaactcttgggtttggatatatctttgtaacttagctcaaattatttttggaaaaaggcattctgaaaaagaaagagaggaaggaaggaaggtaggaaacaaggaaggaagaaggaaagaaaaaaggacgagagggagggagagagagagatgacaagaaagccagatagccagtgcctgtctcttagggttattgtgatgtgttagtgagattgtatttttaatacaattaacccctcgacagtttctgtcatcctttaaaagatccaatgtaccaatactttcttagatatgtaagacaataataaaataaaatttttattgatatcaaaaatatatttttaatgaatacatttaaatttaaatgaagacatatataattctatgattttcaaatcatgctccctggagttcccacagatgaaggtgacaaggagataagatagcaggggcaggggtacatttgggttttttcaaccaaagactctcagagttgttatttttatttgtttgcttacatgtaaggtttacatgtaaggtttctgtcaacaaagggttgcttggtggaacaaaagtttgaaaccactgatatatgtatgtggcaggatggtaatttgttggataatggatatggatttgcaaaattgagtgtaatgcatttttggcctacaggttttgatgttaattaagactgttttctgtttggtgtggttgttggtggccatcaagaacaaatacagcactatagaataatatgaaaatataaaaaagaaatctactgaaaacaacatcctgtcacaaatttttttttaaatcgataacttccctgaactatccaaaatataactatgcttagaaacaccccaacccccacactcccactccacttatcccctctgcaccagtaagttcaacaaacttcagtgggtctccgatttgaaacatgctggtgtggattagctaggggcatggagattatcatccattttctgttttattttcttctcacccactagagggcagcagtgatgcacaggaaaagggaaattactcaagcactgtttctcagcaagactgtcgcttttctgagaagaaaacacctagaaagcgcctcagattcccatagctgaattatgagagggtcagcttccctttgttcatccctaaataatatggagaattttgattaacttcctttgaagttataaactgtatctgttggcttggtcaaatactaattttaaatatgaacacgaagatacctcttaaaaaagacatttatgtaaaagtgaagtgttttagttgcttattgctgggtaactactctaaaacgtagtgacttaagacatcactcgttttgtcttctctgttcttttggttgactgagcacagctgggcgattcttctgcttaatgtgatgttggctgggaatgtggtcatctaggagctcaaatgggccagaaagcccaaaatggccctctcaggttgctggcattgatgctggctgtcagatgggatctcagcaggtttgttaaccagtgcacccagttctccttcattggcttctttatttatgtggcttaaatgtctcatgtcatggaaattgggtaccaagagggagcatcctaagaatgagcattccaaaaagaagraagcagaagtttccagccccagacatcatttctaccaccctctaatggtcaaagcagttaaaaaaccagcccagattctaggggagggaaataagctctacctcttgatgtgaggagcagtctgtatagaccgagagggaagaaattgttgagagccatctttggagaccaccacatggaggattgagaaaaagcgtatttctgacttacattttggaaagatagttctaaatcatgggggatgcagaagaatatttcttcatgtaataaatgggaattgcttcttaatgtggtattttaagaattcaaatgcacaaaagttatcccttatgttcttcttctctccagatctgttacctaaagcaataaaaaatggccagaggatcagtgtccgatgaggaaatgatggagctcagagaagcttttgccaaagttggtgagtagacctggtaccccaaattgcatcattctcttcttcactgagtagcttcagggtagattcaatgaaatgggaacatgagcaaaatttcagagatgacaagaaaccagtagtatttgtttagaggagctgggagaacttatttttgaaaaatatgcttcaataaaatgactttctctatcaaaacatggaatatggactctactcttacatagtttgttcctggaaatggtttgtaagtctcatcttttatatcttgtcttctgttttgctgtttccttgattttaataccatcacatactttctcttactctttatcactaaacctgtggtttccttaagagtttctataagagttctttgtggaaacagaggtaccttatagaaattatgactcttttactgtggatgttgaaagtaatgctggtgcccctattcagtagcaacagtcatcttgtgagattctgactcttccctgggatcatgccttaatgyctgaatgatagcctctctcgtcccttcaccttccatctagtcttccctcacctctctaaaagctgttgcctgaatcgtcctgaagcttcagtatattgtgtacattacagatactgatggcaatggatacatcagcttcaatgagttgaatgacttgttcaaggctgcttgcttgcctttgcctgggtatagagtacgagaaattacagaaaacctgatggctacaggtgatctggaccaagatggaaggatcagctttgatgagtttatcaaggtgagtaccatgcagaatacaaggagacacatytgaaacttggaacttgaattctgttttaaaaaatatccagaaagacattycttacctccttgcttcgacattacatattctttcctttgtgattttcttgatcactgcttgagtttctaaagatacattatatttttgcagattttccatggcctaaaaagcacagatgttgccaagacctttagaaaagcaatcaataagaaggaagggatttgtgcaatcggtggtacttcagagcagtctagcgttggcacccaacactcctattcaggtaggctcaactcctgggttggagcaggatttcaggattacagattctaaacttggtattcaaacctaagggatgtaaacaaagacagaagcaaacacagctttatggatgactcccaattttcctgtgactaagtgggtcagttctgggtacataatataggagcagtcctagctctgggtagggtccaatacaaaatgatttgatcagcatttaaacaatcattaaaggctgcccagattcctttctaaatcttatggacaaaattagctactcaagcttctatctttaaacttcatgataatttttaacacctgctaagtgatcaaaaaattatgttttcattgatttggaataaatttgtaaatttattccgaaggctgccatccaacagccataatggaaacttccaacaggccaaacagtatagttgttgcaacatttccaaaactgaattattcaaaacgttagttgatcttaaagataaactcatgaggccgggcacagtggctcacgcgtgtaatcccagcactttgggaggccaaggcgggtggatcacctgaggtcaggagttaaagactagcctgggcaacatggtgaaaccccgttctactgggtgcagtggcgcatgcctgtaatctcatcgactcgggaagctgagacaggagaatcgcttgagcccaggaggcagaggttgcagtgagccgagattgcaccattgcactccagcctggcgacagaacaagactctgtctcaaaaaaaaaaaaaaaaaaaaaaaagataagtcatgattaaataccatctatagttgctaagacaacgtttggccttttgtttttaaatacaggaattttcagaacctttgctgggtcaaatgtgcaatgtgaatctttaaggcggagatacattcactacacagtrtttcccaaacttttatgactcaggatttctctgagggacactactgttttcaaaaactgtcagtttgggaaacatagtgctaggctgtgaagacataacttgagtttttattaaaacatctaaaaatcaccttctggcagctttactgttaggaaaaaaagattatatccaaatgattttattttatagcaatttaattataattgtatcaagaaactcagaggtacaataaggattgtccacagtgatccaacatttaaaccagcagagctaaaagcggaatcctgagttttgtcctgtaagcattataccacatttgtatttatatgtgtatatatatatgtatacatgcacatataaataaaatatttttattatttatgtatttatatatagaaaataaacatatgtatatatttgcttctaaatgtaaatatatatctggattatgcgtatatataggaacagagagatagttttggccgggcgcggtggctcacacctgcaatcccagcactttgggaggctgaggtgggcagatcacgaggtcaggaaatcgagaccatcctggctaacacgatgaaaccccgtctctactaaaaatacaaaaaattagctgggtgttgtggcgggcgcctgtagtcccagctacgggggaggctgaggcaggagaatggcgtgaaccaggaggcagagcttgcagtgagccgagatcgcgccactgcactccagcctgggtgacactgtgagactccatctcaaaaaaaaaaaaaagaaaagaaaagaaacagagagatagtttttaaatctgtttgctctatgttttatgacttggagtacacagactcaatgcctatttcccaagtgatctgagatttttaaatcttaataaatatgagatgataagataatggactgaataaactcacatctctctgctgggaatgagaatttaagatccacatgcataattttgtttataatagagtttcactttgcaaatgagtcactttaatcatttacttgcagaggaagaaaagtatgcctttgtcaactggataaacaaagccctggaaaatgatcctgattgtcggcatgtcatcccaatgaacccaaacacgaatgatctctttaatgctgttggagatggcattgtcctttggtaaataatacttctttcttggtttccaaagaattgcccattttctagaccatcaacaattaatcgttatttatcgtaggccaactttgtttggtgctcagctgcacctagaaggcttttctggactttcacttggccaggtccaggacagcaaactaaattcaaaaacaatttataatgagaaatgtaaaattgctattgcttgagtggagaggagggataaacattatagagataaacatggaagatatagttataccaagtcaaaagcattagatgtctaatcaatgtattagataattaagtgggggaaacttataaaatactgattaaataatgactatagaaggacattaaaaagtttatctgatgacaagtttaaagtataaagttggatcaggcatcaagcggaaatgtagacattatgtaagctcagaagtacatagatagtctcttctataatgaggacaattttcctggttatatatttttggaatatatgctgcttggcttcatctgagcgtggctcaccatgaaagcagatagaattgataatagcagcaggatgatggaagaagtccttaaactgtagtccttaagcaaagaaacctttgagtgatgcacagaaatccacaactcaaacattgaggacacctggaaaagggggactgcatcctacccacgggaggcctctaaatatggtgctgctcaatgcaacgtggtgtctttgaaaatacctctgtagctcttgcttcagcaggttctctgtcatcacaggccaagttgtaagtgaagtgacttgaggtgctcaatatgtgagggactcaggacttaaaggataacaatgggtgggaaagacattgagctttctcctctgctctgaccagagcaattctacttttgatattttatttattagtttgtcctgagaattcatttttaaaaggttcaattgctataaaaaaatcaaaattctagcttttaggttgccacccaaggcaccccatggtcttcccccaatctgctagttttaccttctaagacccctgtgactcattggtactcagcctagggcactgagaaggatataaaaatgttatcatatgattagctgaagatacaaagtttggtcctgtgtcaaatagaaatgtagacaataataagctcagaattttgtagacagtcttttatataatggggacaattttcatggctaagaaaataaagtacttatggtagaattactttggttatccacccagaatttcctaatgtgctaagaaaatcaggataattttgcagctgtttaggtgrgagaatgaagtggggtcctcatttccaacctcaatatatgaatgtggcttcagtagtattcacctttcccgcagatagtttgagtctagtcaaacggcataactgattttatatctaaacatcacagattctgttgctatcttcttkgattatggtattgctagaatttaaattcaaygttactgggctctgttattcagaagactgctttctttaatttaattgtttctctttcagtaaaatgatcaacctgtcagtgccagacacaattgatgaaagaacaatcaacaaaaagaagctaacccctttcaccattcaggtatgtcttcccaccrttaccataatacaggatttgtttggcatcaatgagcatcataactgctgagtccgcctttttcaggggctcagacatcattcgcaaaacccaggctttgggctggtgacttgtcatacttcagggataaagggatacatttctgagcagcaargaagggagactggtggagtggtagcagctggggctttgtatgtttgttttggccacttaggaataaaattcactttggctaaagttttaactcaagctttccttagcaatttatctttgatttgatgccaaataaacagcattttagatgaaaacataagcctttctaagaagcgagggggtgaaaarcgggaagtactctggcagccttcatagtaattttggccacagccacgagtataataamtataacttgcttttattccatcaatttgttgattaactggaatagtaaccagcagtaagtgtatttctgtgttgtgttccaatattttaacattatcataattcttttgctaagaaaccatatctaacttcttaaatcatgaacgatacattatctcctgtgtggatttaagcaaccttgtgtactttaaaaatggaaatggtaaccaaattgagaacaatgattaaacacatatgaatgcacttaatgttaaatttactcataatcttgaccatatatagaaacagtatttttcactcatcatttaagcactagaacaaggacccacttttcttctgatagttcttttcctaattcactggcggcctttgctttgtttttaatttgccaattaaaacaatttctatacatctctgacattgatatctcttcctttttaaactcaagaatagtacatacagagtctggactgaaaactcccttgactctatctcgactatatgtgagttacattacctgcattgttgttactcataagaacatagaatctatgagtatgtgtgtgtatactcaggttccctagttattacagatactcaacaaatcaacctagcaaaaaccattccatcttttccaggaattttaatcgtatctatttttcattttcgttttctttttttttttttttgagatggagtttcactcttgtcgcccaggctggagtgtgatggcatgatctcagctcaccgcaacctctgcctcctgggttcaagagattctcctgcctcagcctcccgagtggctgggattacaggcacctgccaccatgcccagctaatttttgtatttttagtagagatggggtttcaccatgttggtcaggctggtctcaaactcctgaccttaggtgatccacccgccttgacctctcaaagtgccgggattatgggcatgagccaccgtgccagccttttcattttcttaacacccaatcttcaagtcaaaaagctcttctgctactctcttttatgatcttgatttacatcaacaattgtcttattcatgatggccagtgacaggacaatgactttctcaaaggtgtccctttatttttggccagtagagatgttttgtgtgtcagcttcatcacagagcaagatggaaaaatataggcctcatcagtctcatgccaaccagaatgggccttcaacttatggtgctggtttgattgaatggaccactgcatgagtggtcggtgtctgggttactggattttctcttctggttatgagtcactgtttttttctcaatgttaaaatgagtgaagaccatgactctaaacctgtgaccttcgcagaaggaaaacattgttactgttgccatcggtattatttggcatctacaaagtcatagaacaaaaacttgcatacattttctccctcaggaaaatctgaacttggctctgaactctgcctcagccatcgggtgccatgtggtcaacataggggctgaggacctgaaggaggggaagccttatctggtcctgggacttctgtggcaagtcatcaagattgggttgtttgctgacattgaactcagcagaaatgaaggtaagagcaagtcccaaaggtcatttatgacacagctttctaataacttacrcgttggggactgtaggaggaagatgtcagaaattctcaagttttgaaaactacacagttatattgattccatggtattcatgtcacagattctatacacacagaccagacgttttttaatgatagagcaaaagctttttaagaccatagactaacaataatgtttgtttggagcatagggctcagtcttgaatgtttggcactctaacctcaagaggttttttcagagctcactttgcctttagatatttgtaacaaataagaggacttttaacttgcactttgcgaagtaagcaactcacattcatatactatagtgaaggtaccagattaggaggaacttggtctatttcttatcaaaactatagaggaaggtataggtcaaagggttcaaggttgcaattatatgggatgaataagtggagatctaaacagcacgagggctatagttaataatattgtgctgtatactggtaatttgccaagaaagtagatttcaggcactcttcctacaaaaaagaaagaaagaaagagatagagagagaaatgaagaaagaaagaaagaaaaagaaaggtaacgatatgagatgtgagtatgttaatttgcttgaccaacagtaaccaccttactgtgtatgtgtctaccaagataagtataccaaaacatcacgttacacaccttaaatctatgcaggctagaataaacatttttaaagaccgtagaaaattccatttagggtttcagagttctcaactaaatatgtagctgtcaatcttattgcgtcttctctcaccatcttatctgtatgtaaacagtgacagccccctggcttagacagaggtagcccaccttgataagtatcatgcaaaacacgatgttatcttttagttatcaggtacaaatcctaccaatatgaaatctgtagtcaagttctaatctttagttatacatacttttttatttatatgtccaaatcacaataaccaatgaaaaatcctgaaatattatttaaaaaccaatgtattmaacataatataaagaaggcgggggagaggaaatagggatcttagaacctgtgagaaagaatattgatcttcaaataatgacctcagctaaatttaaaccttctagctgagcaaaaaaatacttactcatctgggaaaacgtagaggagagttgattacattgttgagttgctataattaggcaggtaagcacttgaaatataaaacacctatgggaatagacaagagaacattgttattattacaaaattgatctcttaaaagcaaaaatgttgtcatatygtgaaatgtggtttgacagacccagcaaaacatccgagccagtagccttggttatttttatggctctgcccaaatgttcttaaacatagcgttgagattcactgtgctttgttttctccatctggaaaatggagataataaataagctcacaatggcttacgcctctttttagggaataataataaaatatttaatccatgggaaaggctacaagaacctttaccccaaagaggtaacgttgttatctttagctttttagcagagcttaatgaaagttataaccaacccccctcccccaacatcgctgcatttatttttctgtggtttttgtgcttcttcagctctgattgctcttttgagagaaggtgagagcctggaggatttgatgaaactctcccctgaagagctcttgctgaggtgggctaattaccacctggaaaatgcaggctgcaacaaaattggcaacttcagtactgacatcaaggtaggaggagcgttgtttgaacatgactctctgcaggagtgaaggggaatttgggcaataataaagaaaagataaagatttggggcttcctctcttcagaagttccagggtagtctggtgctgttttggaggtgctcactgtccttgagagcccatctgctgctctagtcctgggccatacacagacctgcccagagtcctagtgcagtgtctcgattggagtttccatatcaggaagtagagggacaaaggtgagctagaggaagagcaagagaacagtctgctgtccaagtaaagggaatatatgtaggtctgtaatgtctctggtttcataaatgggagcagcagatgggaattccctgtaaaaaattaaatgaagatgactcttctagttatactaataacagcaaacatggtgtctgcaacatgccaggcactgttctaactgatttatatgtgtattctcttattgaatccttacaacaaccccatgaggtaagggttattatcctctcattttacagataaagagacaaagaggtccataggggaaaggctgaggcaggaatacactgtggttttcaagtatatgaaaagttccctgtcaaggtgaaagaaaacagctattggcaatgatgacagatggatgaagatagaaagtggttaaggagcagaaaggaatggaaagcggtccctagaaggaaagagtaggagatgctgggatgcaacaccaggaaaatacttcagtctccactttctcaaacattaaataacttttccccaaagagaaagagtcagaggaaagttcacatgactcaacaggagtacacctaggcttgtaattctttgagtaacagtttcccactgctatatgacgtgcattcagtggcatttagaactcagcgtgtgtcaggcactgtgccagtcagagtcaagcttctagatggaaagcccccaytttttaggatctaagctaaatccatctttctaactatgcatctttcatgggctattaacattcttctagcaccaccaaccgacctgggttttaacaggagctggctgtcatgctctccctttgtgctcaacagttaagctctgcaattgcaaaacttttcagacaaaattaggctgtcagatctcagctgtaaatttacctaatttcctgtcattaaatggctgtgttctctagaaccaccattttgtgctttgggaagtgtctgtatgagataggagctggccagatgagcacttacttatacagtgttgtgcctgttctctggcagccgctgcatggcaactgactccgtgctgtcatgtgtatgtctgagtagccagccagcaaccttgggagaygtctttaaatcgtgtaaattggcaaaggcgaggagaacacccaggctagagtgagtgagaaggttcatgagagtcaggtgaaatgaggttactcttagccaaactaaaaagatgtaacccrgggcaggcagatggtattggtgcctgacacctgcatgtgactttcactgacttcaaaatagctacagtgaaaagtcagagaagggagggtagatagaagggagatgaagatcattttccccaggtgcaacatcaatgattcacactctctggttctcctctttctaatgccaaaagtggtgagcatacctctcctctgcccaggccttacctaccctaaccagttgtagaaacaaaataatagctgatttttcgatctttatgagaaattgagatgctattaaatgatttaaataaactwcctgaaaatctgtatgctttcattgactaagaataaatttatattttaagactataattctgagaattctttttgtcaataagcatattttcagaatctaagaaaacttgagaattcaatacctgtatctaatctgctataactaaattgaaccatttttctagcttctagataaatatgaaatgcacttttcttaatatttctccttttacgtaaagattgcttgttaatgcttcaatcttctgtctttgacatctttttctcttgctgattgtccatttaaatgtattttaaactcgctttaaacttgtgcttcctttttctgtcacttttttttaattaaaccttagctgactgacttctacagcaatataaaggtatatatatattttcctgtatacaatttaattcatgtaaataagttgtttttctcccctaaagacaacagaataatatccacttctttagggtgccttttgtgtatatcttgtctattttattgttacgctccttttaaaaagaaaagcaaatgtgatatgtaaagagacaaatagaacattcaaattagtgaatgtttctagctttgttaagttacattctggaatgatagctgaatatgaaataaaatgtttgcttttgggaaatcattgttatgctaagtatgtaattagctgtgctattttgaaattggaatttcttaatttctcacaggactcaaaagcttattaccacctgcttgagcaggtggctccaaaaggagatgaagaaggtgttcctgctgttgttattgacatgtcaggactgcgggtaaggccaggtcccagttgtgtttggagaatatgatgctattktcatgttggcagttccattaccttgtgtggccctgattctggagttccatgactgggcatttctgcctaaagccctgttaaaacggtaaaactgtgagcagtttgggataataattgatgaaaactgaatctggaaatacaacattaaagaaagaaaccaatagtaattaaacaccatccagcatgctaggcaattctatatatgttcatcatttagtagactctataaccccacatgggtctgaatgttataataaaacttctgttttgccgccactttaatactgatcttgagaagtctctttgcccgtttctgtgcctcatttaatatcactggagttaaatccaatgagttcatgttgaagtcaactgattcctaatgagaagtagagtaaaagtaaatgacamgtaaagctcatgaaatgcataatgtgtagcgttatctagtaaagggtcatattaagaaatcatcctaatttaaagttttgttttctgaaaattggtggtttcatgtactttaaggacagtgggccatatttcagcaaaattttagggttaagagtcacttacaaatggctagagattctctagaattatttgagcacattgagtggttcaaaatctgaagtctgcaaaaataaaattgatattatatatttatcaataataatacrtaggttaactgataaaatttattttatttgggttgcaagtataccaactcaatgtggagacagtggttatgctaatcatatgttcttactggcaagtgtaaatatcttttgtgaactggttatgggaatataaattaataaataaaatttttgatagacaatctcatgtcatctgtgcacacaaataataaaaaggaatcttaatggttggaaataattaagataaactcaaatgatcagttttcagaatctactgcatctcttttgaaacagagcaaccaaccactcatctgaaatagtttgataaaggagatgagagatccttgttacttaacctctgagattccttttacttgtgactttctgattttggtgcaggtgcatataggcaataatgtgctgttattaagtgtctgcctgagataaacactaatgatttcagtgagattcccatttcttttcacattatgcaatctgctttgtgcatggagagccttgacccagccctgagacatccttttgcattgcaggagaaggatgacatccagagggcagaatgcatgctgcagcaggcggagaggctgggctgccggcagtttgtcacagccacagatgttgtccgagggaaccccaagttgaacttggcttttattgccaacctctttaacagataccctgccctgcacaaaccagagaaccaggacattgactggggggctcttgaaggtaactgtaaacgatttgcctaagatggggaaaggcactcacaattctaattcaatggcaattcaaactcacttcctaagcaaatataaactatttacatgtgcaaacaggccattaattctctggtatgcaacaaagagaataaatagattcatcaagtcaatttcagccaagcaggaataatcaaataccattctatcacgtccattaacaaagcgttcatccattatcagaattaaatgttttaggaaagataatgcatttagttattagatgaaataaatcctgagtttcaaaaagataatttacgtacttaatggactgtgttgattcctagagacaagaaattgccaccatccatttccaaaaaatgatatttaaggtatgctgggatatgcttactgagtttttggttttcttttgtttcttacgggagccacagaaaagtattttgaggcagaatccctaacagttgtatttttcaggttaatgctctaagattcaacaaaaagcatatagctttaattacgttctaccaggtagaggtgctggagatgtttacttgwcttttttaaaaaaatcatgaactagtcccaatattgagacaaaggtcaactaatattaaatgaatatcacccaagcaaggagattcagatttgaagtatgagttgatccttttccacagtgctttactctcactagaaatgcagcataatcgtgctccaacactcctgcattggtgtcatttgctgaattatggtcagggggttgtgtgtattttgttgactcccaaatctatatatcaagcccacaaatcacccatttcagctgcttctagaatattcctgtttggatccttggctatcatttgaggtgcagcatatgcaaaacagaattgattattttccctcccacccccaaccattgcctttccagcccacctcccatcccgtttgccctcttttttttttttttttttttttttttttttttttttttgagacggagtctcgctctgtcgcccaggctggagtgcagtggcgggatctcggctcactgcaagctccgcctcccgggttcacgccattctcctgcctcagcctcccaagtagctgggactacaggcgcccgccactacgcccggctaattttttgtatttttagtagagacggggtttcaccattttagccgggatggtctcgatctcctgacctcgtgatccgcccgcctcggcctcccaaagtgctgggattacaggcgtgagccaccgcgcccggcctgccctcttttagaaatgctccatttccattaatcataccatttttttttctttagtcaccaaactaaagagcttggatcctactatatcttcctatccttcatccctacatccactaaatcagcaaatactaataattcttcctttggaacattttctcaattgttatgtttcttttatgctattccaagctcattacctcatacactaattattttaatggatcttggagtctccatttatcaaatgcttgaatgtatcccacatgctaatgtcaaacactctgtcctctgccgtgtttaattcaaatgcatatcgcctttcagtgattctgcacactgctgccagtcacatcccggtactgattttattatatctctgccttgctcaagaatttattgtagtaattttacaaagccataatgactgccgttgtctgtcaactaaaatctgctacctggtatccaaagatccccaattctgaatccttcytccagataggcttatctcattgggctgtacaacacacacccctgaccaaaccagttcctgatgttcttaatagagaccttgcctgttgctccctttgtatgcatatttatactaycttctactcccaccccttgctatctccccaaatcctctactctttcctttttctgatccagattttgctagctatccaaggacaagttcaaattccaccccttccaagttcagtccatactgttcttttccctgtctcaattcaaataacaaatatatctacctcataagtgagttctgtagcttgtatgatctctgtttgatgcctaaaagtcctgttttttccagcaagaaggtaagcctttgagagccaactgaacagctaccccacacaggattccacacactattaatagatactatagaaatacatgcggaattgaaatggaaaagaaaaattaacacagtataagaaccctcgtccaaatccaatacagtttattttatttctttctttcattctactttcagtttttattgcatcctctttagttraactttggtcataaaaaagctatgttttcttcggtcccaaaagataacccatcttcattcatctaggtgagacgagagaagagcggacatttaggaactggatgaactccctgggtgttaaccctcgagtcaatcatttgtacaggtaggaatatttgggaactcattctaatgtaagatagagacctcaaaagagccataggattccaaataccactatgatgtgcattctcttcacaaaatgtgcataccttgctggaaggggaaaaagtgccaagttgagcttcagatgttggatattcagttgaaaaactcacctgcatacatcagtctcactgtgtgctcaatatataaatcatacctcaacaaaatgaaacatttactatatgtcataagtgatcttacatataacccgctcacaagcaggcaaaacaacagatgttaagtttgtggtgaagtgtctcctatgccacttgttaaagcaattttcttcttytttttttcaatatttctttttttttgagatggagtctcgctctgtcgcccaggctggagtgcggtggcgcaatctcggctcactgcaagctctgcctcccgggttcacgccattctcctgcctcagcctcccaagtagtttggacttcaggcacctgccaccatgcctggctaattttttgtatttttagtagagacggggttccaccttgttggccaggatggtctyratctcttgacctcatgatccacccgccttggtctcccaaagtgctgggattacaggcgtgagccactgcgcccgttctaaatatttcttttacatttatttagttttacaaattgtaaacctttaggtacaggggacatgtgcaggtttgttatataggttaattgcatgttgcaggggtttggtgtacagattatttcgtcaccatagtgctctttcttttcctgaggcagcatatgttggatggaagggcatagctagtcacacctgggaagagtgagtcccccaatctctctgagtcatggtttcttcacctctatagatggagctacgactaccaagtgtgcagggttgttgtgaatattctttgaactaatatgtaagaaagtgtctggcccattgtaggccctgaataaatgttggatatctgagaatccttttgtgtttgttttgttcagtgacttatcagatgccctggtcatcttccagctctatgaaaagatcaaagttcctgttgactggaacagagtaaacaaaccgccataccccaaactgggaggcaatatgaagaaggtaaacaatgatggttctgttgttccaggagacaggcaaagtcatagcctgcaagagcactctaaatactttataaggcagccaaacgtagacaagtaatgtttttccagaaattaaattctagtacagcaatcagaaacctgaacagctttattaaagtgtgtccattatttcagtcrattgcttatttataattccatgttggatgtcttcaaacattatcatgcaaaaattctaattaagataattagagcaagcagagagccacagggatttttccctcagcaggatctttattctaatttctaaagaattggagcttgtactgacagcttgacttgttcaaacagtttgtcgactgtcaacacagtgggaacattgttttgaaacaacagggttgacacagccatttctcagcatttcttattgccgtgactgttaatgatccatgcgtagctacaggaatatctgttcacatgtccatttgctatgtgtgcagaggatggagactccaaattttccatgtcaatctccatgaattcaccttttttagaaatattacatgtaggtaattaaggatggctctccatttctgcagtgtgatatagctgtgaacatattcatagtaatgaattcatttcagttttccacattatgaatattttttatgaaagtgaggggttctaaggacagatggaaaattctttaattttgaatcctagaattgcagaaccagttgagrcttgagaggtcattcggtcttaccatatttatttcattttttatctttatttttattatttatctggtatttatcataatcaagatgatgacgttaaatcgttttcctttctgctcattcagcttgagaattgtaactacgcggtagaattggggaagaatcaagcgaagttctccctggttggcatcggtggacaagatctcaatgaaggaaaccgcactctcacactggccttgatttggcagctaatgagaaggtagtatagcttatggaagtggctttttcttgaatacattatttacttagacaaatattagcaaatttttagcagtatgagttaattcagtaaaagtatgttttaagctaagcttcataaccagagaaacactttttacctttctgctttttttttttcagtyctatcagtttttgtttcaagtatcgtgaaactctgttattaggttcataaacagtttagattgttgtttcattctaatttactcatccctttgtccttatraagtagtcttttttatgcctactaatattcttttctctgaaatctattttttctgacattaatagataatagctactattgcttctrtaggcttcctattgattagtggttagcatggcctatctttttaccatccttttacttcaattgatctgtgtaaataacaattacttttaaagggactttttaaataaaggggaaattatgctatatttatctacacatttactatttctagtgctcttcctactattttatagatcaagatttccatttggtatcattttctgtctacctaaaatatttctaatagcacaagtttgctggtgatgagtgatttcagcttctatatgtctgaaaatgtctatttcattttcaaaatatttttttctctgagtgcagaattctaagttgatagttttttctttccgtactttaaagatagtttcactgtcttctggcccacattgtttccaaggggaaatctattgtcattcttattgttgttccctcatatgtagtatttcttttctggcttattttaagatttctctttattacaggttttaggtaattttattatgatgtacattgttgtttctttttttttttttttttttttgagacagagtcttgctctgtcgcccagactggagtgcagtagtgtgatcttggctcactgcaatctccacctcctgggtccaagtgattctcctgcctcagcctcctgagtagctgggactacaggtccacgccaccatgcccagctaatttttgtatttttagtagagacggggtttcaccgtgttggacaggctggtctcaaactcctgacctaatgatccgagtgcctcagcctcccaaactgctgggattacaggcatgagccaccaygcccagctccattgttgtttcttatgcttgaggtttgttgaacttatagratctatgggtttatactttccatcaaatttggaaaacttaactttcatctcttcaaacatatcttccatacccaccagccctggttctgggggattccaagtccatgtatatttgatcgttcaaagttgtccctaagctcaccgatgctttagtgatttattttctctatgtttcattttgtataacttgtattgctgtgttttcaagttcactaatctcttttattttgcatgtctaatattccattaactccatccagtgtacatgttttttaacctggacattatagtttccatgtatagaaattttgagtcatttttatatttcccatakctgtcctttcctttaccttcttgaacatacagaaaataattacagtaacttattttgggatctgtttctactaatttatttttatcttcattatgagtcatattttttggcttctttgcatgctgctaattttttaattatatgtcaaatatcatgaatttgaccttgctgtgtactggatatttctgtattcctttaaatattcttaaatttaatcctgggatagacttaagtaacttaaatacagtttgatccatttgaggcttacttttaagcttaattaatctagagctcattttgcttgttagtaatgagaaaatggtcttctgagtactttgcttgatgctcatgtattatgaaatttttccactccagctggtgggaacaaatttttccagccttgtgtgagccccaaggattgctctcgtggctcatttctggtgggtttttccccacagcctctagtagtttcctcacacatgtgcactgagtggtcctcagctgaagactgagggaaaccctctgaaggccgctgaagctttctttctgaatgactctcttctctctatacagttctcaccactctgatagtctttcccctaaattctaggcacctgggcttccttcatttctcatccctgtttcctccactcaagaggatggccagctgtttgggttttctcctcctatgctgcagcttggaaactttttccatgctggaaaaatcttaaggctaactttgttttcttcttttcaggggccactgtcctgtgcttcctattgtctgatgtmtgaacaacattgtttcatatgtttttcactgtattataagtgtttaaatgtggkccctgttattccatcatggccagaaacagaagttcctttcatasaaaactttagatatgttttggaactgaatataaacttgactaatgtgagaagtatagggtgatattagttaaacaaaaataggttataaaaagatacacaaatagaaaataaattataagaaaaagaaacaattttggtacaaaatcataagcttgggaagacttttagrtaggaattctgtaagtaataaaataatttacttgtaaatgcttcagtctttccccctatactaatagctctgacaaggcaagaatcttacatcccctcattagatcctatgttagtgtgactyaattcattttcctacctggaaggaagccccagaaactgcatgtcacattacattctgtctggmaagataatggcaaagacaaggttcgtggtgtgcctaggcactgcagctttagttccaagccactgtctgcagatcctaataatggccggctctggatgtaatcgtgtcagtatttccagataaggtaggataatcagaagtgatcataaaagatttcactccctgattcacatttgctttactaagtatagagctccattacccatttccacactggggtctctttaatgatgggggcagatgtcataaggctcccctggtgcagaaaactccagaactaaagaaactccaactctgtcttttagtttactgcatgtatccagaacatcattgaaaactcctcagggctgttctcaccagtgtatttccagatgatatttccaagctatctttattatcttccacaagttttaaatttttaacagattagcaattcatactgattgctttaaaaaccaaagcaaaagtccttttagttgcaacagttaaactgactcatgggtttcaatattaaataatctttaatatatgctattttaatgattaaaaagctcaagccagcgggtgcggtggctcatactgtaatcccagtactttgggaggccgaggcgggtggatcacctgaggtcgggagtttgagaccagcctggccagcatggtgaaaccccatctctactaaaaatacaaaaattagccaggtatgctggtgcgtgcctgtagtcccaggtactcaggaggctgaggcagaagaatctcttgaacctgggaggcagaggttgcagtgagccaagatcatgccactgcactccagcctgggtgacggagcgagactctgtctcagaaaaaaacaaacaaacaaactcaggtcaaccccattctatgttaaatttcataatatctgaaaaacgtcttgcaatatgatctttggatgttttataaaaatgtggctcaaagccctatttaatggctggcacatacacaacaaggtccactctgctgttgctgtctccacctggttaaaaagtcatatttctcatgagtgtttactacayaagaatcgtgcatttaagaaagtagacagaaaaatatattactgtagaaggagaagtaatgactgataattatataaatggcaccggaagggatttttttccctgcatgctayatattaaaagatctattaaatttacrgctggttctagctggaatttatttcattgaattgtgctgatgtgctaatttggtcatttatctggacaataaatggcttgtcattttttcctatgagagcaaatgagagatatgtacttaaacttccctatccccttcagtagcttggaaatcattctcagggtggacagttggcaaacagcatatgcataaacttgcagataaaacccttgaagcaagcargctgccagcacatggcaatgatggctctgaagcaaatgaacaaagaatccgaagcagacaawtaggaaactctccccaggtcaaacaggctgtggatggtgaagtcaggatgggtccttgaaaaacaaaatgcctggtttgttcctctatgccaaataataaataagtaaaacaagtgttggaaggcaggaaagtaagcaggtactaatcacatccctctagtgcctcacatccaaacctcatcaactctcttrttgaaggaggaactggctaaagctggagctcataattctgtttcattttgacaaagagcttttcagcacagcacattttacaaacactggtaatactgagatcttgtctggagggctccatttaatagcacaatcgtcccaaagcaggtttgataatatgcagtaattatctcaaaaggaaaaatctagaaagacacaggccaaattagtttttgttttacatttcaaatctgtatttagatgagcaattgcttagtgtactatctagaatggaggctctagcctaatttttttttgagacagagttttgctcttgttgcccaggctggagtgcaatgrtgcgatctcagctcaccacaacctccacccgccaggttcaagcaattctcctgcctcagcctcccaccaaatagctgggattacaggcttgtgccaccacacccggctaattttctacttttagtagagacagggtttctccatgttggtaaggctggtctcaaactcctgacctcaggtgatccrcccgcctcggcctcccaaagtgctcgaattacaggcatgagccaccgtgcccggcccagcctaattctattctttcttctctttgtgtttttttttttttttatcgttttacttacaagtgggtgtctgattccatttcaaacctctgcatctcagttgaggtgacagaaagactgccttgtgttcactggaactctgtgccactatgagaggctgttctcaaaccccagcatggaataagctgcctccacaatttgctatacctctataaggttccctgttccttagtagcttctcactcttgcagacaaactttagtataaaggtgggcttcccctctgcaccatttagttcccaggcttaggaggtgggtcaagaacactgctgccgtttacatgagcatgtggacaacgccgggctgcaactcctgatgaagggaagtgagaactaggtctcaggacaagagaagctaccagaagactgattaaacttagtttgttccgtcaggttatatatagagaggacctaatgaagcaagcactaacctaccttttttttaattcagatgttcattaggcagaaattcttagatgttacagtaaatgctaataacttaatatgcatgctatctggaaataagaagccagttatgccataaaatgtaacctttatgaagagatcaaaagtaggatcttttccaaactagaaatattttgaaaatctatctgcacttaccccatttatactcatgatttctcagcattttggtcccatctcttggaccagactaaacatctttcttatccccttgctttccctgggagacagtcactctatttatttcacccgcctctctgtgccttcatttactagatgtccagtagtgctaggcagtctgctaacctctgatgaacagggcacatggaccctgtccgagggcacacggtggataccaatgccatcacaagttctgggaacaggtttgaagcaagtataccaatactgatgaatacactgtgcaagctggaaaagtgatacttgagctgaggattgttcaaatgattaggaattcactagaagggaagggggcccaggtagtgagtacagatgagtcccagaagcaggaggcagaaggaggatggaggtgtgcctggggagctgctgatggttctgtgtggttgaaatgtgtataggtctttgtgtgtgtgtgtgtgtgtgtgtgtgtgtgtgtgtgagcacacgatgggcaaggaagcagagagggaagaaggaaatcacagatgtgctggaaaagaatactagagccaaattgtaaagggccttgtgtgctgtgtgctggagcttaacctgtattctttgggccatgtcgaatcacattaaatgtgaccaagcagggagctgtggcatgtgtctgtggtccatcccgtactagggaggcttgcttgagcccaggagttcgggggcgcagtgagccatgaccatacctgtgaatatccactgcactccagcctgggccatgggccatgtagtgagaccccatctcttaaaaaaaaaaaaaaaaaaaagacagaccagaactgtacttcagaaaggaaattctgtgaggtggagaaacagaatgaagaggagctaattgatttgagggagacttacgaggtgtaattgataggacatcactgtcagtttaaatgtgaattttgataaagaaaagttgcacaagccattttccttcctctcttcaataatgggaaggtgttttcacctagaagaagcagggcattgctcttatttcagggactaaacttgaaaaccatctggaaagtcacgggagaactgtactgtccataggagcaggaactagaggaagatacccgatggattatgtaagcaaaatcctagagcacacaagtggagggtgacctgaatttaggtagaaccggtcagatgagattcagtcacaggattcttgagtttcagtttgagaagcacacactgtaattctagccctgaaggtctttcatgtgtaatttgatcccctcctgccaacctgaaccgtgaagtccacaaacccatgtgttcctggactgctgggctttctcccatgcatttccctttcagaagtgagtagctttagggaatggtggttcttctctgctccagagacagtgtgggttttttttttttyttttttttttttttttgagacagagtctcactctgttgcccaggctggagtgcagtggcactatctcagctcactgcaacctctgcctcccaggctcaagcaatcctcctacctcagcctccctagtagctgggactacagacaagcgctgccatgtccagctaattttttgtgtgtgtttttggtagagaccgggtttcgttatgtttcccaggcaggtctggaactcctgagctcaagtgaactgctcaccttggcctcctaaagtgccgggattactggcgcctggcctagtctatagaattttaagaggttaaagcctcttcttaataaatgtcccccaacccctccaaaacaacaaacaaaccaattctcataacagtaggtatctaaggtaattcttaccttcagactaaagattatctttgtcagcatatttctaacatttttacttatataaggcaaaaagtattttatactttttctttatcatgtaggctactcagacttttccaacattgagttatttcttgattttttatcttttttaaattgccacaggttggaatcttttccttcattttcctttccttgcattttttccctttggctttttctttttgctcagagcaatgatcatgcttagaaaggaggtatctgctttacatttcattatactagccataaagtcacgtcttaagttattctaaaaggaactaatgttgtaatatgttctttttttctctcaaatgtaatggtgtccagactgtcttctatgacatacccgaaaaaaaaattccatccttagctactttttgtttatattaaattctttagcaactgttctccagaaagcattctttattttgttcaggtatacactgaatatcctcgaagaaattggtggtggccagaaggtcaatgatgacattattgtcaactgggtgaatgaaacattgagggaagcaragaaaagttcatccatctctagtttcaaggtaaaattctttgtcttctgctagaggccatctgagctctatgcctatctgtattgttttcattatgtgttcaagtgaccttcagtggtaggtattagaggctccccctcccatttcaattttgcttaaatgactcgttattgttttgatgttcatcagccatttcattaatgaatttctcaatactttctcccataagttaatcataaaaacccatcagtaaaaaaaatttcaacttttattttggatttagggggtacatgtgcagatttgttacatgggtatattgagtgatgctgaggtttggggtacaaataaatccaccagcgaggtatggagcatcgtacccaacaggcagttttctagcccttgtcctcctccctccctccccattcacctagtttctactgtctatttttaattttwatttttatatttttaattttaatttattttttaatattttttattatttatgtttacttttcatatctgttttttgtgacaaggtctcactctgtcacccaggctggggtacagtggcatgattgtggctcactgcagcctcaacctcctgggctcaagtgatcctcctgcctcagcctcctgaggagctgggactacaggtgcacactaccatgcccagcaatttttgtttgtttgtttggaaatgaggtctcactatgtggcccaggctggtcttaaattcctggcctccagagatcctcctgcttcagcctcccaaagtgctttgggattataggcgtgagccaccatgcctggcttattcccatctttatgtccatgtgtactcagtgcttagttcccacttaaaatccatgattttaaaagcaagattttaggcattgttctttcaaagtaatataaactatgatagtattcgtaaaatgtgggcacctccatgattcagattaatattataatggtgacatgtaaaatgctcaaagatctcccttgtgatgttttttgtaaaaaagcagttgtgtacttctatctaaatctcatttttattaatagcagcattttattaaatttcttgactcatgtttcatgcattaactggattcctcctcaaaggacgtgtgcacttgatccacatcatcrtaatgcctgtgccatcttaactacatttttctagcttgaaggtcaggattagggggaggaacaccttccgagytgtattaacagggttggtgaggtggttcgtcatgatatccatcctgtgtttcaaaatcaagaaaaaatgaaaatctctttccacaagcagtagcagaagatattgtcagggcagggctgtcrcaggagtgtccacctsctgtgagctcatcacagataaccgtcacctctgctcyatctccagcctactgttcagtctggagagctgagcagagttaggagtggatgctggtcactgatgcaagcagattcttccagaaagagatttggaaaggcrgcaagcagattcttccagaaagagatttggaaaggcagtaaagaaaagcaaagttgaaaggagctctagatattgaatgggctctggctaccaggggctccttgttcatgtcttagggcatcttcgctgacattgtgaagctggctttactgttttcctcattttataggtgaggacatcaaagctcaaktaacttcctaagagtatggctagtaattgtatgtgatggtccacaaatgggaggaaaatgccttttacctgtggggtgaggctgtagagtgtagtgtatctataggtcacttagctgttaatatgaagtggccagttacatagcccaggggtgcttctctccgtaaaatagctgctgctccagcccattacattaggctgtggcttctggggtgttcttatggggacaaggtttgacaagcgatgctggggttcactattagaaaggtttggcaattcttttgctccttgtaacactcggggctcattttctcctgtcttcttagtaagttgttgcagaattgattaagtaaaagaggccvcataatgtactgaaagaaatgtcatactagccccacattccttttatgtgaagcccttttaaaaatgaacacaacccactctttaaaaaaaaaaaaaagattcagagagtacatttgcaggtttgttacaagggtatattgtgtgatgctgaggtttgggtttccattgaaccagtcacccaaatagtgagcatagtgctgaacaggtggtttttcacctttaacccacttccaccctccccctgcttgtatttatcaatgtctattgttcctacctttatgtccatacatactcaatgtttagcttcctcttataagtgaatagatgcagtatttggttttctgttactgtattaattcagttaggataatggcctccagctgcatccatgttgctgcaaataacatgattttattctcttttgtggctgcatagtattccatggtgtatatgtaccacattttctctatctagttcattgttgatgggcacctaggttgattccwtatctttgctattatgaatagtgctgcgatgaacacaagcatgcaggtgtctttttggaagaataatttattttcctttgagtatgtacccaatattgggattgctggttcaaatggtaattttatttttagttctttgagaaaactccaaactgctttccacaggggctgaactaatttacattcccaccaacagtgtgtaatcattcccttttctccacaacctcactggcatctgttattttttgactttttagtaatagcccttctgaatggtgtgcagtggtatctcattgtggttttggtcctcatttctgtgatgattagtgatgccgagcatttttgcattttttcatatgcttgacacaatccactattttaactttacgtctttctctagttgtgctaacttccttccatttattatttgagaatgactacctgctgttggtagacggtgggttttctgggaagttactgatgctcctacagaaactacagtttatttgaaacactatgtggaatactgctgcatttcccagaccaggctgtatatattatatatttaggaagaaaaagccacccacttcctttgagctgaatgggagtaactttgggacacgttgatgaaaccctccctktgtctctgcataggaccckaagattagtacaagtctgcctgttctggacctcatcgatgccatccaaccaggttccattaactatgaccttctgaagacagaaaatctgaatgatgatgagaaactcaacaatgcaaagtacgtaaataaaaataaacctcagattgggagggaaggacccaactggcagctggatggttgtaaagtctaatgctcatgcctttatacaaacatttcattttcactatccgtgcttttccttctcatgactttctgcagtctcatcatcactgttttggatatgggacaatagtagtttaaaacttctagtgccagaatgggagcaagacaaaaaaaaaaaaacaacccaataatgagagtattcttgtaattgataagcaagcctatagtttcataaaaccaatttcctaaccaaatgctccattcatgaatattcatggataagaatgcacaggggtagggttccacagcagagcctttgccagtgtgaaagccactgtcttgtgttttaccattcaggtcacctgccaaatgattcctctagagtgagtatcagcatattacagtttctgagccagatctgccctgttgtctgcttttctaaacaaagttttattgaaacagagcctattcatttgcatcttgtctatagctgcttccctgctataacagcagagttgcatagttgcaacaaagcctaagatgtttaccatccagtcttttgcaaaaaaagttaatgaacatctgctccagacaggtgcttttctcagatcagattccgttagtttccttgggctgccacaacraagtactgcacaaactgggcagcagaagtttcttctctcacagttayaggagctagaggtttgcaatcaagatgttggcaggattggtttcttctgagggagaatctgccccatgccaatctctgcctccatcttcacatggcattcttcttgcgtgtctgtgacttcacacggctgtcttcccgctttgtgtttctctgcgacacttcttttcttagaaagacaccagtcctactggattaaggtcccacccaactccagcatgacctcgtcttaactacttacatctgcagcaaccctctttccaactagggtcatactctgaggtgctgggggttaagacttcagcatatgaatttcgaagagacacaattcagctcataccacaggtctagaagatacaagtatctagtgcccggcatccctgctttataatcccaacagagcccttctctctgttcccagtttgggaaagtgggaacctgtgctctcgggatgccaaagtttaacacaatttaatggagagaaataaataattaaactaaaattacaatagattgtgatgagaggtgtggaagggacagtatgaggcatccctgaagggataggaaggggactagagctctttagagcaaatagcagctcagctgagctcaactgaaaagacaagtaagaaggaagtagacaggtgaaggagagaggaagaatgttccaggcagaaggaaaaacacatatgaagacccagaaattgtaaaaagccttcagcccagatgttcaaggggagtgtgattaggtttaagaaacttgccaaggccatacagtttttcagttgtgcagctgagattcaaagtccaacttcagagcccagacccctaagcactctcctgtgagggcgagatacaaaattacttagaaaaaggggtgaaagaaattacacaaaatgcgaagaatggttatgtcatggtggcaagattgtgtgtgattttgtttgaagctcccttttaattttcagaccgttttccctctgtgttttataatggggaaaaattaattttactttgttaataattaatatggaagaagttattgagagagagacaaggagaaaaaatgggacyactcatgcctgatgctcttaatttaatttgatcaataaagtaaaagtaaagtaattttaggagagcaggaggtagtaaatgtgggcttgggtagagtgaagagtgtctggtgtaaccatagtaagaggtcactagataataaacgaggtgaataaaagaactgccaggtagtagtgtgggctcatttgaaaataarttacaattaatgaaatttatcttcatatatctacaaatagagcaaaaatgttctgatgcagctattatcattctatgtgaaaatatggaatataaatctctggctactctatattatagtaccataaataagtacaaatatatgtgggcaagaattggaatggaacaaagaataaaaaaattgatgtgtaaggctaggattttttttttttctgagacggagtctcactttgttgcccaggctggactacagtggcacgatcttggctcactgcagcctccgcctcccgggttcaagcgattctcctgcctcagcctcctgagtagctgggactacaggcgcatgccaccacgcctggctaattttttgtatttttagtagagatggggtttcaccatgttggccaggatggtcttgatctcctgaccttgtgatccacccgcctcggccacccgaagtgttgggattacaggcgtgagccaccgcgcctggccaaggtcaggatattatacatttttcctcttttgttccttgtcaaaatgttgctgtagttgaaatgtagtctgcaaacttttcctagcacacatgtttattcagttctgtgactctttctgctatgctgctatgtagcccaagagaatactcctggtgtgagtatcaaaagtggcagcacgtgctgtagtggctcacacctgtaatcccagtgctttgggaggctgaggcaagagcttctcttgaggccaggagttcaagcccagcctgggcaacatagtgagacccctgtctctacaaaaaaaaaaaaaaacttaacttaaaaaaaaggcaggagctgaagaggtctccaaggacaaataatacacttgataatgatcacgagactagccagcaagtctgatgctttgtcagaatctttggttgagccaaaatttgtccacaaaagtgtgaggatgctggtgactgactccagccactgcaggagtgagttctgtcctgactatggaacgactgtgactgtgaccctccagggtcccattcgtgttgtgtttctcaggctctccttatttttcctcttttctcccttttagatatgccatctctatggcccgaaaaattggagcaagagtgtatgccctgccagaagacctggttgaagtgaaccccaaaatggtcatgaccgtgtttgcctgcctcatggggaaaggaatgaagagggtgtgaggcccaatggggctgggtgggaggcggtgcactcactcctgactgcccggcacagatgctccagggatgattcaagccattccaaagttcaacttggtgacactctataagattccaaaaagcacatattagtgcagccaagtagcctctcctgtatttaacaaaaagtgcttcattctttgcaggaggcccaacctcctatatataggtttctattcttgatttatttgcttcttcgaaaatctagaggaaaagaaagaagttattttccaggtacccttctcgcttttgccattagccaaggatagaagctgcagtggtattaattttgatataatctttcaaaccagcttswtgtggcttcccttttctttgttcaagatgagggccaggaggggaaacatcacacctgccctaaaccctgttcctggaggtcagcatttgatctgttgcaagcccctctttctgtcccctcttcctaccctgcctcccwtgactttgctcctcacacttttggaaycatgccttccgggggggcccatctcttctggccgtccttgtctctgggccacttggagtgtgtgataaatcagtcaagctgttgaagtctcaggagtctctggtagcctgcagaagtaagcctcatcatcagagcctttcctcaaaactggagtcccaaatgtcatcaggttttgttttttttcagccactaagaacccctctgcttttaactctagaatttgggcttggaccagatctaacatcttgaatactctgccctctagagccttcagccttaatggaaggttggatccaaggagggtgtaatggagcatcaagccactcggcggcagcatggagctataactaagcatcctttagggttctgcctctccaggcatttagccctcacattagatctagttactgtggtatggctaatacctgtcaacatttggaggcaatcctaccttgcttttgcttctagagcttagcatatctgattgttgtcaggccatattatcaatgtttacttttttggtactataaaagctttctgccacccctaaactccaggggggamaatatgtgccaatcaatagcacccctactcacatacacacacacctagccagctgtcaagggcagaatgaatctatgctggataagaaatggtggaactgcgttatgaagagctaatttactggacaaagaattccaaagcaaaaccagaacagtatgaatttgagcaggtctcataggttgagcaatttccccctaaaccaactgaaggctaaaaagcaacaggccattgtgaaccaatgcaagacgccctctatcatggtgaaaagctccatcaatgaggtatcttctttagtggtggtatgtaatggaacttagccatttttcaaagcaattgaaatgcattgctctggatctgttccttggcagtggactcagaaagccaacatgtggctcctcccagcccataaccagtatttttgctgcttctgaatacaaattggttggttttgacttcagattgaacttactgtagcctcagatgatttcccccctccgcctccaggaagaaagaatgttactgccttaataaaaaatgaaaagagaatgatgctcaaaatctttccaaataaaatgttccytatattaggtgtctctggatgtttcattttgaaagtttgctgacagtgtgctataaatcgttcattcattcattcctccaacacgttcgagtgcctagtatgtgcaaggcacagtgcaaggttttaggaatgtgcctatgaactaaacaggcactgtgctcagctgatgcctgtcttaggaaagacggaagttaaacaattaaaataacagatgtgacgagtgataaaaagaagggcagggtgagacatgagtttatgacaggaaacagtctgaggagaaatagtttagctaaaaactgaagaataaatttccgttaggcaaagcagggaataaaattaaagctgagagccaaactcagaaatacactgaacttgtaggagtgaagaggtgtgatacctttcctcacctatcataagagtcacggccaatactatgacaaaagatgggtaacaagagaaaagggtaacatatttctttcatcaaagttttacatgacatgggagcttttagaaatgaaaacccaaagatccaaggaaaactgttcatttttatgcttagatttaatgcagaatgaacggccaggcagaaatgtgattgggcaaaaggctgtgatctaaggctaataaatggaaggggaagcccagcaaggcctgtgtgttccgattcttcttggctgcagtctgtagcattttttcctccagggatcagggcaggacccccctggaatgagggtcttattacctactatcaggcaaggtaggccagagaatttctttaccgtcactgtctacacagaaaggcaggggaaggttagagtaatttttctagggttttatggcttgctttgggggaaaggggttctagtttctatgaccctccttgagaaagaggaattctgctttctgcgagttgcttcaggggagaaagaagaggaggagacaggagggcaggagaagatcggagagggagaccttgtttctgaggtttccttggaggctttccagtctcctttagttcaaagtactctgcacaccaaagtgccacactttggggtttcatttttttctgagccccaacaaacccgatcataaaccaaagtcagacttggggattggtgcaaaacaatgtccagactgattcgaggaggaatctttggggtgagcagcgcccgagatctcctctccagcttggcggggccttacttgggaagaagtgggggtgcactgcggggatgcagaggagttctgctgcagccaacttcctcagttaggctgctgtgacagagaagctggccgtcgatttggcatgatcacgctttgacctgcagaggagccacccacccacacagcagatgggaagctgggcttttgtgcctaagctgtgtgtccgggctttaccagcaacttcttcttggaggtagctccttcctggcctaaacactgctgcaccttctatacttaggaggtcactctgttcccaacatatcaagaggctatagatattgtttctttctatttgtactagactgcactgaaattcccctcctaatcagcaaccactgttaacaatttcttttgtatcctagaaatattctgtgcacatatcacacccacacatcctttttataacaaatatcagcataccataaacatcactctttattccatttttttttttacttaataccgtgtctcggatgctgtttcatattggtgcatacagacctacttcaatctttccaacaggtacatggtcttctactatataggcataccaaactccatttaaccagtggtctctaaatagatatttaagttgttttaatcttctgccccgaaaataaggccacaatggataatattatacccacttcttgagcacagaatgttaattttaattcaacaggtacttatcaagttccttctctagcaaaaatatagcacattgggtagtcagacatggatcctcttaagtttcctcaagttattttattaaaaaccctaagctgggacagatgctttagccaatccaaacttctctgttttatgtctaaagaagcgtgttaaccagcacgcatgcacacataaaccataataaaaagcagaatgtgatcaatgcgataacaaatttctaaattaaatatcatgggacctcagggaaaaaattaattctgaatataggatcaacaaaagtttttggaagaattcagttgtgatgaatgagaagtgggcaggaactgggccttactcatgctgttgttccctacagaaccagggacatttctagatttttagtaagagtttcgtaagttttaaaaaattgatttatattagttataaacaaatgtttcctgaatgtaggaaatgctgaacagaaagaagtaattgtgagataagttgtgaaatagacctacctgcggagtatttagaatagaatggattcctgtctggaaattatgacatctgggttggtctgatgcaatgcattggattatatgaccttttaaagtatcagtcaacttagtgattttgttcacctagactcacattcacacacacacacacacacacacacacacacacacacacacagccctagtctgtccctgggagcacagttgtgatctccattgtaaagaccgggtaaactcttagcctgccttagatcagcctatttcagactgaggcttaaggcacgggacatttccatgtgctctcagtccttgggatgagccctgggcccaccttccttacatttactatgcctstcgtcactgacctctgttctttgttccacccagtgtgcagatgggcttgcagtaaacgccagcagtgctatcttcgtgaacttggcattgttttgcccagtacgttcctgccaatttcatgatccagaaagcagagctgatgctcagaacaagttagaggcattgaccgatcctcttatgcaatctagtcactttgacagtttcctaataaaattcctgtaattaaattttaagctgtcaaagagggctcttactcagtatgctttctccctatttctgaaagacagtttaccaactgagcctgtgaatgagtgacaaaaagaaaactgcgtaaatgttttctcatgcctaacatctacatatatttaataacccacatcaggccagggacaaaaacaggtaacctagtcattgcccagcatgtcaccattaacaactcagagacaggtcagtaaaatgacaggaattttttattttatttggcaagttggaattggagagttccacttaaacatatattttcgttaatggaaatctaatatacatcatttagagaattagaatgcacacaaacactgaattctgaaggtatacggaagctaacataaaaactgttgattcagcagtcatttctggacttgtctacaccatgggtccactgttataagtcgcaatgttcaaacctgcttgctctaagtgtagtgctcagaccgggggcatctaggagccggttagaagtgctgaatctcagcccttaccccagacgtactgaatcagaatctgcattttaataagattcctacgcacattaaagtttgagaaatgctgtcctagaagaataaaggtctcgttaaaagatctacagttgatggaaggctaaattaggctcttttaaattaaattacactttctcacttacactggactcgagagagtgaaataacttcccatgaatgtttcccgatcatcagtattcacttgatgtggccagagtggctcttccctctgtttgggtacttcctccaccacccagctttgccctttgctgtgccccttcccttggtttcccccttccaggtggcactcgctctaagaagctgatcttctggtcctgctggcacctgcattgtgtctcttgacatgatctcttgccagctgcccagggctgcctctttaatagatctgacccagtttgtgccaygtcactcaagtcttccctcttatccctccaccgcctgtcaaactggcttttctcccaccatgcctggagcaatctctctatgacttccagtgacagggaactcattaaatagtaaaccattactattccaaggccctgcagtgtctactcttaaccccctaagcaggcactttgcaatgactttctggggttacaatagcctcattgttaagtctgccaaatgcctaataacaaggagaaagaggaaaatgtcttccaagtagagcgactatcatatgcagtggtcctgaggatgaatgaaacttgatatctttgaggaactgaaagacaaggataactgatgggaagcaagaacggccatatcataagaagcagcggtacttgcaaaaagcttaggaatcacctggggagcttattaaaacacattttccagatctcaccttgagactcagtgcctatagggctggtgaacctagcaatctgcatttcccacaaacatccaaggagattctgcagcctgtgacttacagaccatacttcaagaggaactggtgtagaccagctgttctcaatcctgactgcacattggaattatctcaggagttttaatcaatgctgatgtctatactcctccctacaagagtctgacgtaatgatcagatgtgcagccaaggcagctgggtttttaaaagatccccagatgactctaatgtgcagccaggtttgagaaatgttggtctatagcctggagtactgcgccaaagagcaggcacaggtggaacatcttaacagttgggcagaacaataacaggcactgttgattcagaaagtaggaatgaaggcatggacacattgcacaggtaagctttgctttcttcacaatttagccatccaatcaacaggcatttgcctgtctgggtacccagtaaccctcttaagtgccacaggcctcaggcttagtcttgcaagccaaagcaaggtcattagtacctgggattgagttctctgcgttcaggcctcaaatcccctttttaaatggcttctgggatagcctcatctttcctcccccttagaaatacaggaggccagataccccaagacactgtttaaattataagactggttcacttttcatgaataaacatgagagataatgtgtgaaggggaaaaacatttaccaatcatgygtcttcaaaaccttccaagattatgcagctttaatggctgaatgattttgaaagaaaaacttgtaaatggagctgcacctgaactcataataaaaaggcatcagattaattgagtctcagagcttccctaacaataagcctgacctgcatatccaagttgtggccggccaaggccaagagggcmtttgcccttagtctcaggctgctccagtttgacagaaagtcaaggcaggccactcctgacagggtacactaataaggacagagggttagggcacttcaagaaatacttgccatattatttttgctactcattcttctaaattggctggagaacaagttagctgggtcctagggtccacgatccagtcagatagatcggccagaactagatggcctcttgaggtggtgactcatcacctaactctcagaatgcagcagaggaagactagctgttcccaagatcctgatgaactagataagcctcctgcagagaacacaggaggcttcctggcttcctgccaactcccttcctggtttatctttttcatgtgaattttaatatattgagaacctgcttttgccagttagtttaaatgttaccccattcaatcctcacaacagccctctgaggtaggttacagaagaagctgcatttccagaggctgagatttgcctaattacccagctaggcatgggatccgtcggctccaacttctgtgttctttttgctccccagtagaggtgacaggatccacagagaggcatctcaaagagggataaagaatgagaagaaatttgtctttccctcccttccgttcttcctccctcccaccctttcttccttc

SEQ ID NO: 8737 - DNA, 57198 bp, Homo sapiens
cacttttcaaaggggatgcttccagtttttgcccattcagtatgatattggctgtgggtttgtcatagatagctcttattattttgagatacgtcccatcaatacctaatttattgacagtttttagcatgaagggttgttgaattttgtcgaaggccttttctgcatctattgagataatcatgtggtttttgtctttggttctgtttatatgctggactacattttttgatttgtgtatattgaatcagccttccatcccagggatgaagcccacttgatcatggtggataagctttttgatgtgctgctggatttggtttgccagtattttattgaggatttttgcatcaatgctcatcaaggatattggtctaaaattctcttttttggttgagtctctgcctggctttggtatcaggatgatgctggcctcataaaatgagttacggagggttccctctttttctattgattggagtagtttcagaaggaatggtaccagttcctccttgtacctctggttgaattcggctgtgaatccatctggtcctggactcttttttgttggtaagctattgattattgccacaatttcagagcctgttattcgtctattcagagagtcaatttcttcctggtttagtcttgggagggtgtatgtgtcgaggaatttatacatttcttccagattttctagtttatttgcatagaggtgtttgtagtattctctgatggtagtttgtatttctgtaggatcggtggtgatatcccctttatcattttttattgcgtctatttgattcttctctcttttcttctttattagtcttgctagcggtctatcaattttgttgatcctttcaaaaagcagctcctggattcattaattctttgaagggttttttgtgtctctatttccttcagttctgctctgattttagttatttcttgccttctgctagcttttgaatgtgtttgctcttgcttttctagttcttttaattgtgatggtagggtgtcaattttggatctttcctgctttctcttgtgggcattgagtgctataaatttccctctacacactgctttgaatgtgtcccagagattctgttatgttgtgtctttgttctcattggtttcaaagaacttcttaacccaggaatacagtgaactgataagacagagccctgtcgcagaggcacaatccagtggagaagggaatgctaaccctcctgggtcaccatactcaggactcaggaaccatgtcttcctcaggtttgcattctgagaaagttctcctgcagaaacctatgcttactacatgcttgattatatttaagtaaatttgccatttttaatttaatgaaaattcaaaacatgtaagtcatttcaacatatggtatgttgctaaataaaaacctttattttaaaaataggttttaattattaataatttatattactttcctgatccacaatgtggtctagcacagaggtgttagccattgcatgaaagataggaactgagcccctcttctctcttcagaaacttggaagcaagaaacaaaagtcagacattcatgtctttactcatctacacaaatttcatattttacctttttaaaatagctttacttatatatactctacatactatacagttcacccatttaaagaattaagtttatcctaaagctgcttccttacgtattttaaatttggcctaaaagtttctcagtatgtagtgaactgtaacctaactggatgctgaaaagactgaaacctactcttgtgccaatcacagagtttcagcatatctaaggtggtcagttgttcaaactgtgttcaaataaggcaaatgccaaattataaccaattctatttctgtacctcatttttgtcttctttacatcactttcctttttctgcccataaatctttttcaaccacgaggcagtgctggagtctctctgaacctattgcagttcagtggctgcccgatttgcacatcactctttgctcaattaagcactgttaaatttaatttgactaggtttgtcttttaacaaagatgtacagttcaatgttttttgtatgttttcaaacatacaaaagttgtgtaatgatcaccataatcaaatgtacaattttttatcatcgtccaattagcagacactaccattccctcctacccctccactctcagcctaggcaatcaaaattctctacagttatgtcactcctgaatatttcatataaatgaaatcatataatatgtcttcttctgtgactggcttctttcaattagcacaaggttttcaaggcacttccatgtgtaacatgtactttattcccttttattgccaaacaatatcctatggtatggagatatcacattttatctattcatcagttgatagatatttgacttatttctgctttggggctattatgaataatgctgctatgaattttcacgtctacatttttgtgtggacatatgttttcatttctaatgagtatatacctaggaatggaattgctgagccatatggtaactctatctatgcttagcattttgaagaattgccactgttttccaaaatggctgcactattttatattcccaccaacaatatatgagggatccaatttctccacattctggacaacacttgttactatctgactttttgattatagctatcctagtaggcctaaaatcataactaattgttcctttgagttgcattttcctgctggctaataatgttgagtttttttatgtgtttgtctaccttctttagagaaatgtatattaagatcctttgaccatttttaatggtgtttttattatctttgtgtgtgctttattatctttatatgttctatacacaagtccttatcaggtatataatttgcaaatatctttgcacattcttggctttttcttttcactttcttgatacccttggaagtacagatgctgttaatattgatgaaatcaaattaatttacctactttttcttgtatttcttatgcttttggagttgtatctaagatggctttgcataacccaaggtaacaaaggtttactcctacgttttctatttagttttataatttttctcttaagcttgggtctatgatccattttgacttaatttttacatgtggtattataaggagtccaacttcattcttctgcatgcagatatccaattattccagtaccatttgtaataaagattactcattctgcattttttcaacccttttcaaaatctagtggctcataaatgtaagggtttagtttgtggacacaattctgttccattgatctttctatctattgctatgccagtaccacattgtcttgtttattgtaattttgcagtaaattttgaaattggtaagtttgttctttttcagaattgtcttgactattctgggcccctcgcactgctacatgtttttaggataactccattcatttctgcaataaaagcttgctgggttttgatagagattttgtttaacctgtagatcatttgaagattaatgccattgtaacgatattaaatctttcaatccaagaacatggaatgtcattccatttatttaggtctaccttatttcaacaattctttttgtttgttttcagactacaagttttagatccttttgttaaatttatttcttagggttttttttgttttgttttgttttgttggttggttggtttgttttgagatggagtctcactctgtcacccaggctggagtgcagtggcacaatctcagctcacagcaacctctacctcctgggttcaagcaattcttctgcctcagcctcctcctcctgagtagctggaactacaggcatgcaccaccacgcctggcttttttttttttttttcttttgcatttttagtagagacagggtttcacgatgttggccagcctggtctcgaatccctgaccttgtgattcacccacctcggcctcccaaagtgctgagattacaggagtgagccactacaccaggtcatttcttagtatttttactcttttgatctatagtaagtaaaattgtttttatctttgaatttttaaatttttaacacagttcaaatcagtgtgtctgatttcatctccttctctaacaaaccagggtgccagaactgcttcagtttctctgccttctctttgtctatgatgactaatgtatgaaggtatctgctgcatcaaactttaaacttcacattatccttatttctcttgaccttgacagatctggcatcttttcacctggctgtaagcagaaagtccttgatctccttaactttttgaggcatggcagcatgtgaggcagggagaggacacagacccacacagcaagtggtgagaagccaacagtggaattgttttcttaattccatttgttgattgtttattgctagtgtatagaaatacaactgatttttgtatattgatcttgtattctaaaaacttgctcaacttgtttcttagttctaatagttaattaattgattccttagggctttttaatacaagatcatgtcatctacaaatagaaattgttttactttctttctaatctggatgccatttatctttttttcttgtccaattgccctcactagaacctttagtacaaagttaaatagaaatgggaagactagacattttgtcttgttcctgatcttagacataaaaacgttgtcttccgttattatgtgtgatattagttaagtttttcataaataaacttcacagtttgaggaagttcctattcctagtttgttgagtgttagcatgaaaaagtgttgaattttgtccaatagtttttaaaaatttttttagacaatcatgtaggctttgtccattttttacttctttaaatttatttttattgatacacaatagatgtacactttttaggtacatgcaataatttaatgcccctcactataaattcggagctgcctcctcgccgatgattccagcgcctgacagccaggaccccaggcagcagcgagtgacaggactttttaggtacatgcaataatttaatgcattcatataaagatcaaatcagtgcaattggcatatccatcaccttaaatatttgtcttttcttcatgctagaaacattcaagttattttctcctagctactctgaaatatacaatagattactgtaaactacagtcaccctactcacctatctaacattaattgatttttggtaaactaatctaatcttgctttctggcatcaacctcacttgaccatggtgtatagtccctttcatatgttattggatgcaatttgcctacattttgttgagaatttttatctatactcttaagaaatattgatctgtagtctcgtgatgtctttatctggttttgttatcagggtgatactggcctcatagcatgagttgggagatcatccttactcttctattttttggaagagtttgtgaagaattgatattatttcttctttaaatatttattgggtttttaaaatacatttttaaaatgcaacttgggtagcatgtccaataggaacaaatgagtgtccacccttgaatttcataaccctggaattaatccatgtaatctatgatccacaactgtattaccaaagttcgagttactcataggaaagagaaagaagttctctaattcgtccttaaaagttttccaagttcagaaaaaaaaaatgttgaagaacacgaatctccgcaggaaatgatactcctgtacccccagctcgctctccctcacgacccctcgctaggcggggttcgggaccaggtgaacgctgatctgatagttgacacgggacgactgtggcatcatccttgctgccgtcaatatcccgagagggaggaggttgggccgggagggtctcccggggcggggcggaggaggagggaatgcaaaacagagcctcgtccccggaacccaagaagcagcaacgcccctcactataaattcggagctgcctcctcgccaatgattccagcgcctgacagccaggaccccaggcagcagcgagtgacaggacgtctggaccggcgcgccgctagcagctctgccgggccgcggcggtgatcgatggggagcggctggagcggacccagcgagtgagggcgcacagccgggacgccgaggcggcgggcgggagaccmgcaccagcgcagccggccctcggcgggacgtgacgcagcgcccggggcgcgggtgagtccgcgcggaccgccaggcatgcttgggggacttcaagggcggggtgctaagtttcatgtcacggtgtcctaactgctggctctatactgggaagctctcggggaccaaggaaagagcgaccgtagttctggtcagcgcctgcccctggagctggccacactttcccaaatcaggtgaggggcttctggaatgggagggaacaaggtaggtttgtttgccacgtgcctcgaaattctcaatccattttaaccaaactcttccgagtgcaaggaagaaatctacagaaataagatgcaattcaataaactttcttcctgaggcttttagttaactcttgtattttagccatcatctgagcgggaagccggtatgactctgcaaggcgttcgtttaaaagttgtgctacttttgaggtgaagttaagagtgtctccatccacgccctctgcttcccagtcaatgtccctgcactgctcacgtccctttagctctctccctgcaaaccatagcggtgggtcctagacacgggacatcgctccaaccttggccaaactctcccaccctcagggttcccagatgtcctttgaataatcaaactgargaaggagaagcaagatgtctccacaccccaatccctacagccttagccaatgcatgtgtgtaactgagacagaattttagcaaaaggtctcctgcttccaggactaaacagagcctctggcaggccactgcccgacacccaactccatcctccaattttcttaaatgtccaggtaaacatctccatagtgccagcctgctatagtctcccgaagacctcagcaattcttccccaaagcgtctccttctgcaccgtttttttytttgggcaaccatttgtgacctggctattgagcccacctgggcctcttctctttgtttgctgatagcctcgttaagtattaaaaacctactcccccycttcaggagccctcttttaatgaaagtttgggtactgggatcagatttgggacttggctacatttatttcctgtgtcattctgagaagagaaagtaatagaggcaagaaatttggcaccctattgatctattttattactttgttgagcaacttgtgcttccsgctgaagatgctgcatcccaacatgattctcttattattagttaccacctgagggttttggatctccaggtgtttatttcacatagcatatgctttaacccccttataagtcttctctaaggaagaaactgccatacttcccttgtcttctcyggtgtttccctagctataaaggccccacctgcataacctgtcctcaggctgtgatgtattcccgggtgccctggtaccttctccttcctctccaccacccttcctgacagtgcaggggcaggaaagcatggggagaagggaaatggagactcccacttaacttgctgtgtgatagtaagagcattatttcacaactctgaacctcaagtctctgcccataaggttccctccagtgatataattccttaatttcttttgttttggttattgctttaaaataaaagtctaagcttaaggctaggttatagaaactgcccatcataattgctaggtctcaacatttgcttaagttttgtgattcttagtttcaagtctgttacccactctctctccccgccaccttttttccccctgacttcattgttctttgttcccatcctgaggccttgatttctggttctgctcttctttgaccttaaactgaatcaactcttccatcatccaactcagaataaaattggttttcttccaccggttccactgatgccaatggaagacttgtcttccttgcgatttgcaaaatgtctttcagtcacaggtgctgcggcaatgctgctgtcccacagcattctaagcttcagtctttctctctcttatcgtgggtcagtattcagaaaagggcagatttgtgggttgttcaggtttctcacttttctttttcttctttctagtttgggatcagagttgtgtgagtatttgtgtatataattttgttttggttttttgttcctgctgctacttacgactgctgttattatttcaattatgactaattaatactaatgactaattttcccctatgctagagggaaaataaggaagaaaagtttactctgctacttacccaaagcccaggtaaaatgcttagctgagaaggaatttaaaactcatagtttaaatgcatgatgcatgyctgctgtcattttatctgtgctgccacagtgtcctttcaagcagataactgagagttgctgtattttgctttcgaatttgttacagggacaaaaatagtgacccctcacatttaggtgttttggctgcttaatgcgagctcctgccctctagccgcatgcttattagtttacctagccctttttctggtcagtsatgactggagaatgccaaagagtctcccaagtaggctaccaaattaagaattgtgtttagaagtttgaagtcagtccaagtgttgtaaagattaaaacgttgttttgaagatatgctgtgtcaataaacaaatatggagccagagcaacacaatgtgaccaagtgtccaagcccagcttaggaacacttttctcccatgttatctagcaaactgacaaatcagctttccaacacgtgatgattggaaaatgctattagtttccttcaaaattctcctaatgtttctttttcaaaattgcctaagatcattggattatgtggtttgtgtttcttttcactgtagctgcttgttaaagcagtatactcaatctctgataagcaacagtaaatttgatcgatttgtatcctaaatttagctatcactttacattttgttttattcataatatgaactttagcttctaaaaatcaactttttaatagcttaatatataaagccatcttaaatcaaggaatatctatagggacttaaggtaatattcaactaaattggcaagtgactaccattatcctattaaagctctaaaatgcaatatttcaatcacagaaaaaaaatcttataatttaaagaactataaattgccagatgtttccctagttattacgttagtgacaaattagacaactggaaatagaaaacagagtatatgtttggaacagtcataaaaggactagtgactattgctgctagctgtggttgtattaacattaaaatatttgctatgggatttttcttcttatcaaagcagatgctcagatgaggaaaaactytcttgcatatgaaaatcaaaattgtcttccaaaatatttaagtaacaaaaaattcattatgtagtataaatgctgtatgattacattattcttatagttaatttagaagggtttgaatttgtttttgttttgtttgtgtttgtttcttcgataggtgcattctctaactgtcttaagtagaaacaaatgtctagaatctctcagtgattatcagtctccttcctattaccaagaatgtttttattgtgttgttaatctcacatgtaatttttttaacatttaaaagtttggaaaatgggtaaaaaatgagtgtgccttgtttcctattattacaatgtgccttcctatttcaagtcccaattctagatttccttaaaacttaaaatcatagaattaataatctttcagtttaagtcaacttttgtgtgatttcttgtccacttatacacacatagatgccttcatcttcaccaaataatgtagaaattttatttagttcaatggatttaagtactctgtatgcttaagtacaaaataagaatattgagaaatacacatatgattgtgtaccttttttttttttttttttgagacagagtcttgctctgttgcccaggctggcgtgcagtggcatgatctcggctcactgcaacctctgcctcccaggttcaaatgattttcctgcctcagcctccttagtagctgggattacaggtgcatgccgccacgcccagctaatttttgtatttttagtagagaagaggttcgccatgttggccaggctggtctcaaacttctgacctcaagtgatctccctgcctcggcctcccaaagtgctgggattacagacatgagccacctcacctggcctgattttgtacttttaaagagaatttgttgttgctaatttgctaagtttatttagatattttctgattctatattagtcaaagctcctcttatctactttggaaaatgaagaattatgtctataaaatatatcaacaacagctgcaggtacttacagaggaaatactgtggatctgagtgatattaggccctgaggatacaagccaaagtataaaaatggtctttgccgtagagagatagtagtcaagctaagcacatattttggcatgggtctctaatagcctaatgctagtagggtgggaagccatttaaaaatggcccctccttctgtcctgcctttcagaccagatggtgtgtctaaagtggtcacactgtttggttctggccacttctgtaataaccactgctcctttcccctcctcgtgagattataactcctttgacagtatggayggcacctaacgcatccttgttttcttttactaaatgttccacggagtcacttgcttgcctgtttgttgcttatttgtttgtttttggctaaaactacagaaaatgttaaatacattttcagacctttatattttaaaaaagaaatgttaagaaataaataatttttctaatctcatttagatacactgtcctattacacacaatgacaaatttgatgcttttgtcttgctaattgaagagctaagcatgaatacagtttttcagtctacagcagcaatgacaagggtaaagtggagaaaagagtaaggaaagaaaaaattaaaaagaataaaaggttgaaatatcaaatcggtggttcttaagatgacagaggcaggtgagacaagaatactggaatcacccagggggcatatgaaatctgtacatttcatccacaccttcttttctccccctgtcctcattccccctgttgagacacattgtattacaaattaggaggaaaccatctaaaattatctcacgtatcccagttcccatattagcatcatgagtatcacctgagagtttgttggaactgcagaatctcagaccctgtccagacccattgattgcataagaatctgcattttagcaaaatcctcaggtgattcaaatgcacattaagggaaaagaaacacagtgtaccgtacctgtggcttgtttagaataattatgaagaggtgttttcttggctcttmackaacgtttttaataaagctaatatttattgagtacataaatgtgccaaacacaacgttcagtctttctttaaattttttttatttaatcctcacaacaaccctgtgagatagtttctgttttatccttattttatagattgggataccaagtaataatgagataagtagtttacccaaaagctgtaactgatacagtcgagatgtaaacataagaattctaatttcattgcctgttctcttagctgttacctacagtgtctgctctatactgggctacctactttttaaggccaactaattatttgaaaatttatttaaagttttaatttgagatcaaaatctgtttccctcataaattttttttwaaaaaagcaaacaagatctattccattttgatctaatgttttcctgtcaccttacctttaagtgcaataatgggaaattctagaaattccttctttaactgtttgaaaaaataccaaaactatgacagcctgtccaaatccactaaaatatatttttatatgcatgctttttgtatatcaattatacttcaataaagctttttaaaaaaatagtagatgacatacttttaaaaattaactttggagcccaggtatggtggctcagacctgtaatcccagcactttgggaggatcacttgaggccaggagtttgagaccagctgaggcaacaaactgagacccccatctctacaaaaaataaaaaattgccagagcatggtggcgcacaccatgtagtagttgggacctgtagtcccaactactcaggagactgagttgggaggattgcttgagtctgggaggtgaaggctgcagtgagccatgatcacaccactgcactccagcctgagcaacagagaaagaccctgtctcgaataataataataataatamcaacttttgatatctctattttttcccataaaaatccaaaattttctgtttactttttggtgctctcatgctataaagtaaattctcccttggattggacaagttattttctgttttctacatacacatagactgttcagcattccaactcaaattacatattactttttcagcttttaatataaatgcttatttactacaagcatggtttacaaaaatgtagtaaaatatagttactaaccagtcaatgctcaagccagtgactccccaaatgattcagtccctgagctgtttcacccagtgcaggtagattctctgacagccatcagttggatctgtccgaatatctcctgttttgacaggggcttattgatgttggtcaaaagacaggtgtgtatgggttccctgggatcatgtttgaggggaaacctgtgccaacaggactgagcagccactttttcaatggtattgagaaaatttgtaggagataaaatttcaccagctccttgaatctagaactgtagatattcaggtagcactgacattacaacatctaatttgtaagttatgggttagggcaaaatcaatccagggctgccatcatgacaagtagtggaagtttgaaagaaggagaaatacccaaaagatatcttacacatagcaggcagagtttcttagtactaataaaaaataaagtaccagtgatcaccctctatagcccctaagagtcccctggtttcactaagccccaatatttgtggctgtggctgaatgcaatctgcacaaggttttctttttaacagttggaaaaaatctcatagcatagcatttttttctttttaacagttggaaaaattctcgtagcatagcatttttttctagtaaatttcatatacttaacaactttatcagcacatatattttccttcacacttacaatttcatcaacacatatactttactttttgactcaaattcttcttgccatcaattcaaatgctcctgcccttagaatgagaattttccattaacccagctttaataatctaactctcccattcaaatgatgtcacttcatataaaacacattttatcatgatgtctcccagccctcagttacacagttaattgctgccactttatcatgaatgaaaaagatgtgattcttgggtaatgatttcttgagtatgtcctggtctattatctactgagttaccagagtggatttttgagagaacacacagttattcctattccttttaatttccattaacttaagccatatgatagaacattacagttgttatatattttgtataaatataaaatgtaatatataatttatatattttaaaatatttagtggcaagtaaagatagtagtaagtgaaaaaatcactgtataacatatgaatcgtaagtgtgatcccatgtatgtgtatacctggtagatgcttgtcaaggtgccattaaggtcttgggttattggcatcttaatgaaattcatttaattatgttaggattgatttgttagtaaaatcacttacatgttttttaaatgcatgcatatctgtggagccaataagaaaaattaggaacaatatacaacaaatcttaagagcttttgaggatgattttttttctttctttcttttgtatgtacctacaaaattttctataatggatctctattgattttatattttttactttctatttgtcttggaatttctattactttatttataattcactctagattttaggtactagacaactactattaactctctggagaatggtactataaatctgaccctttctgtcatttttttttcctgtggtacactagtgtctcacaaagagtccacagaattcacacggtcatgatattttatagaagaaatcattttatgggaactttcttttgttaatagatccttccaatgctaacattattctgtataacartgctaaagttggtatgcctaaatgctaaacttggtatgctaaagttggtttaaaaattaacctatatacaatcttcttgaataactcttcaactttaaataaatttcttatttaaaaaatcctcctatatataattaaaaatactgatgaatttgactacataaaaataaatgcttatacagtaaaaagtaccataaacaaagttatcatctaaacaagaaacctgggaaagctatttgccagccattacatgtaaaatttaagtttccttaacataacatgagctctttaatgtgagaaacaataaacaacctaattgaaacatgagcaaaagccatggctgagaaaactcgtagaagaattactatggaaacaataagaaaatgaaaagaagttcaacctcattcataattaacgaaatgcaagtcaaaacaaagatataccttttacttatcagataaagaaaaaatgatttgataaaacccagattcttggtattataaattggtataaccttaacggaggacattttatgaatatctatcaaaaacttagcatatacaaacaatttggttcaacagtctgttagaatttattatatagatacattcatataagtacaaaagtgcatatatgtaaatattattattgggacatttttgtagcagccaaaaggaaaactgaaaaaaaagattaaggctcattaatagcagactggttaaataaactatgtgtgagtacaatgaatgaaatattgtacagccatcaaaatgaatgaggtagatttatatatgctgatgtaggaaatctgcwagccatcataagtaaaataaatgaaacaaagaagaaaatactatgatgtacaaaaagaaaaaactatagatatacatatttatatgcatgtgtatgcattttttatgaatatacatatttatatgcatgtgtatrcaagtcctagaaggagacataggtaactattagtagtacctctgggaagtaaatgcagagaaaagtaatagagggtaaggatatgtttacttttattttacatccttctgtaacttgacatttatacgacgcgttagcattacttctgggaaaaagaaaaacagaaaaggtaatcttttaaaaaggtattttttaaattatggtacaataaaatgtgcataagctttatactaagtaatagaatcatttaagtttagctgtagattcacaagtaaaaatccaatctrttttcatattcttacatttatagacatttcttacatgtctatagaaagaaatggctaggaatgagactgcactattttaccctaaaacgttctttttctctttgcctaatgtatatctacaagggcattggggaagatgttgaccacaggcaggaagatgatgagatcctgtgcccaccacttaatgcagtctagctctatataaggaaaaatatgttcttgatgtgaaccagatggtttcactcccttcaaaaacactcttaagatgcagtgtggaagcttactctgtaaattaaaaaataaaaacctgactatattcagtggaatgcgttaatcatttttttctttttaggtttgatatttgacaaattgatctaaaatggctgggtttttatctgaataactcactgatgccatcccagaaagtcggcaccaggtaaatgccttacatctacagcagtgggtctgtcagcagttttctttaatgtgtcagcrgtggggagagcgcaaaaacccacacacaccattatcttgtgaaagaagtagaggaagcagaaaataatgaaatcccagtgttaccacatcccctccaatatacagattaagagcrtttgtatttatrtggttttaaacataaataacatcagaattactaagctatttccattcatgtactgataatgaatcatgtgagaaagtcctttggcaaggactccacatggccacaggtgattcctttgagcagtgttcttcctgtatagggcttaagaggaccagaagggaaatgattgtactctcttgtcagctacttcctgggcratttgggttctttgataccccagtgctcactttcggaagtgttaagaccataaaccttaacagttgaccttctcaccttcagaaaacccaaatgtctcggagtttcattctcacaaacttccaccttcctccaatgatgagatataggaaaaaagacaatgtgaaattggagatggaggtgccctcttagcctctttacaggcatgagtcacatggcagggcattaaactctctcacaacctgttgtggagctcagcagggttagccaggactgytttgtctatctaactcttcttacatgggcctatgtgatatttttcataacaagagtccgggatttacctaactaataagatttccccaygcccctccttacaaaaactcagttcaaagaacaagccctcagcttctcctagtcccctccagggaaaatgaagagtagcttgtcctattctgaatatgttgtgctcccattttatcaaagtagaggatagatacgtaggtgctgggtgggtagataaatattagagggatgcttcttctttgctgtaacagattggcaagtaggaatcattttctggaaggtactccacagtggtggtgttagaaaactatttagaatgcctttaatcttggagataaaaatagtaacactttacagagttctgtcaatggatatctttagggatgttttgttttgggaggttttttttctgattttgtttttttcaggtatagcgaagcttgggaatctggactgtgcagattttctgcaaaaatccagctctggaaagagtgtattaagatgcatatcctaggatgacacaaagacagtatgctttattttacatcttaaaagtattgaacagaaggagttttgtccatgatatcccatcagcccactagcaggaaaagcaggacacttacccagggkgttcctgctggaaatgattcttggaatcagccttccttctactctatttgggaagtctttggtttctaacattcacacatttgtagcaaagcttccaaaataactatgatgttttgcttaggaataacaaaacatggaagaaaacattctgtgaaattttaaactttttcaaacctttaagtttcagatgaataagcaaaacatacttaaktctaagaagctattttttgtttgtcaaagaactgatgttataccagttctaatattaattagcaactttgccctggttttcctgtaaaataatctccaaggccctatctcaatctgtgggcagtatactgaaatacaaaaagtgttcacaaaaggaccttctgaactttgcaatctccctttaaaacttttaccaacttaaaactacagaactctgatctcttattgatttaaactagtgatatgtaaacagcacttcagagcttgtttcacaggaccaaaaaatttatgctgaaatctactcatgacaaatgggaaaamcctgattagcacatttaaatgaataaataaagaaccgtattcaatggcttaaaatttatagacctgcatcatccattatggtagccatttactatatgtggctatttacatttaaatataaacgtattaaaattaaactaaaaattcagcccctctgttgcattacccccatctcaagtgctcagtagacacatgtggttagtggacaacacagatttagaacatttctatcataggaagtactactggacagtactgctgtmaacacacttattaataatgcagcagactttcttggccacttggtaagaaagttttctgctcttttaaacttatttgggaagtttttaatacttttgaaattatgatttcctcagtgttagattatctgatatacagctctcacagaccattttttgtttttcctgtttgtttgcatattaaaatatataggattcaatgtttcacgtgcttttctaaagttgcagttcttgatttcttaaaattgtgaaaagaagtacccacagttatattaagaactaaaatatatggctgttggcttggttaccaacattgctgacagctccaagtaagcaaaagtaaaaaagatgtaggatcatttttaaaggccaatattttcttccttactcattaccttctgtaaaattctgtaagattttctttagttttccartaatgataaacatttcaccattgcatagacataattaattgattttttaagcagttggagagccaaacaaaataaggggtagaatacttcttattttattttttaataaaaatgtacatattagaagcctttatttttatttaaattgtatgtcactgataaggtttggatatttgcccctccaaatctcatgttgaaatgtgatcccctgtgttggaggtggggcctggtgggaggtgtttggatcctgcaggcggatctctcatgaatggcttggtgccctccccatgttaatgaaagagttcttgctctgraactgtgacacctcccccctctctctcttgctcctgctctcgccatgtgacatgctggttccctatcaccttctgccatgattgtaagcatcctgtggcctcaccagaagcagaagctaacaccatgcttccttgtaagcctgcagaaccaggagtcagttaaagctcttttctttataaattacccagtttcaggtattcctttatagcaacacaagaatagaccaacacagtcacggataacagtagtttttcatttttcatcaatataatgatcctgctgtattcttaaagttcttaatcactatttgtcactaatacgataacattaataaaatttgagtctcagttactttccagtcacttatacctagcagttcaataacatttagttcctggactaatgatcatgtgttatataaggcaaaaaattaaaaacaaatttgtctttgagtcatcaaagcatcaagggtttgaaatagctatataactagctgtgaaaaagggatataaatatccagctgatatttcctttacacatttaatagtatcatttttcaatgaaagcataaataaaataagtttggaaccagtttggaatttttaaatattaatcgcagaatcttactaacagaaaacaaaagcaagataaatgctagtcatttgtgcctgagtttttttttcaataaacagaaatgaagcttgctttaggaaacatgtgtactccaaataacctactattcacacaattctcagtaacattctttctttgcttaaataatacagccagatgtgcttagcacataactctatagaaaataataatttaaattagatttaaatagagatagatagacagacagacagatagacagatatttttgagacaaagtctcactttgtcctctaggctagagtgtagtggcatgatcatagctcactgcagccttaaactcctgggctcaagccatcctcctatctcatcctcccaagtatctaggactacaggcacatgcactatgcccagctaattatttttttaattttttgtagagatgtcgtcttgctacattgcmtaggttgctcatgaacccccagcctcaagtgatcctcctgcctcagcctcccaaaatgctaagattacaggcatgaaccmctgcacccaaccaatattaatatttttaacaattgaaagagctcaaagaaataggttttaaatttagaggccctgttttgctgacaggaaaggcttttagctggaatcaagagtgctgttgtcttttcccttcaattagtcattccttttaagacttttaagatttaaatgtatgagtcattttttaaatcccagaaagatctagtatatctcataaatgtaataatacagtgcagacctggtggaaaataattatttatctgaaactgggcctcagtgcctttcctgaatctaaacaaatrttcatctcacccagagaactgggacaacaggaacaaggtattgcaagtccaaaatccaatccaaagcagcgttcttcctccccacctctaggcaaggccaaaatacttctgcacacagtatagacaccagaaaaaaacagagccactgtagatgaaaccagtcagggggtaagagctgtcttttgatctagagcttgcacctttgctcctcagtaatactcccaggtcaaaaaggaaaaataagatgggcagttggctgcctcctggtccctccagcctggtcagtgaacagagtgggaagataaaacagctaagtatcttccttaacaatgcaaagcaagaaatccagtctgctttgggaaagtgaaagcaatgcaaattcagattattaatcataagagcatctcatgtgatatacaaaattattgtatagcagtaatgggtcagccgtattttattcaacactgaaccattaatgaatgctagctagtcttcctttcacttacagaatgtttatctatacatgactaaacaaagaaggagcgctggaaatgatcctgtgaaaaatactggctcacaatgtatcagctgagtttggggcaactgaggtagtaggaggcgccccctggacttctgctrgaatttagatttaaatagatggatgaattagacaaaacatactctctgaaagagtgagaaatacaatattcaccaattaagtgaaggaaaaatctacactatgaataaaacaataaatgtggatacatttgaaaatttgaatttcaaaccccttaagataatgtgacaaatacaacaggcctaatttaacatcttaaagagatctgtgtgacctattttgcagttttattttcttaggacaatgcttcagtatctttaactttcatatttaatcattttttttcttttttggtttctatggtatcaccatccatcaatccatattggttggagggggggaatatatatatatatatawgtatgtctcccaagagaaagtaattctgcaatcttcctcagcaattcagtctaacaattaagaacccttaagctaaatagaaaaattcatttcacaggcaagttttactcaatatgtataattagttttagttaactttattaatgaaatgtcgcaaatcaattaggtttgcaataatcagatgccgaggacccaagaggaaccattcctctcacaagaggggaaggtgatacacaatttagttgggaagcaaatgtaattagatttgatcaattgagtattcctgtcctgatgtggagtcagtcacatacccaagcctgagaatatatttgaaaagaggtagaaaaaaacccagtatgacttagaaaatgtccttgtggtcctattggccacaactggcagccaaaaagggctttgaagccacaggtagacaggttttgttcagacagggctatgttttagatttctctttcaaatctgaatggttttacgtagggcaatatataaactttcctatttgtcacagattctagcactctttaatgccttatactgggtgtttcacacagttatttaactgcccaaatcccaatggcacttcagtttgcaactatcatgacctagaagttagttattgaacagttatgaggtaacttaaagtttcttccctttgcctctagaataagaatatcaaagaaatgtcatgatgataggaatactactgaaagaggatattaaacactaggtattcctacttagggctacagtttgcagcagattctattgtgtttcagtcaataagtgtttttggacacctacatgccagacactattctcagcattgagcacaaagtcgtgagcaaggtagacaaaaatgcttggcctcataaaacttacattccagtgyataaagatgagaacaatcamgtaaaatttataatatgttggatggcatggaaaatggaaataaagtggaagggaggcttcaggttaaaaagagtgtttagggaaggtcttcttaggaagaaggaggaagctatgtggacatctgggagaagatcgctccaggcagagggtagagcaaatgcaaattccttgaggcagcaatgtgctggcatrgtcaaggcacagcgagtatgccagggtcttcagaaaccacagagaagagtggataacaaaagtgaaatcaagtattgaagagtatgaactgacaggaactagagacatatttagaatggatgccrgaacaggagaaatgggtgggattttaaaagctaaatgatttaaagacttaaaatgctctgaagtgtagtgaaatgttccccaaactgcagattttcccargaaaccaggtgcataatttagtcatcgatgactggttctgtggcaatgactctagtaattagacccctgcattttatgtcagttccttctggatactcagctacmttatttggtgcttttggyatacttcaaatatgcattgcctatcactgacctgtaatcctgtgtctctgggcctgaaaatataacttttcatgtagtagagaattagggctgtgcaacattgccactagattatttttaatgaaagctttgcccttttrgataaatacagcaatgtattcaaacaagtcctagggataccactgagtgcaaaatgtcatgtactagttattccatttaaattattttatcttcaagtctaataagaaaattctaaataaaattatatatttgggattgtgtgtgtatcatccatccacatgtaagtaggaataaaattatttaatggaaaatttcaaataggctaactctaaaaatgtacagataatctgratgagagaaaactatcctcactttgtgttatttttyaatggtagcattttctcataatccccatgcttttttcatgtcctgctattctttaagatttcctaatgaggattagggaataggcatatttaacaatctgtgttcgcaggttgaaaacaagaaaatgaagactaatagtttctctcctgttaatttgattttctacagctcctctcctaccagcttaggcagaggacttagttactatttccaatagatgggagccaaggaaaagacaagcatctgtgatgtcatgtctcccccaaacgggtagctgcctcaccagcctccattagagacatcccccasagtaagaaataagaaataatcatgagtagaatgagaaaaaaatrcagcttcctttatctgagaaaaacaatagtagctcaatgctgtggcctaaagggctttgaaaataatgcaatttctgataaaaataaatgccattattcttgcttattgtcactgttttagtcaaataagattttagcaagcatatttcaaattgttctaaatctaagtaaattggtaattaaatgctatcattagaaagtattttaatatcaraaaaattggaccataagaaagttagtttacccttgtattcatatatacatgtgctttgtgctaaaaattgttatcatttagtgagaacctgtgactatattaattaatttaatttaatcttcatatttctctgaccgttagagagtttgtgacttggataactttcaaacaactagtaccctgatggaaatccagaattttgttaacccagatcacagstgcatacttaaatgctatgcaacagtggcacttacccccaaaccgtatcctatggaaatgcctttttagcaaattaaactgaattgtgttcagagatccacaggtctaagcaacattagggaaggggtaaagtagtcctcagcaaggcccttttcagagcactccaccagtgcccttgtcctcctgggcagagctcctcagctatactccctttcctagtctaccctatcccacaacggaaccatacttctctcatggaagccctggtctcacagaactaaaaaggaggctcctagaaatggggttgtgttgagttgacagagatgtgtggctctttaaactgaaatataatccaaagagaacaagatctagtagaatttcaggtcctaagsctggttaaatttcaggtcctaaggctggttaatagtacaaatacagttatttatttataactagtgcaaatacagttatttatttataactatacaggaatttatttcccagtaccttctatattactaacatcccataaaaccagccatgtaaggaactagaacattttgagaatatgcaatacataactttaaacaagaagttttcattcttaattaaaaagaaataagcatagttcatcacaagttccttcaaatccttgtgccatttattctctctccccagagatattagacggcattttagagaaaacaaactctttaagtcacaaggagtggaataatcatagttgcattttaagcaagattatggttttttctttgagttctctgaatttgaatagtttcttaaccttagttttttaactgctctgaaaatggtttctgtccctggtggactcttgtttcaatgcagttattttgtctggtagagtcacagagttaagcygtcattcagatcagaaaaaataaaagagagagatgaattaatctcaatggcacagtctccttattcaaaaaataaaaataaaaataaatctcaagtccaacaatgaatcatctttgagactctcccaagtgatctagttttaarggcaaaaactttggggaaactgttgggggagcaactggtgcccagtactgtttcacacacgtggtttttcttatctattgctcacacacttagacataactggaattattgcctttgtattgttgttgccattttataaaggaagacaaaaargatcagacaaaataatagtgaacatctattaattggacacttactggtgtcargcactgtgtcatgcactgtgtcargcactgtattttcttatttaatccaacaaaaaaaaataggmtaaattatcttattggctcaattttctttacagaaactgagcctaaatttcccaaatggctaaccaatgccagggccagcaactcaaatttgggagtaattccgacacctaggttccaaccatttttctcccagaaataacccaccaaattcaccagagtctaagatcttactgttactgtttaattaactgctacaattgcagcattttaaaaaaatataaatgagcactgtgctagtatttaattatagctttatactgatactgggtacaagtataagctaacaccattttgaattatagtagaagagtcaggagctctgagaggaatgttcaggatagaataaagcagatattttaatgtctcatttcagtgaggaaaattgttaattcatatgccaccagccatyggcagaaatgtaacaggaaatgaagaaaaacttaattactttaaatacagtggtctgtagtacaaattattgtgccgtgaattagtttccttctgctgtagaattgatcattttgattatgtagccaagcagtgtaagacattactaaaattattcttgaatcctacctttgagatctatataaaacactaggcaatttgcctgcaaatacatagaaaacaatttttaaaaggattgggaygagttattttcccctctgttaaatattagcctttgaaatgaacccagctgatctgccaaataacacttggaaattgttgtgttttaataaagtgacagactgagagggaagccacactagacgtccttatgcttttagaggccttacagggcaggaacattatgcaataatgccttttaaaagaagtgagcttcctagtattacaccttgcctggcaacaaatgtagccacttactgaaatgcaggcgtaattagaatctatgaaaatctagcatcagaatcccaaacctctatgcaatactcagtaaattacagcttttatgtctgtaatattttcaaccattctacttaaatatgtgaatacatgagtgtggagttctttaggaggcctgctgcatatgctagggaaaggtttcatcatttctaatcaggatggctctgtaaatgggatgyctcatgttcaggtttctggaaggctcagagcctgggcttctactggcagagggtagacccaaatggactactctagtgaaaatctccaggtgaacatggaaygcagtgaaaacctggggtatccaacttgcagtataggccaccagcaagtgtcacctctattataactttaaccaggcaagctcagtctcatgcattagtttataaaattgcaacagagccttctaagactgaaaggacattagtttttwaacctatatattatgacctaattaaatgaaattttattttaaagccctcataaaagtagtaaaattggtgttttaaataaaccaaatgggaattcaaccactttaatttttcttttgttccaataggaaaataaatgctttaaaatttgaagttgaaacatgggttttaaatatattgagataaaaactattttgcataggcattttgaagaaaataaattttgttctcgtgatttgtgattggccattgatttccgtgtttaagattatgaaggtgtgctcagctgtctactagaaataacaggggagactcagtcttgtttcaaatggaagggctcctattcggttttctccttcatttcttaaagtgttgtgatttttttattccctggtgttatgtcttgagattttaaatcttaaaacatgcaattaggtattgaagttgaaagctggaagtctcagccagctagtaatggttttttaaaataggtaatacagacctctagtggttgaacagtttgaaagcctctgcaagaaaaggaaattgcgcagaaagtgcctgcattttaaggggaaaagttagttaaaattattcagatgataaaattcacatatttcataggaaaaaaaaagccagaatgggcttcaagggaaggtggcacacttcccatccttttagatgttcctcaattcctctaaataagcaaaaactctctggccaaagtcacagtaagaagtctggatctgtattatttttctctaaaagatcttgtgaacagagctgctagatctctgtattatatgaaacatatatttttgtacacagttttgcctcactggggctttgcttcctttgtactccagaggctccccatgaaaacaatctgcagccacctcaacttgcctgtgctgttctcaggttctgtccatggggagccacacttcagtgagctcagcgattggatggctwtttagtctacatgagagggaaactccatgtgcctctagactagtgcttctcaaactctaatgaacacccaagtcayctggggaatctgcttgaaatgcagattctrtctcggtctggggtggggcctgaggctgtcttgttcgtaaactcccagttgatgctaacgctgcccatccagggccacccagagcagcaagccggttctatgacagctctctttattttttagttacatattttgtttttactcatttcttctttrtttgctcttttactttaataacttctgttaaatttttaatatttggatctgtaaaacatttaaagttctctttcacttcactatgtacaagtatctctgggaatctgttattgaagttttgagaagttgatctcacattttaaaaatagattcagtgtcatctctttatcttgaaaagttcatggtagttgtgagcatctctctaaccacttgaagctattgggttagaggtagctacaattaaatatctgattagccatattgggagagtgggtgaaaacaggttttgtgcatgtggtagatgtgtaggaagctaaggacccaaaaaacaaccacatcataaaatcaagcagaaacacacacacaccacacacacacacagargctcaaagcataagtgtcaacagatcagaagaaaacatgggagaatgtattttttcataccaaattattaaaattccatcatctaaataacttcctatcatagcatgttgtcgacctyatttttcaaatccataattttagaacttatgtcgtggggtagtctaaaagcctcttgcaaacttttaacatctagtttcaaatcaaaaataatatattaacaagctgtagcatagagggagtacataaattatcatcattgccctgcatgaatagtaattcacaggtttggctcacacacaacttagatgaaataattaactatgtacagtacttaacagtataaaagtaattaatctagctgcctcgtaccggtttggcctaaataaacatgcaataaaaaagccataggattttattatttttttactcackwtactactttagtgtgttggaattttaatatgtcagaagaaagatatctttgcattaaaaaatcattttcttttcaaatgttaatgtactgattataactaagtgaattccatatatttataattgtgggcagatgttctcaattaatagtttyattcattctacttcacagtttagtgaaaaggattattttaaattaaggtgtaaataagaacaaatgagatttttattactacaaatcacacagaatttgttggtggtgctataatcctgtgtaggtatagctttggcaaaacatttcagataagcttgttttttgccccatgggttctgggacgaggtgagttgtctgtttgtcctataaggttcagaaaggtaaaagggcaaggtcattaattggctagagggcaacaaagaaggtagttatccctgtgtggtcaagaaaaagtggctcaggttatcttgctcgggagagaaaatgttcattcagctccagtccttttggtaaaagcccactctcagtgtatgagtgttcctttgcctaatcatgtagactataacatgttttcccctatatgactccatcgattaatcattgcagtattatccccacttcataaatgggcaaagaggaggatgaagccgagtagttcttccaaaatcaagtagcatgtaagatgtaggagcaaaactcaaatccagagacttctgcttccagccaagatggaataacagggactagatttacctccccacctaaaacaattttaaaaactggacatacatatgaaacaatggttttcaagagagtggacatcagataacaaagggcagtgatccctggaggataggaaacaaatgacctgggattgtcccagcccactgcctggagggagtttgcaggcatgatacagggatggtacacccaggcagaactcgaggtcctctctgagttaaggacacagagctgggagtccagagaggccaaggaggctagagttcagagtaccagagagttgagagctgcacagagaacccagagatctgcaaatggtaccccttgtgcttcagtgcatgtgggcaaataatcacccaaaygtattagagagaacaagccccagaggtcatcaagagctagaaaatagttgctatttccaccagccacagtggaaagtctcataattcatggagcatcaggtagcatactcagtaggttcttgcctcaggaatgggaaaaatttagccctagactaattgctgctctggtaccacctaagaaaccrtaaaagtcagactcaaaagaattaaattatttgcaagtaactcaactgcttttcagaaaacaactggagaaattttgtaggaatacaaaagcatccaatatccaacaaagtaaaattcacaatgtttagcatccattataaaatcaccaggcatgcgaagaagctggaaagtacaacccataaaaagaaaaaaatgaatagaaacagacccagtcagtaatgacacagatgataggattattacactattacattaaatggttattatgactatttcatatgttcaaaatgcttgatggaagtttgaacatattaaatgaagacatgggagatataaaaaagactgaaattgaacttctagagatgaaaactacaatgtctgagatgaaaacttaaactgagacttcagatgctaagactacatttgtttcacatccccacaacattcttccctggacgctgagtttcctcccagcagctgaatacttcatgcttcatcctttcttaatgctgaactctcagaaaaagtccttcattctaagaagaggcgggagggtgccactctgtagcccctttctcatctcactctggtccctgctggcctggaacagattccactcccttcatgcactgatactccactctagactgagcctcttcatgaggtagccatcaagccatccgcagtcatcaacatggcaccttctgagtcagttacaagagtttgcatcatcagaccaccattttccgtctctgttttctgacttaccccaaaactctagttaaaactcatgaaatattatctcttcacatgaaatacaattaatatggaagtcagcatttttgcatctcccaacgcttcacatccaaggagctgtgtatgaaatcatgaactatgttcttccagccaaccaagcaattaaccaaagtatacatgtccatgttgtccttgtacagagtttgaaatatgctcatgagaattaaactatttttcagtaaatctgaaaaatcaacttgcttgtccaggaagttttattagggatagaatcccaaacaatgaatgtgctagccaagtgttactattaatcagaaatactccatattcatccaggattaatcctgtgtaactccctcagtcagtgtagcaatgtgttctcttcctgcactttttttatgtgtgtgtattcccaaatctgcagtgaatgtatttaggaaatacattagtatcaaaaggacaaatgtagccttaaaacataaatgtacagataatttcctatttgtagcaaagttcacttcagaaacacttgataagaactattcaaaaataaatattttcagtatttatttaaaatattttaaaatgtaaactcctcaccagtcatctagccagggccactgagtgtggctctatgaaatagcttcagtccctttcactactgatgaccttttgaacacaagataatatttgtcgagtaaatgtcaaaatagtataagaatacccaaatcatggattctatgctgtattcactcacatagagacttcactttggagcacttcagagcagcaacagctctaagagatgtaacagtatgctttccaggatagaagaacgaaaagggaaaaataagttgctagcaagaacaatgaggggtaggggtgaagttcaggctgccattctgaaagcttcctcagactgagtcaggcacatctcacgaagtgcagactatgcaagctggctgtgtgagatcaagggtagacagttgactcatcctgtcacatctctgtgttttaccgtaacctccaactattcagccatgaatcgctgcatgtggaatggaagggggaatgtctaacaaacagagacatacttcaagtcttcagtctagttaaaacattggaatgagggtctgcaacatctttctggggcttggagtctcgtctcagttctaaaatgagatggttggcctggatcctaagtttcaaattggcagcctttttaactaaatctaatctagaagagttctgttaggttccacagtgttgggttttaaaatatatatatatattagttgaaaacattttaaaataggatctttcacatgaaatttgaaattttaagtttatattttaaagttagctgttttcccccacctcattacaattggcacagttgactatagctgagaagtgaccccgtggcccccctccaagaaagggggagggccctccattcaccaccatgtccacttcacctatttctcccagcctatatatgtatttgaatatgtgaaccctggaatgcataatgtctagggaccataacaacaatagaatgctatgaatctctgacttacaaggactctcttatgaatctctgacttacaaggactctcttatgaatctctgacttacaaggaaaacaaaagactgtagagaatagtagttcaaccacattttaggttaaaatagactttacttggataacctgacaaccaaaacatctttgataatatagtaattgtgtatgtttaccagacaaagggtatacatgtatattcttgtatttctcttaagaagaaaatcaataaatttgacccatgaatttctttctatagcagacatttttgtgacttcctgactcacaggagatacagctaccctccaaacctaaatcaaaagtccgtaagttgcagaatgactttttatgtaaagagaacatactagtttctgataagatataaagaaaccatgtaatttatctagggaatgactctaagctgatcattgacttatttacacaactatagctactggaatagactgattccaaaaatatattttctctgaattagaatctttttcatatcaaaatatccaaaattattagcatattatgttattctcacaaagtcctaatgaacttcacaaatctgcctgctctattctgagtacaaaaaatatttagcctaatttgtttttccattattttatatagtaataaagtaataccaaaaatgttattgccagaaacaatacagtgttgtataattattagaaagtgaactcatgaaattctattaaaaaacaacaattaccacatgttaagtcagataattcacagaagagacttatatgaatactaggggagctgtaggcaacamaatttttctctgaatcctgcattttgaaggaagtttctgtcatttaattagttgaggtttgattcaccaaccaaaggtctatagtgtgatatattttcttcctccaacataaagttaacttaaagtcatttgtactttatgtgtttattctttcacttcttccccaaaagtaattctttaaattgctttatgggattaataacaaattatatcattatatatttttgtattattagggcttctaacttcattataatcaatttattggccatatataataatgcaacaaattacatctgtaaagtaaaattttatgacgcaatttacttagtatatgtataagtctcattctgctgcccaggctggagtgcagtggcgcgatcttggctcactgcaaccttcgcctcctcctgggttcaagcgattctcctgcctcagactcccaagtagctgggattacaggcatccgccaccatgcccagctaatttttgtatttttattagagacgrggtttcaccatgttggccaggctggtctcaaactcttgacctcaaatgatccacccscctcagcctcccaaagtgctgggattacatgcatgagccaccacacccggccggagacaggttctccctgacctgtgagactgcaaaggtggtgtttcctatgagtccagccagataatagactctgctaacattaattaaattaatattcctttttaagattctaggtgctgaatatatatctcttggtctataaattagcttcgcacttcagctatttagcaaacttgttttttattgtatctagtgtattcatactgaatgggtataatatactgtcttttgaaaaagttattttgtacacataatcttaaaacactcttccaagggcaaggtagaggcttcataatattatttccatttgtcagatcaatgaaggtttaatgatttgtccaagatctcaatttctagagaagcgaagaagaatcccccaattctagttytaagtttcttttttcccttgctaaatcctgcagtctactgatttttttttttttagacggagtctcgctctgttgcccaggctggagtgcaatggcatgatctcagctcactgcaacttccacctcctgggttcaagtgattctcctacatcagcctcccragtagatgggattacaggtgcatgccaccatgcctggctaatttttgtatttttagtagagacggggtttcaccatgctggccaggctggtctcgagctcctgaccttgtgatccrcccaccttggcctcccaaagtgctgggattacaggcgtgagccaacatgcctggcctgcagtcaactgatttatgttcatcaccttcttaagttaaattgctcttttactcattgcctttggttttgtgtgttaagattcagcatcagcattcatgatatcttttcactcttaattctgagtgtttccgtccgtttttttaatttttgtactttatgggctttttcttcatttacccccaattatgcrggaaaggctgtgtgcctcttttgaaagctctgatgttctcaatgaagagaccttttaaatgaccttgtttgtcccccaccgagttgcatatcacaacttcaaatgtctcactaaaatgttacccatttggcatcagtatacagaaaaggctgcactctgagataagaaagaacagtggtgttttcatagtaagagaatagagttcttaatgggaaaggggagagtataatttccactgatttmgctggtctttcaaactttatgatgcttttctccttgaactagcctataagaaatttgtagggaaaataccacaggaatcaaattttgggcatagatgtctattaatattgctccttacaaagctttttcccagaattgtttctccttgcctacaaaaactactccatgcctttattagtcagaaaagcagttttgtagagaaggcaagtaacagagaatcaagctaagtaagtgaaactctgtaattgtcaaacttccagaaagtaacatttgtaactaagtatggtatctttgtcctctctctttctctcttctctccacttggtttctaatgaaagccttgattacatgttatatttaatgtactgttccacaaagaagaaaaggcctaatgtgaatgcaagctgaatttacacttaaatattgcagtcagttcagaccggaaggatacagatcgatgccctctgatcctgtcagattccccgaagtgtctatggcagtgataccacaagagggcagggtttgacttccggactaggtggcttcctcccttcagtgcagaccttggggccacgacaacagccatcaatctcttgaaaccctaatgatgaatctgagctcaaattccctcttcagccttatctgtgcagaatcctgaagttatgaaaaatgcttacagaaggtaatttctagaatgatctaacacagcagatatttagtaaactccctgtttgagagctcctactaagcacccaacacagctttagactttggtcacccaataggattttatcttttgtgagggatctgtagttttccccggaagatataatgcatgaaataaaagcctccaataaaattcagtatacagttaatttatttcataaaargtgagagatataaattatcaaaggttaaaacaaaaagtaggaaccagagcagggtttttcagtagcaactctattgacattttggattagataattttttggtgtgggagactgtcccacgcattgtaaaatggttagcagtatcacttgtctgcctgctagatgctagtaataccccccacacctccctctcccacattgggaaaatcaaaaatgtctcgagacattgccaaatatccctggagtacaaaatcagtctaattgagaggcactagactggagtataaagagatgaccatgccaaaaagtaaaaataataataatagagccttgaaacattacttacagaatgtcaaaaacgtaaggacctgctctctattcctgtttcttaacctgagcaatgggaataatgatgccttccctcataggtctcttgtagaaatgaaagcaattaatgcaacacttggcacatagtaagcatccaatgaataataagtgatcagtgttactattgctaatattaagccactattataagtcctttctgttaatcagcagaaacaaaaagaagtataaaataatggtacattaaatgaacttaaacacttgtatgtcattttgtgctaaagttatgaagctgaaaagattgaattgacattttccccattgatagaaatcatctcaaaaatgctccatcttccttgtgaaagccaaaggccagcagtttccacatacccagcatctgataagtagttaatgatccwgaaataaactgttaggtgcttcagggaatttctgtgtatagagaagttccatgtaaatatttctccgagaggtggatggagaatgataattcacttttaccctctgaatttgatttataagcttcacctatctggcaggagataagaaccaaagttaactgaggagaaaaaaaataaatgatttcaagtgaccatgatcttcagctggaaccagttgaaactgcaaagcaactgggctgaagaagttcagccaaaattatttgtttataaaaactagagagtgttagatatttctatcacattggcttatttgaaatttctgctggctcaaatgaaattgtattcttctatttcctactgcggggttccttccctaaccacaattgcttttggattggagacttgtaactttgagaacaagaagagcctcagcttagctagctggaagaaccagaggagagttttaatatctcctgaagaaagaaaagcactaacacggttattatagttcaggacaagtggagtcaaagttgacagtttctgacttgaacagttttgttgctggtaataaaagcagaagtcacgtgctgaacgtgaaggtgagcagaggagaacttgcgatggcaaagttaaaaacaagaggagatgatggtcttggtgtggcacaggatgttaaaaaaattctcctgtccttaaggagttactgctatttgagtaatgtgccacttccctacatagccttctatgcagaaatgctatatttccacttcacaacccagaacgtgcattttattttacatttagaggaggaacaaacaaccagaaggcaaaaactggtgcattattttttgcaattctcttggaaagagttcgtttttaacttctgctcagacagcacacaactactgggaatatattttaatttcaaatctgatgtgtgacatctggtaactcatttattgctaatgaagttttcacaggaagcagcagtcaccagtagctcatcttatttttcagttggcaaagtgttgtttaccttttattggcctggcatcggtgtctcttatcacaggatatttaattagaaaacgcaagtagcctaacatagaaaagaaatggagtggtagataatagtagatagaatggtctaaatatttttattacagtgatgtaatatcactgtaatttatgtttaaaaattatgtaatactcaaaaggaattctcagagctggcgaaacagtctggtccaagcagcctctcagcagtgcctttcagcctcccctctctgagtctttccaccccttgctggtactttagtttcttccacttctagcaccacgtgtagtttcccaatttctcttacccaaatttgctcrcagggaaaaaaataaattaaattagccatttacaccacagtgtgaacttaataacaccaacaaaagttccaaagctctagggtctcatagcacctccagatccatgatctcattcggtgtttccaacaatgttttgcaccaaactggacacatgcttgctacttcatcatcctcatcgtgaacattattattattatcatcattttccagatgaagaaaatgaatcacaagtcaactgacagtccaaaggctccacagctcagagraggtaaatcatgtgcttaattcagaacttttggctcccatcactatgctcttcccactgtcttaactctggttgtcacctgagccattgtgtttcttctcaggtagatcttagttcttcctgagaaggtatgaaggtgggtattccaccctacctgaattataggaatttcagatatctgtgagcagctgcaaaggggattttactagatgacatcctgctgggcacactttacgccagtcctgaatgtgtaatagaaatctgcagtttaatgagtaagtttctcatattcagtttttgatgcttcataaatgttaaatgaaaacattttagctgagggtacttttgttgtttgttggattggttttgcctgttcatcaggattatcagcatttaagccagagttgcaaattaagttgcctacagggcagtgcttttcaaatattagtgtgtatcagaattacctggagggctcattaaaaacagcttgccgaaccccacccacagagtttctgattcagtaggtctgtggtggggccagagatttacatctctaacaaatttctgggtgatgctgatgctgttgtttcagggaccacactttcagaaccattgctagaggggccaactaggggacgtctgtgagtaaaagcacctacactgtgcttccagtacagcagccagccccagtgtgatgagcacttgaaatgtcgctagtgtaactgaggtgtcctggaagcatacattataccctgggttttgaagacatggtacaaaaaatgtaaaatatcttaataattttatatggattacatgttgaaatgacaatagtttggatatattggattaaatattttatcaaaattaattttacctgttcctttttacatgtcaaatgtttttaatagaaaaattacaattatatatgtgtctcactttctatttcttttggacagcactgaactaaagaaccagaaaatagaggggtgtattagtgaactacagaaaattcaagtcccaaaagctgtaaatactctgaggaccaaagaaaatayatacgttgttcagatttgccctgaggggtcagtttgtacccaaacatttgctgccacaagtagtaaatgtagaagcaatscaatatctactattttacttttctttcagggttaatcaagtgccttgttataattcttcaaactaaaaacattattataataatgaaaaatatttctgctgaacttccgaataaaaaaatttagtaatattttgaaagtctgagctttatttaattcattttacttacccttgtattatagaacaattatatttttaaaaatgcttttatgtcttccaaagaactttttatttttagcagtccatgaaatagaggtgagaacaggtgttggtattctcattctaaatatcttgtaatatttaaaggaaaccaaagtgaaagattaaattgccatgtaagattgtgttgccggttactggcagagcagactctttgccaggacagcagtccagtgctttctcttccaggctgttctgctcttcctcaatttttacagcatttttatgttaatcaatmaataaataaaaagtaaagaactataatgcatacaaaactgtgatggaagaaaaggaaactatgtgataaaatcaaataaatatgamccttatagctttagttttcttagaacagaggccctttaacttcagaatgttgaaaccttctcttgaagttctcttataatactctgccctcacctctgtgtttttatctgggcaattagaccacattaactaattgctaaactttaaaaagttgtattttcttacaaagaatctgagaatagggttgattttctatgttattttaacagtatcacattgcgcccccctcttcacaggaccatgtaatcttgactctctaacttcatggcaagcttttaattttgattttcaaccatgttccaaactgtactctttgacttggtagtgtcaataaataacgtaagggatgtctgacaggcttacagcctttggccataaatggaatgaaacaaagtagtccagatagggctcaaactcataacattgacctcgttagtctagaaccacaaccagctatccaaatgtgcctgggaaatatttctttgagtaatagttaattttttaaaagaaagaaaaaaacctgtgactatgataatcttatgttgagtttctttattcatcttgagtaaacagtaaatttttttcactttgttgtttcaatacaaagagttcttgtgtttaatatagaatattattaaattagtgtgggattaaaaatatttagatagctgatttaacaatatgtgatagcattaatcaactgccttgttataattcttgaaattgttattactctacttgtcaagcaattttgcccttctcgtcaaatgatgcatacctgttcaatggaaggattataaaagttcatgcttcggaaaatttttttttttttttttttttttttgagacggagtctcgctctgtcgcccaggctggagtgcagtggcgggatcttggctcactgcaagctccgcctcccgggttcacgccattctcctgcctcagcctcccaagtagctgggactacaggcgcccgccactacgcccggctaattttttgtatttttagtagagacggggtttcaccgttttagccgggatggtctcgatctcctgacctcgtgatccgcccgcctcggcctcccaaagtgctgggattacaggcgtgagccaccgcgcccggcccggaaaatttttttaagagtataaccaactccccgaggatacaggggtccagggaagctaaatgactgcttcaaggtcacccagccagtgagtgggaaagctaaaattagaacctcagtccgctcccacattttccaccaatttgcaggctatcgttaaagaatatttcttctgcaatcagaacattgagcaatttggaaaaacgtgtacagtatatcgaatattctagcttcatttaaaatttatggttatgtggcttgtataatgttaaaagctttaatctaaaatgaattgccatgtggccaataaccccaacataatactcataatgcatataaattctctaatattatcataatttcttaagggtacaaattaattagtacctcttttcctgcccaataactttcctcacaccccttaaaatggaatttgaaatgagataaacagttgctgctgctgaattaaagtttcaaagaaataaaagtgaggtggcttcatatacaaaatctgtagtttttttcacaaattggatgaagcaattgttattgactaagcccatattggtgctgcccttttctctgttgaaaagaaaagcttgtgagtagtctccaagagccatattattaaaaatgatgtttcctccccatgatggctgagatactaatccattgaaatgtggcgataattcttgtgagaaaattctatgagtctataagtttgaagaatttagaagtgtaagaggacaggggttcatttacttacaggccttcttccaagttaggttttattttccttttctcctagtctctggagtctcctctctccagacaccctggaaagccattcatggcctttcatatttaacataagagtatttaatactaacactaacatgtcgaaggaagatgtttaaagcatgtgaattagacttgatcatatatgtttcattggcacctgtttctctactttttggaataaaataaaaacgacaaaaacagctaagaattttggatagtgatgtgggtgggagggattggggcattcatcacaactgagttgtttaatttatagtaagtgggaacttttagagttgagagaagtttaattgtagtttagagtttcattattagacagtagtcttaaacaattcccaagaagctaaaatgtgggattaacattttactttcattgkaattcatatcctaaatataaatgttaatataaattataaagtttctgaatttcctttcataaaactgggttctttgggttcttagttattttggatgaaacaaggggagggctagttggaaatgatggaacatttaaccactgtcaccacagttagtcacaattggtacatgcagaattaataaagcagcttgccttgtttttatttcttgtgaggtcagatgacagtggatgatattgacttgggaagatggccagaagccactatttaccatgtacatatatcagagagccatttattaagtttgaggagattggatcttaagtacttaattagaatgacattaataattttaataaaatgttttgcattgagagaactattcactcagaaatagcaggggtgaacaaaatcatctccaaagaaatcatttaacatgaagttagtctaggattaccaaccaagagcatggcattctcccatgtatctgacttaaaagcaatacttgtctcttgccccatggtgccaggtggtctgccatgcttccctcttcgtggctgccaggattcccrgtatagaggcaaatacaacctgtaaaggctcaaaygcttcatcaaaagccatgactataatccaaagctattaggtttaagcaacttatttggaaattatcaccttcaaataacaygtagggcaacctcagtagagatgaaatggacgaagcaggcatggaaactgcccttcctgccttaaatacagaatgccagatcacagctctgaataaaagttaagaccacattgggccagatcaggactaacactagatacacagctgagatamagttccagtgactttggcagtgtgaaagtcaggaccastaggcacatatactgaaggcaatttaagctgtgtttcctgattaaagccagggactgaaaaatcactacctattcatgatgaaagactagaaaacttctgaagaccagacagagtttsagagtggtatagttactaatctactaaatactgcaaatatatagtatctgcaaatatatatataaggttgaaaactargctcagaaatgagcattaaaarcttttccagatcaagggagtgctgtacccccaagctgaggtttcataggctaccatcatccaggcactcagtcttcccaagcaagttaattcccaccaaaaatgaacacagtcaaagattacaaaacctaagcagaagtccattatcaagaaacagtgtccacaagtgcaataaatataatttatacctgaggaactataaatagtaragcaattgggtaggggctcttaacagacagatattcaaaatgttaaggaaaataaaagaagaagtagacttcgtaaaataggaacagagggctaagaaataagaacaagtagatctgaaaaagaaacgagtaaaaagcctagaaatattagtgccaatttctatgggtcaatgatttcacaagtgaatagctaacagttatttcctgtggccttacttggcagagagaggtgggggaagcaacataggagcagaaacagttcctttctaagtctgacttataaaataggaacaataaagacaacagtttattgaacaggatggtttattgagctgtccagcactataagcaaatggcttacaaacattttcctactctttttgatgcttgagagagatactttgatagaagattattccaaaatataattacttggtcatttagttctctctttattatcataggaaactatggggaatttttttttctttagattgcaaactagttttaaaaagagcttgtaatgaacaatttaattagattggttttggcttgcctaaaarcttaagaaggtattaatattctaatcaaaagtcttgggaaagcattcttagaataaaaaaaggaaagaaaatcttcattcttatgctttaagaaccaggaaagctgtcaaaggatataaggtaactcttacaaaagcaattgtaaaataaacgtggtttggccacaatgagccaacacctatgtttgccacagacttagrttcccacctcactcatggcaaatttattcagctgcttaagattattttttactcatacttcgaaagaacaacagcctggaatttttagacttttaatggcaatggaaggaacttacctatgataaacatttttctttactctcacgctttcttaacccatggctgttctgagtcaatgtttgccttgcattcaaaaaataatagtaaagattcaagtaaaacatattcattaagcactatttgaaagatataccaagtgctttaacattatctcactttattcctacaaagatcatgtgcaataaatatcactgttcatgtttcctacagatgaaaaaaaactgagggtcatgttcagagaaattggatgacttacccagagccacayagatttgtacgtggcaaaggaggattccatttcaagtctttcaaccccaaattcatcttcctttctctaaggggamatggtgctatggaattcatgtaagccacagagyttggataaaaggaatagtaagaccaaaaataggaaaagtaggaagaggtggatcctcctatgtttttaatcagggttctatctacctrtaactcttctgggaaaagaagcaggatgtgactgaaacatagctgctttctagatctcacaaatctggcttttctagtcaatcacatctctctctccttcggcttctcaccaaaccagcatccgttcagcttcaaagaaaaaasagccctactgtttcccactcatttatcatcaatctaaagtaactgccaatcacaaaagtcccatctttatttctttccttagaaacaaatttctctagggaagcttatcagtagcagaagtgcagactgggaaatggcctatgtcaccctcccatctagaaatgcccagtgcacatccagatcccacacccccaagagckttgtgcaatatctgttaatttatgagagctgtttcccatagatgatgctgcaggcattagtaaggagggcaaagttcaagtgatgacaccatctctactccacctggctggtttccaggtgccatctcctgatccctctccccacccccactgccctctcaccatccttcccccaaaccccacactccccaccaatctgggtcagtgataaacacagagtattccacatgcctctgatatgatgtaacattcgacacactaaagataatactgcctttaaggctcctgtccccctggctagacttaaactgtgtagaggaggagaactgtgactttattccccttgcatcctggacacccacacatggtaggtgttcagtgaatatgtgatgagttggtgaatacccactgaatgtgctatttgcattgctacttccttgtgcttccttccactgtttctatcgcctaaaattcttctccctttttcctccaccctcgagtaggaaaaaatttgtttcyttattgggcagggagttctggtcattatacatttatgtaaaatgttcttctaattggcatattccatgctatgtccagattctttcaagcgaattctcattaaggtaataatacctcaccgaagtttccagggatgatcccctagctgttcaaagctaccttttatatattaaataccagtcaatatgaatcaatggtaactgaaaaaaaggctgatagcttgtgaaggagttggagtacaaaactatgcctataaattgatcctcacaaaggcagactttttcccacagaaattgtattatgaatgctagttatagtttgagactagttaataaaattctactcactccaaacataggattaatggaacccacatgagttgtgtgctgtcaaagtcgagtcaagaggagagagaaggagaagaaaatttcctccctgttctcatagctcagggcacccaagggattctagagcgtaaagtgtactcccttctattttttactgcccttattcccaagctgaaccaaatatttacctctgccctcattttcagttatggagttcactcaggcccttttcaaccttcgaggttccttaacctttacattattaattctttttctaagcaaaatccagctgatctctactagatggttaaaaggatagtaaataggtaaattaatccacattaagccacaaatgactgctagccctaaccctttaatgactaattaatttttaataaagaatatgtgtctatataaatgaatttatacttctaagttggcataagttcagaaaaaatagtaagatgaactggaaaatctacaaggtatagggaaatcctctgggtgaggaagaactagtcatacctccctaaaagcctagccctagtttctgttacattatttcttcttttcatcttctgttttctaaaccacaagtttctaaaagcaccaaggaattttctacctgtttatttcgttttgtttttgtttctgtttttttgtccaaggtgaggcccaagttgacactgagtattctctgtgaaactctgcaaggagcaacatgtgatttcacagaaattagtctcgatacactatattcatggctgtaagttctatgctgctcacccattcatttgtccattcagtcactcattcatgagacatttatcatctgcctcctggaacataccagggcctacaccagaaaacaaggaaacaagtaaacactagtaaactttaaacaggctctccccacaagcaactgacagaccagtggagaagacagatatgtcaacagatgattacaataaagtttcaaggccgggtgcggtggctcacgcctgtaattccaacattttgggaggccaaggcgggtggatcacccgaagtcaggagttcaagagcagcctggccaacatggcaaaaccccgtctctactaaaaataaaaaaattagctgggcatgatggtacacactggtagtcccagctactagggaagctgaggcatgagaatcacttgaacctgggaggtagagatcgcagtgagccaagatcgcaccactgcactccagcctgggcaatacagtgacactctgtctcagaaaaaaaaaaaaaaagtgtcaaacctacatccaaaatgtcaaagtgctcaaaaaagttgggaaggcttcaccaaagatgtgacatttagggtagataacacctgtttgtggatactaatgtcctggtgagtcaaagaagaaaaggatgtacattatataagctggatgcaaaaaggaacaataatgaggacatgcaaccaaaaacttacatagggagaacaactttacttactcagggaaggcaaagagaccacttaagaactccttcacatgtgttatgtcttaaaagctgactactggagttgtatcccttgcacagcatccctttgcaccaaagtgaacactactctaagaacatgtgttcagctctcctgaatgccaagcacaaccatgcttggcatggcagtggtgtcttatttctgctcctctttttccccagggcatgccattgcaagagaatgctcakccatgttcatctggggacctgctcctggyagagcaataggatctgtgtgcccagcaccactgcccacctakctgtcctggcctgtgcccaatgctgaccttcacctcakagtgtggctgtaccacattcggtgatgtcactctcactgaaccttyagcctccttcctgggacttcctgatggactgttatccagggcagaatgtgttgattttctaaatcacataaatgaatagcttgactgttgattatgtagaaaatcagagcaaatatttgcatggctttgtgcagcccattcttgagcatctgattctccccagaattctaaaaaacctgctgctttctcaagccctcagtaaagacatgctttcttgataatcctagccaaacctattcatttgacatctttgttacacaaatggttaaccacagagttaacttcagaaatggctggcaggtatgaaggttagaagattcatgcacttttgctagactgaattggaagttaaagagtaagtagttactgactgcagaggcctggaaaaccatggaaaaaatcctattcctcaaagtcgagccctacctcctacgcctcttaaatcaattgccacagtgaccaatttgtcagtcacctaaaggcagctatcctgaccacttaagggagaatacttataatctttatacctaagtaaagattgtgagaggaaagaaatggtttaaagaatatgaatgtgtcacacttctgaggttaatgataaatgaattggtcctgcttacctcaggaaaaactttcaagtctttctgaaaaactaatttaattcagtagtattttctaagatttaggttatgttwttaatcaatttggaaaccaagatttacttatagaaaaaaaggaaaaggacctagataggtttattcacatagaatcccaatttcacttctctggatgataccattttctacaaaagcaattatgttctaaaatttaagtgtgctttcttaggctttatcagttcacagtgtttccttaagaaatatgatccagtattttttcctaagactaaagttgagttactacgtttatgactgagaaatgaatgtttgttagtttgtttgtttacaataagaattttttctttaccattttatttttattttccccaggtgtatttgatatagtgtttgcaacaaattcgacccaggtgatcaaaatgattctcaactcttctactgaagatggtattaaaagaatccaagatgattgtcccaaagctggaaggcataattacatatttgtcatgattcctactttatacagtatcatctttgtggtgggaatatttggaaacagcttggtggtgatagtcatttacttttatatgaagctgaagactgtggccagtgtttttcttttgaatttagcactggctgacttatgctttttactgactttgccactatgggctgtctacacagctatggaataccgctggccctttggcaattacctatgtaagattgcttcagccagcgtcagtttcaacctgtacgctagtgtgtttctactcacgtgtctcagcattgatcgatacctggctattgttcacccaatgaagtcccgccttcgacgcacaatgcttgtagccaaagtcacctgcatcatcatttggctgctggcaggcttggccagtttgccagctataatccatcgaaatgtatttttcattgagaacaccaatattacagtttgtgctttccattatgagtcccaaaattcaaccctyccgatagggctgggcctgaccaaaaatatactgggtttcctgtttccttttctgatcattcttacaagttatactcttatttggaaggccctaaagaaggcttatgaaattcagaagaacaaaccaagaaatgatgatatttttaagataattatggcaattgtgcttttctttttcttttcctggattccccaccaaatattcacttttctggatgtattgattcaactaggcatcatacgtgactgtagaattgcagatattgtggacacggccatgccyatcaccatttgkatagcttattttaacaattgcctgaatcctctkttttatggctttctgggraaaaaatttaaaagatattttctccagcttctraaatatattcccccaaargccaaatcccactcaaacctttcaacaaaaatgagcmcgctttcctaccgcccctcagataatgtaagctcatccaccaagaagcctgcaccrtgttttgaggttgagtgacrtgttcgaaacctgtccataaagtaattttgtgaaagaaggagcaagagaacattcctctgcagcactkcactaccaaatgagcmttagctrcttttcagaattgaaggagaaaatgcattatgtggactgaaycgacttttctaaagctctgaacaaaagcttttctttccttttgcaacaagacaaagcaaagccacattttgcattagacagatgacggctgctcgaagaacaatgtcagaaactcgatgaatgtgttgatttgagaaattttactgacagaaatgcaatctccctagcctgcttttgtcctrttattttttatttccacataaaggtatttagaatatattaaatcgttagaggagcaacaggagatgagagttccagattgttctgtccagtttccaaagggcagtaaagttttcgtgcckgttttcagctattagcaactgtgctacacttgcacctggtactgcacattttgtacaaagatatgctaagcagtagtcgtcaagttgcagatctttttgtgaaattcaacctgtgtcttataggtttmcactgccaaaacaatgcccgtaagatggcttatttgtataatggtgttactaaagtcacatataaaagttaaactacttgtaaaggtgctgcactggtcccaagtagtagtgtcytcctagtatattagtttgatttaatatctgagaagtgtatatagtttgtggtaaaaagattatatatcataaagtatgccttcctgtttaaaaaaagtatatattctacacatatatrtatatgtatatctatatctctaaactgctgttaattgattaaaatctggcaaagttatatttactttaaaataaaataattttattgcaatgtatttatcttcattacttaaaatagatgctaatttattttaaaataagactaccttgaatgagtatgaatatatttttatttaaattttgatacaactgatagtttaatactattggttatagattttttatcctgacattgaaaagttaaagaaaaaacattttgttctactgcatgtcatggaataaacacatcgttttgaatttttcagtttttcacataacaaagaaaaaaattaactcttgctataatgctagaataatacattattttacaagtaatttaataacagaatttttctaattgtatacattatcattgtaggaaagttagaagatatagaataacataaaaataaaagtcatgtttagcttccccggtcaaaaatcattattttaacatttgggaactttattttctacttttttcattcattatacacacatatatgtgtcaatcctgatactgaagtcatgatgtgtatagtactttgtatacagatctttcacttaatgtcatagcatagtagtttcctacccaattaaatatttttctaaaacattttaatatttgtataatactacaaaatatggacatacgctgatatagttaactagtcaccaaattggaaaattgagctttttctgatttttttagtatcataaattacactgagatgagcattcaagtatgtgaatctgagaaatttcccatactcctagaagtggtgcaactgaaatacacgtatgaacattttttaatagtctaactacctgttatcaaatatttcccagaaaacataacaatttacaataccaccaactaggtatgaatatatatcaccataacctcagaatggggtatttactaaattttttttttttcagacagggtctcactctgtcccccaggctggagtgcagtggtgtgatctcggctcactgcaacctcccactgctagattcaggcaatcctcccacctcagcctcctgaatagctgggactacaggcctgctccaccactcttggctaatattttttacttttttacagagatggaggtctcactatactccctaagctggtctcaaaactcctggcctcaagtgttcttcccaccttggcctcctaaaatgctggaattacaggcatgagccaccacacccagcctaaatttaagcagaaaagaaagatttaccgtaaggatccagctgccacatgcaagggccaggatgcaactgtgcctgaaaattgtacttttaacatttctgctcccatcggacagttgcttcattcttctatttaaaggatttcagtgcttctgaagttcatacagggcagaccgaagtgctcattctggtcaaataaactgtggccaaagggttggagttatgcgtaaaataattgatggttgctgtgggcaagggggtgtcatctcagagagaggccttggccactgggcagaatttccacaaagcagactatattaccttcacattcccaaatataaagtttttgtgaacaaatatggttccatatgccttatattatttatattatttttatattatttttaatttcattaatgtaatgccagccactcaccccaaaggtcttctactattttcacaaaggatcacctcaaaaaaataaattttaccttatcccaagtgatagcataaatatcctatataaaatccctccaggcctccaggtcagctttataactgttttttttttttttcagtagttgaggattttttgtgtgtgtttgtttttgttgttgttttgttctgttctgttctgttctgttttgttttgttttgttttttgagacagagtctcgttctgttgcccagtctggagtgcagtagtgtgatctcagtccactgcaacctccgcctcccaggttcaagcgattttcctgcctcagcctcccaagtaactgggattacaggcacgcatcaccacacctggctaatttttgtatttttagtagagatgggttttcactaggttggccaggctggtcttaaactcctgacttcaggtgatctgcccgcctcagcctcccaaaatgctgggattacaggtgtgagccaccatgccctactcaatagtcattttaatccaagtgattgtaagcattttaaacttgctgaactatttcataggttatagttggcaagatttctgatagataattgtatttagatatcccctatatcatgtatttattaatggtgttaataacatgttccattcatcaaattatattgggattttaccccatctcacttgtgaaatagatgttactaaccttgatgattattctttctttttcagtgagatcaacataatcttggagttgagaccctacttaccaaaatgttaggataggatgccattatgtattcttcatgaaaatatttacaggttaggtagactccttatttttggtacatttaaaaaatacatacagaaaagaatatttaccatagagatctaggtgcccaacagaatgcaaaagctacatttatattgaaatatatatttcaatatacacccatttacacccatttctgaggtgtaaatttcaatatacacaatattaaaatttacctcattctaagcttttggggaaaaaaaggctagtcatttctaatgctggctctttctcattgtggaaattcatctttttggacatcagttacatcatttttcaagtacggtgagttggcttggtgaaagaaggcttttatattttatattttattttattttattttattttattttattttattttattttatttttgagatggagtttcactcttgttgcccaggctggagtgcaatggcatgatctaggctcactgcaacctccacctcctgggttcaagcaattctcctgcttcagcctcccatgtagctgggattacaggtgcctgccaccacacccagctaactttttgtatttttagtagagagggtttcatcatattggccaggctggtctcgaactcctgacctcaggtgatccatctgcctcggcctcccaaagtgccgggattataggcgtgagccaccgcgcccagcgtgaaggcttctatttagttaataattcactcattcatggatttaataagtgttgtattgtttccctactctgtgctgggtaacaagtgctgtgtaacatatagcagcttagcatgtaggataaacttgttgctcagctgctgtgagcagtgtgaaggagagccaagtgagaagcagcttgattgcaaatcacagaaaggctctcagagttttgataccacaggtttttcagtttcataactctgtatactggtgcatttttttccaacaatatgtgccaatctaggaagcccaagaagagaaaatagattgaagcaggtcacaaaagtgtgaatgaagaaaacaagtttcaaggaatttcggatacttggtatgaagagtgagatatctgagggtaaagaaagtaaatcaagagtaagagagatacagagagactgagtggacaggaggctggaagcagtcacacactgcccccaaggccagggttcagacctcacaggagagatacatacagtcagggccccaggaccatgttggatccactggacccagaccaaccagaggaagagggaacccaaatattagagtgggaagcaagtcataaacagtagacagaatggtatggggcaagcccttaaccatatggattttatatagttcaggctgtatgactgtatattggagctaatcagagagtcaaattttccaaattcaaaatcttgactgagtcagttaacatatgacatctgtaactatatccagtcttgtctacttgtgtagtgaacactcatggaaccatctgaacagtgtccattctcccctcatcgcaggaatagttctgccccactcagggacagcaccacctcagaatgaaccattttcctacctaactccatccccaggccacagttaattggtccaggcttgaagtggaccaatcacagtttttcatgaggatttttcaaacaggcgctgatgaagagctggccccagtgttggcatttctgagacgtaagctcaacaccagccacatctctcaccacgtggaagaagctagtctgcaacagagtgaagtaaacagaaaaggcaagagagccctgaaggtgcttgagtccttgattctacctgcgtcttatgtccagctaaatccctgcccactcctctctaatcaagggaccagaatacagtgatctatagctaagatctgcaagtgtttcttcccgcttatgatcaataagaatttcccttttgtagtgtccagcacatcatccattggccacccagcagaagtgataccgtctacatcccaaaacttattggtccctatcttaataaggggtcacaagtgctaccccacttccatatgtctccttgtgagatggtaacagccaggacattcaatagtgtgtgttaagggggaagaggtgtggagatatagacgtaccaatagtgagagggggctgaggctactacactatctactattgcaaattattgtaaactgaagtctctccctgagatggcacaggggtaaaatacacttctgttgcatgagcaattataaaaaatatgatttagaccatgaaatcataagcagagagaggaaattagtgctcctcaccacttgagggcccaaatgcatggcttgcatgttgcctgggctctctttacctgacagtgacctgggagttctctgggtatcatagagccagtgagcacagcatccaaacctgccaaaatccaatggaaaaggccttcatttaccaagctaacacaacttacatgagaaattatataactgaagttgaaaagatgcatttcaacaatcaggaagagccagaattagaaatcagactgttttttttttccagaagctgagaataagagaagttagctttagtaatatttaattctaaatcattcctatactaggaagctttgtataataatcctttaagagtttaaagaccatgagatttacccttcaagcagtgtaataggaaaatatttatctatatgcacaagagatgtaaatttgatgaaaaaatgatgttaattttaaaactattaaaagccagtttgctattatgattattttgcttcaagtatccaaatgatgatgagccaaatatgcccctgagcccagttcttgattcattccacgtcctataaagattctttagaaaaattgaacaagatgagaaatagggatcctggctcaacctcccagtgagttgggatttatctcatggaactttttcccaagcttgatgaagttctgctgtgccatatggacatgtacagttgctaaatgataattttccaaaaataagcttcaattctccaaaatggcagatagaaagcagctggtgttactcaacagagataagccctcctagagctcaccacagagaggagagcatcatgtctgcagatgccacagcagatctgctgagaatcagccagcgccatgtgacacaagaacccacagatgcagattcgtcctgactggtggctttcttctggccattgctgttacagagaagtttctaagcagtactcaatgcacacaaaactaagtagaggctatataggcaattcttcaaataagcaatcattattctcagtaattcttgtagtaagtggatggtaggaggaaaaaaaaaatacctttccactgatgatatcacctttatagctatttcttgagtctccctatcttttccaccttcttcaagaaatagtcccctattacaatttgcatgcccactcttgctgcagaatttgtataggggctcaactctcattattgccaactatatgatttggaccatggatgtgagaagacttcagcaaatcaatccatcacattcctctggctgcaatgagttgggcacataacctaaatgaacacaattatggtgaatttcctggt

SEQ ID NO: 8738 - DNA, 21848 bp, Homo sapiens
  misc_feature (1)...(21848): n = A,T,C or G, or insertion/deletion polymorphism (see Tables 1-2)
ctgccttggcctcccaaagtgcagggattacaggtgtgagccaccactcctggccccaaaattgtttgcataccttttgttacaatggatttactttccaaaaatgtccttggtatgtatgtatgtgtgtttgtgtgtttgtgtgagagtgtgtatgtctgtatgaatgtatgtatgtattatatataatcttcaaagaaggatgcaaagatatacatacacaggtgttcattttgctaaggtaggaacaccacatcaatacaagagaaaaaatagctttgtacataacaggaagaaactgtccatcatagtaggtaagggtatagagtcagaatgccatgattcaactccttctctgcaagttacctgcagcatcatcttgggtaactttcttctttttgtacttcaattctcccatctgtaaaatgggaataatagtactactctacctcatagagttattgtaagaattaagtgtaacgtactagtaacagtgaccggcacagaattacttgatccataaacattagttatatgatactaattatccccgttgttctaaaaggggagaaagctgcataaatgtaacctagaagtcagaggtcaacacaggcagcttctattttcatcctaaactaaacctaaagtgggcctcgattctccccacaaggaaacctagtacacaaaatactagttagcacatatattagtctgttctcacactactgataaatacataccaagagtggataatttatacagggaagaagtttaattgactcacagttctgcagagctgggaaggcctcaggaaacttacaatcaaggcagaaggggaagcaaatatgcccttcttcacatgacagcaggaaggagaagtgcggaatgaaacagggaaatccctttataaaaccattcaatcttgtgagaactcactcactatcacaagaacagtatgagggtaactgcacccatgattcaattacctcccaacaggtccctcccacaacatatgaggattatgggaactagaattcaaggtgagatttgggtggggacacagccaaaccatatcagcaaagtagattgaaacattgagcaaataacaaaggattgaagggagatcctggacccaatagcatactttgtccatcctcattcaacttgcgtctttttcttagtttgtcgttacctctttattatgtggagaggatagagatttttctgcccacgtctcccccttccctaacattnnnnnnnnnnnnnnnnnnnnnnnnnnnnnnnnnnnnnnnnnnnnnnnnnnnnnnnnnnnnnnnnnnnnnnnnnnnnnnnnnnnnnnnnnnnnnnnnnnnnnnnnnnnnnnnnnnnnnnnnnnnnnnnnnnnnnnnnnnnnnnnnnnnnnnnnnnnnnnnnnnnnnnnnnnnnnnnnnnnnnnnnnnnnnnnnnnnnnnnnnnnnnnnnnnnnnnnnnnnnnnnnnnnnnnnnnnnnnnnnnnnnnnnnnnnnnnnnnnnnnnnnnnnnnnnnnnnnnnnnnnnnnnnnnnnnnnnnnnnnnnnnnnnnnnnnnnnnnnnnnnnnnnnnnnnnnnnnnnnnnnnnnnnnnnnnnnnnnnnnnnnnnnnnnnnnnnnnnnnnnnnnnnnnnnnnnnnnnnnnnnnnnnnnnnnnnnnnnnnnnnnnnnnnnnnnnnnnnnnnnnnnnnnnnnnnnnnnnnnnnnnnnnnnnnnnnnnnnnnnnnnnnnnnnnnnnnnnnnnnnnnnnnnnnnnnnnnnnnnnnnnnnnnnnnnnnnnnnnnnnnnnnnnnnnnnnncctgggctcaagtgatccttggcctcccaaagtgctggaattacagctgtgagccactgcgcccagcccatatgcttaatatatgaaaacttttagtgattgattacattatttgaatataaagcttctctttctaacctgcaatttatgcttaaaaataagacagccagtctgattcctaaaaatttgatcttaattttctcaacaaatgccaaaaatcatctcagtcaaagttaatgaaaggtaaaatgagtactatagaaaggacatcaggtgtctcacagactgggctgtgaagaatcaaattattatgtttggacgttttggttacttctgttgatgcagttggtaggctttccctctaaaatgctgccatggatataacatcagtccaattgacccagttcccttccccttccccttccccttccccttcttcttctcctcctcctcctccttcttcttccagcaaatatcaaatttggagagacaatctggtagatttagcttgcgtaaagggtctgtctacccctagcttggtcacctgtggttagagggtcagggtgttgtagtactgacaggaccactggagcttcatacctccattttaggggtcattccaggagaagggagcagcactcccagaggtgttcattacacccttaatggttgtgggtctcaatgtgacaaaagcagaagagcatctctatcttttcttagctcttgtgatctccatcctgttgtaggagaaaatgtcctattatcccttattaccatgctctatgtcagctcccataagaaatggaaactgacatctaagccagtagagggagacattccacaagagatggcgtcatctcctatttcttccccaccatatgctttcccactaaagatgaccaacaaattgcaggtgtcaccactgcactgctctcaggcttgccccaagagctctggtccagcctggcctccaactcgtcagtgttaatcaaggtaacacaaggaaaatatatacagagactaacaacttattacagtacctcaaaacctatgcatatttagacaacgagaatcagtattccttttagtcattcgttcatttatatattcatgaatttgctcaaccgatatttattaaatactggctatgtgccaggtgcatgacataaactgtacagtcattcaaaccaagtttcaagtctaaaagcccttttcctttgaagttcgtttccccctgaagaaagttagatccttaagttaccagtcccaaagcctcacctcccccaatcttaggctcaacactaattattgtaagtagttttcattttctgtctttccttttagacttaaggcttcgccaaggtctccccggcccccagcaaactacctgctatgaagtagatgctctgtaaatagttgttaagcacaaattgccttgtgctatggagactgggcctgacatgagttgtaaaagtatcaacaagtgtattgacaatgggtatcggcaagtctttgcccttcaagccagagagctgctgggcaggacagattatctctgttttctctgtcactgatttactacccttgacttatgcaatgacatcagctaatatgaagaacactgcactratgacctcaaaataactgaacaaatagtactccctttcccctccaccaatggcatcaacattctaaaaaaatttaagcatcttaataagcggtgtctctgcaaatatatttcttccctgaaaacatgataatattctttgtaatattaggcaatttagagtcccagtgtaactgtacataactctacagaaaaaagacatatctaacaagaactagaattacaaaaactcattatcactgcattgcacatgcttcacacagacatgaatactatacccacatatgagggtaaaaagataagtgaaagtaaaagctatgagtgagtgtgtcagcctgatacattatggtcccaagatgacaggctggccaaaatactccaaaagaacaaacacacaaaaagaaggtagaggtaaatttttataatgtttgtatcctgttgggaaatataatgtaatgggcacagagtgtggactgtagagtcagacagtcaggggtcaagtcctcataccagcacctactacctatacactctggggtagtttacttaacctctctgaacctgtttcaccatctgtagaacatagtggtttcaagaattaaatacgataaatgactaccataatttggcatctgaggcatgtaccaatgacagccagttcactcattcatcccgtaattatgtattgaacgcctactatgtctgtcttgctcaccaatgcattcccagcccctatcacactacccgtcactgaggagactctcaagaactatttgtaagatgaatgttaagtctgtgctgttatggtgcatgcatgctggattgaatccatcctccttctgaccatgggaagaatgccaatcagagtagaacaaagtaggaaagtaaaggaaccttcactttagtgttgaacaagagtctattatatactagaaaaaactttacaaatttacagacttctgaaagttaaatgatgattctattgttagttgatcaaacatcagtcattgaaaatgtagtaatacgttacctcaaaagaaaaaaaaaaggttagagttttcttaacagataattctttttaaatctgtaagaatctgtacgtcactaaaataaaatcctgtctagattattaaaataaactttgttatcagttatattttcatggaaaatattcctgtatatattttaattaatagccacatagatatttgctttttctgtcagatcatgtatccctttaaaaaccattaaagctaaagaaaaaaatcttaaaatataatatttactcattgctaataaagggaacacaaatttggaaagactcaagtgaatattttttcttaatttaaactgagtactttgtctctattaagctaagttaaaagaatttgggaggacaacctatgctaccaagagaataatttgtttctaggaatctgagttaaaagaatttgggaatgcaatctctgctacctggagaagaaagaaatgtcgtgggtcccacaccattctcaagactctgtttcaaagcattgtttcaatacgctgatccaaaccctgataacctgccatctttttaataaaataatttataaatttaatgagaatgtttcactttccatacaaaaaacagaaaaatgctttgaatcaatgcacttactgggatttggattactgactggtgttcctattgattcttgtaggagttattaatcctgattgcaacacacaagtgaacagacaagagagataaattttgtggcttgtgggaaatgaaggaaaatgggcctcatttagtctgtgagcatactaattgaaatagatgtatgaagacttcaccagtgttaaaataacattgtttttataaatcatatgatataaactatataacaataaaatagaatgttaaacatgtatttaatcatcatcataattttgattcagaaatctataatttattagttatcttaataatgtttagaatttgttgaacattttaccttatgtgaattaaggacaaaatattaaagctattcagcacaaaaaaagggtctttctgatgtgtatttttcatagaatagggtatgaatttgttattttgttattttgattaatgtctaaaacaaaagataaacacattatgatataacattactattgattttaatggccccttttgaaatagaattatgtcattgtcagaaaacataagcatttatggtatatcattaatgagtcacgattttagtggttgccttgtgagtaggtcaaatttactaagcttagatttgttttctcacatattctttcggagcttgtgtagtttccacattaatttaccagaaacaagatacacatctctctttgaggagtgccctaacttcccatcattttgtccaattaaatgaattgaagaaatttaatgtttctaaactagaccaacaaagaataatagttgtatgacaagtaaataagytttgctgggaagatgttgcttaaatgataaaatggttcagccaacaagtgaaccaaaaattaaatattaactaaggaaaggtaaccatttctgaagtcattcctagcagaggactcagatatatataggattgaagatctctcagttaagtctacatgraaaggatggtttcttggagcttccacaaacttaaaaccatgaaacatctattattgctactattgtgtgtttttctagttaagtcccaaggtgtcaacgacaatgaggaggtgaattttttaaagcattattatattattagtagtattattaatataagatgtaacataatcatattatgtgcttattttaatgaaattagcattgcttatagttatgaaatggaattgttaacctctgacttattgtatttaaagaatgtttcatagtatttcttatataaaaacaaagtaatttcttgttttctagtttatcacctttgttttcttaagatgargatggcttagctaatgtaagatgtgtttttctcacttgctattctgagtactgtgattttcatttacttctagcaatacaggattacaattaagaggacaagatctgaaaatctcacaarctataaaataataaaagagcagaattttaagataaaagaaactggtggtaggtagattgttctttggtgaaggaaggtaatatatattgttactgagattactatttataaaaattataactaagcctaaaagcaaaatacatcaagtgtaatgatagaaaatgaaatattgcttttttcagatgaaaagttcaaattagagttagtgtgtattgttattattaatagttatgaaacacggttcagtctaatttatttayttrtagaacagtttgtcctcaactattatttttgctgacttattgctgttaatttgcagttactaaaaatacagaaatgcatttaggacaatggatatttaagaaatttaaattttatcatcaaacgtatcatggccaaatttcttacatatagcatagtatcattaaactagaaataagaatacacaataatatttaaatgaagtgattcatttcggatcattattgagtttcaagggaacttgartgttgtacttatcagactctacatgtaagaacatatagttaatctggttgtgtgtgtaaaaacatatggttaatctggttaagtctggttaatcatattaggtaagaaaaatgtaaagaatgtgtaagacgaaatttttgtaaagtactctgcaaagcactttcacatttctgcttatcaactaaacctcacagagatagtttaatagtttaggctttaaaatggattttgattattcaacaagtggccttcataatttctttaagtgtttttctttaagtatatactttctttaaatattttttaaaatttccttttctctagtaaagccagaccatccatgctacctctctagtggcactctgaaataaaaagaaaatagttttctctgttataattgtatttgtaataagcagatgaatcacatttcttaaaatttgttttagagagggtaagctctgactaggaccatgacttcaatgtgaaatatgtatatatcctccgaatctttacatattaagaatgtatatagtcaactggttaaacaggaaaatctggaaccagcctggctgggttttaatcttagcaccatcctactaaatgttaaataatattataatctaatgaataaatgacaatgcaattccaaatagagttcatctgatgacttctagactcacaaaattgcaagagagctcagttgttgctcagttgktccaaatcatgtcgtttgttaatttgtaattaagctccaaaggatgtatagctactgacaaaaaaaaaaatgagaatgtagttaatccaaatcaaaactttcctattgcaatgcgtattttctgcttcattatcctttaatataatattttaagttagcaagtaattttaattacaatgcacaagccttgagaattattttaaatataagaaaatcataatgtttgataaagaaatcatgtaagaaatttcaagataatggtttaacaaataattttgttgatagaagataagactaaaagtgaaattcgaagtggagaggacacttaaactgtagtacttgttatgtgtgattccagtaaaaatagtaatgagcrcttattattgccaagtactgttctgagggtaccatatgcaataagttatttaatccttacaataatcttgtaaggcagattcaaactatcattacacttattttacagatgagaaaactggggcacagataaagcaacttgcccaaggtctyatagctgtaagtcaaccctacggtcaagacctacaagtagccgagctccagagtacattatgagggtcaaagattgtcttattacaaawaaattccaagtagaatcaayctttaataagtctttaatgtctcttaaatatgtttatataggagtctaatcaccaattcacaaaaatgaaagtagggaaatgattaacaataatcataggaatctaacaatccaagtggcttgagaatattcattcttcttgacagtatagattcyttacaatttcgtaagttccaatgtatgttttaggaatatgaggtcattactattcataatctgatacagctttatcctaagrcctctctttaaaaactacactgcatcatagcttttttgtgcagttggtctttctrctgttactgaacagtaagcaacctacagattcactatcaccaaccagccagttgatggatcttaagcaaattatcaagcttgtgataacctaaattataaaatgagggtgttggaatagttacattccaaatcttctataacactctgtattatatttctgcctcattccttgtagggtttcttcagtgccygtkgtcatcgrccccttgacaagaagagagaagaggctcccagcctgaggcctgccccaccgcccatcagtggaggtggctatcgggctygtccagccaaagcagctgccactcaaaagaaagtagaaagaaaagcccctgatgctggaggctgtcttcayrctgacycagacctggtgggtgcactgatgtttcttgcagtggtggctctctcatgcagagaaagcctgtagtcatggcagtctsctaatgtttcactgacccacattaccatcactgttattttgtttgtttattttggaaataaaattcaaaacataaacatattgggcctttggtttaggctttctttcttgttttctttggtctgggcccmaaatttcaaattaggatatgtgggtgccacctttccatttgtattttgccactgcctttgtttagttggtaaaattttcatagcccaattatattttttctggggtaagtaatattttaaatctctatgagagtatgatgatgactttcgaatttctggtcttacagaaaaycaaataataaatttttatgttggctaatcgtatcgctgaattttcctatgtgctattttaacaaatgtccatgacccaaatccttcatctaatgcctgctattttctttgtttttagggggtgttgtgycctacaggatgtcagttgcaagaggctttgctacaacaggaaaggccaatcagaaatagtgttgatgagttaaataacaatgtggaagctgtttcccagacctcctcttcttcctttcagtacatgtatttgctgaaagacctgtggcaaaagaggcagaagcaagtaaaaggtagatatccttgtgctttccattcgattttcagctataaaattggaaccgttagactgccaygagaatgcatggttgtgagaagattaacatttctgggttagtgaatagcattcatacgcttttgggcaccttcccctgcaacttgccagataagcaytattcagctcttattcccagtctgacatcagcaagtgtgattttctatgaaaaattctactatgactccttattttaagtatacaagwaacttgtgactcagaagataatatttacagagtggaaaaaaacccctagcatttatagttttaacatttgaggttttgaatgagagagttatccataatatattcaattgtgttgtggataatgacacctaacctgtgaatcttgaggtcagaatgttgagtgctgttgacttggtggtcaggaaacagctagtgcgtgagcctggcacaggcatctcagtgagtagcatacccacagttggaaatttttcaaagaaatcaaaggaatcatgacatcttataaatttcaaggttctgctatacttatgtgaaatggataaataaatcaagcatatccactctgtaagattgaacttctcagatggaagaccccaatactgctttctcctcttttccctcaccaaagaaataaacaacctatttcatttattactggacacaatctttagcgtatacctatggtaaattactagtatggtggttaggatttatgttaatttgtatatgtcatgcgccaaatcatttccactaaatatgactatatatcataactgcttggtgatagctcagtgtttaatagtttattctcagaaaatcaaaattgtatagttaaatacattagttttatgaggcaaaaatgctaactatttctacataatttcatttttccagataatgaaaatgtagtcmatgagtactcctcagaactggaaaagcaccaattatatatagatgagactgtgaatagyartatcscaactaaccttygtgtgcttcgttcaatcctrgaaaacctgagaagcaaaatacaaaagttagaatctgatgtctcagctcaaatggaatattgtcgcaccccatgcactgtcagttgcaatattcctgtggtgtctggcaaaggtaactgattcataaacatatttttagagagttccagaagaactcacacaccaaaaataagagaacaacaacaacaacaaaaatgctaagtggattttcccaacagatcatartgacattacrgtacatcataaaaatatccttagccagttgtgttttggactggcctggtgcatttgctggttttgatgagcwggatggggcacaggtagtcccaggggtggctgatgtgtgcatctgcrtactggcttgaacagatggcagaaccacagatagatgtagaagtttctccattttgtgtgttctgggagctcatggatattccaggacacaaaaggtggagaagagctttgttcatcctcttagcagataaacgtcctcaaaactgggttggacttactaaaktaaaatgaaaatctaatatttgttatattattttcaaaggtctataataacacactccttagtaacttatgtaatgttattttaaagaattggtgactaaatacaaagtaattatgtcataaacccctgaacataatgttgtcttacatttgcagaatgtgaggaaattatcaggaaaggaggtgaaacatctgaaatgtatctcattcaacctgacagttctgtcaaacygtatagagtatactgtgacatgaatacagaaaatggaggtaagctttcgacagttgttgacctgttgatctgtaattatttggataccgtaaaatgccaggaaacaaggccaggtgtggtggctcatacctgtaattccagcaccttgggaggccaaagtgggctgatagcttgagcctaggagtttgaaactagcctgggcaacataatgagaccctaactctacaaaaaaaaaaaaaataccaaaaaaaaaaaaaatcagctgtgttggtagtatgtgcctgtagtcccagctatccaggaggctgagatgggagatcacctgagcccacaacctggagtcttgatcatgctactgaactgtagcctgggcaacagaggatagtgagatcctgtctcaaaaaraaaaattaattaaaaagccaggaaacaagacttagctctaacatctaacatagctgacaaagagtaatttgatgtggaattcaacctgatatttawaaagttataaaatatctataattcacaatttggggtaagataaagcacttgcagtttccaaagattttacaagtttacctctcatatttatttccttattgtgtctattttagagcaccaaatatatactaaatggaatggacaggggattcagatattattttcaaagtgacattatttgctgttggttaatatatgctctttttgtttctgtcaaccaaaggatggacagtkattcagaaccrtcaagacggtagtgttgactttggcaggaaatgggatccatataaacagggatttggaaatgttgcaaccaacacagatgggaagaattactgtggcctaccaggtaacgaacaggcatgcaaaataaaatcattctatttgaaatgggattttttttaattaaaaaacattcattgttggaagcctgttttaggcagttaagaggagtttcctgacaaaaatgtggaagctaaagataagggaagaaaggcagtttttagtttcccaaaattttatttttggtgagattttattttgtttttcttttaggtgaatattggcttggaaatgataaaattagccagcttaccaggatgggacccacagaacttttgatagaaatggagkactggaaaggagacaaagtaaaggctcactatggaggattcactgtacagaatgaarccaacaaataccagatctcrgtgaacaaatayagaggaacagccggtaatgccckcatggatggagcatctcagctgatgggagaaaacaggaccaygaccattcacaacggcatgttcttcagcacgtatgacagagacaatgacggctggtatgtgtggcactctttgctcctgctttaaaaatcacactaatatcattactcagaatcattaacaatatttttaatagctaccacttcctgggcacttactgtcagccactgtcctaagctctttatgcatcactcgaaagcatttcaactataaggtagacattcttattctcattttacagatgagatttagagagattacrtgatttgtccaatgtcacacaactacccagagataaaactagaatttgagcrcagttactttctgaataatgagcatttagataaatacctatatctctatattctaaagtgtgtgtgaaaactttcattttcatttccagggttctctgatactaagggttgtaaaagctattattccagtataaagtaacaaacacagtccctagatggattggccacaaaggcccagttatctctctttcttgctatagggcacaggaggtctttggtgtattagtgtgactctatgtatagcacccaaaggaaagactactgtgcacacgagtgtagcagtcttttatgggtaatctgcaaaacgtaacttgaccaccgtagttctgtttctaataacgccaaacacattttctttcaggttaacatcagatcccagaaaacagtgttctaaagaagacggtgrtggatggtggtataatagatgtcatgcagccaatccaaacggcagatactactggggtggacagtacacctgggacatggcaaagcatggcacagatgatggtgtagtatggatgaattrgaaggggtcatggtactcaatgargaagatgagtatgaagatcaggcccttcttcccacagcaawagtccccaatacgtagatttttgctcttctgtatgtgacaacatttttgtacattatgttattggaattttctttcatacattatattcctctaaaactctcaagcagacgtgagtgtgactttttgaaaaaagtataggataaattacattaaaatagcacatgattttcttttgttttcttcatttctcttgctcaccaagaagtaacaaaagtatagttttgacagagttggtgttcataatttcagttctagttgattgcgagaattttcaaataaggaagaggggtcttttatccttgtcgtaggaaaaccatgacggaaaggaaaaactgatgtttaaaagtccacttttaaaactatatttatttatrtaggatctgtcaaagaaaacttccaaaaagatttattaattaaaccagmctctgttgcaataagttaatrtttycttgttttgtaatccacacattcaatgagttaggctttgcacttgtaaggaaggagaagcgttcacaacctcaaatagctaataaaccggtcttgaatatttgaagatttaaaatctgactctaggacgggcacggtggctcacgactataatcccaacactttgggaggcygaggcgggcggtcacaaggtcaggagttcaagaccagcctgaccaatatggtgaaaccccatctctactaaaaatacaaaaattagccaggcgtggtggcaggtgcctgtagtcccagctacctgtgaggtggagattgcattgagccaagatctcaacactgcactccagcctgggcaacagcgtgagactccacctcaaaaaaaaaaaaaaaagaatctgactatataccatggaaaagccaccactctgccacttaaataaacatcaggatcagagattccaagaggacaatctgsatcaagtcttcaccaagtgttttttaagcgaaataatgaaatagggagcagaatatgcctgttgcccatagaaacgaggtctattcttgtcctcaattaggcttttttttcttcatagttacaccagaactaaagtaaaagtggtttttctsttctttctacttctccccatgaaatgggcatatcatctcaacacttcactccaagtcgccacgggcaaccttatgaccctaggtcctccacccctaatgtatcatcattgccacccatttttatggtacttattgttcttaagcttatcctcttaatcttttcatgtaagcaaagctcattaatttctgtcttggaaatgctactactctctttaattactcaccaaatccaactttaacttttgacctggtttctctgccacaagttctgtcccactggagcccatactcacctaccrctttgccatcacatttaacagaaaactcttatcaacttacttcctgcttaacattagctccttcctatctatatccaaatttcttaaattcaaattttttagctggagtaaaaatggtcccagtaccatttcctgttcccttcactayaacctacatttttgtcacattaagtttttcccyattccaggacaggtcaggccctttaaaaatttcaacagctttattgagatataattgatataatttwaaaaatcctgcacatgtgtcatgctggagccctattgattccaacagggatggcgccttgtccaagaagagacccagagccagtgaatgggacatagggtttatttaggacttaaatacagatgtggtccagtgkcagtgggctggacaggaccgctactatttgtaaagagtatgtagtttatataacatttctacttagcactctccacttagcaacctccatttaacccaaaataaaaggccttggttccttgcacatcctgagttccaacggacaggcagggagttcaagtgtccttcacagataagaagtgaatctctctgggttggccattcccggattccttagcttagactctgaacacatattcttcttagaccatacagtcattctcagggtatgcttgagttaatgctgtcggatgcatctgtcatacaaagtgtttaacatatacgatttcatgattttggaaatatgcatacacccatgatatcactggcacagtcaagatattaaatatatccatcacctccaaaagtttccttgtgttcatttattttagtttttcatggtaagaacatttaatatgaaatattatcaacaaatttttaagtgcacaatactgtattattaattttaggcattatgttgtacagtagatctctagaacatattcatctactaaaaatgaaattttatctccatttccccctacctcccatcccctggcaactaccattctattttccactttgactgtttcagatacctcatataagtgaaatcacacagtatcctttcgcactgttgtggggatgtaaaacggtgcagctaccatgggaagaaatgtggaggcccctaaaaaattttttaaaaaattctgattatcatatgatccagcaatctcacttttaggcatatatccaaaagaactgatatcaggatctggaagcaatatttgtgcatctgtggtcattgcaacattattcacaatgttcaggtccttttatatgatgccctcattgcagcaatgtcttcctcccaacaccatctgacaaactgctatttgtttttaaacctcactttaactgtcaccgcccagagaagactttctaaaacctttgggcaaattttattactttttgacaatgaatgcctgaggcttatccagctttgattccagaaacatcagcctgtcagaatggctaattttcatgcatttgtgaatgctggatggctaaatccagtgattttcaaagtctcgaacatcctctttttaaatgtagaacccattttccaataaagccacaaacagaaactcaacatgcaaagttcttgaatatggaacttttggggcaatactgagagtcgcaaaagttcactgaatgaaaaatgcgggttgggaagactgcagtcatcagacctttgctcactccttacgtgttcacagaggatcaaatgaatccctagagcttgaagtaatgccatagaagaaaaaccactaaagtagataatctgatggtcaattcttagttaatgtacaaatagaaaaaacacagagaccactcccaggtaatatgtaagtctatctagaaagaaatgcactttcttggctgggcacagtggctcccatctgcaaacccagcactttgctgggatgaggtgggaagattgcttcagaccaggagttagaggccagcttggcaacatagtgagaccctgtctctactataaaacttgtaaaaacaaacgaaaatacagtaacgaaaaaagaaatgcactttcttaaggtgtcatttggtaagaaatgttatgtgtctgattttgcccatgcacaattttgaatataataaaaaaggtagcttcccctatttagaatatataaaacagtaacaacaagattgtataactcatgattttaagatgataatagaaagattagttgaaagtttttaatcccacactgtggtatgagaactattttatttttatatatatatatacatatataattatatatatgtatatataattatacaattaggactgaaagtctgcaacaaactataatggatgtatgcacttgggacataagcctctagttcctctttatttatgaaccaagagaaacagctaactcagggattgtttttaaactgactacagattcccaccatggggcaaaaatatgggtgacatgacacatcaccagctgcagtagctcagctcacatttctgtttaagcattacacacataatatcctgtatgctgatcatttaaacttactgacgcttgtaatcccagcactttgggaggccgaaggggggtgaatcatgaggtcaggaaattgagaccatcctggacaacatggtgaaatcgaaacagtgtctctactaaaaatacaaaaattagctgggtgtggtggtgtgcacctgtaatcccagctactcgggaggctgaggcaggagaatcacttgaacccaggaggcagaggttacagtgagctgagatcacgccactgcactccagcctgggcataagactgagactccaagtcaaaaaaaaaaatgcagatttcttggtactaacctaggtttattacatcagagactctaagggcaaagagcctgagtctccattttaaaataaatgtccctgagagtgactgatcactggttggatttcagagttactgatagaggctacatttgtatttacctgagactcccttgatatttcttacctactatccttttcactcaaatggtgaccatgaggcaatattttgagcaaatagtcatccttaaagttaccttgaataacttcatggtgaccactgcctatgtttaagaccagacttgggtttaacatctctccaaatgctagaatcactatttccactatacttccgctagtctctggtgattctttggattggacttcaaattctcttgcagtgtagaaaagaattacagatgctacctctcatgtgtacatagagctgacatttcagtttttgaattccatcctcccccctcactattgcatgtgatctgatgctcttgcttgaacttcttgtggtgtgcagctctgcaccaaatagcaatgaattggtacatagtaatgcagacacatggaaagtggaatcactgattttttttttttttttttaagatggagttctgctcttgttgcccaggctggagtacaatggcactcgcaatcatggctcacagcaacctccgtctcctgggttcaagcaattttcctgcctcagcctcccgagtagctgggattacaagcatgcaccaccatgcctggataatttcacatttttagtagagacggggtttctccatgttggtcaggctggtcccaaattcccaaccccaggtgatccacctgcctaggcctcccaaagtgctgggattacaggtgtgagccaccatgcttggccaactgacatttattttaacaacattagttgtggtattaaataatgaaagtagcccgtattctttgcagacattttgggaaatatagaaatgattagacccatttataatttcaacacaagcagtggaatagctaataccttcatttatgttttttgtcttaccctgtacatgttttagtgcctgaatttttcacactgagtcacaaaaagttttccatattatttaacattcttctatagtatcattttctgtaatttgctttttaatggccatatgatattccattatgggaatttatttaaacgtctcctctcatttcacatttaggttttttccaacctttttctattaaagagagtactgacattaacatccttctccataaaccttttgtgcatatatattatataatatattgtatacattatttataatataaatttattttatattttaaaatatttattttataacatggtttacacattataaatgtatatttataatatttatttatttatttctaggataaattacttgaagcagaatatctggaggaaataaaaggttttgggctcagcgcagtacctcatgcctgtaatcctagcactttggaaggctgaggtgggaggattacttggcccaggctgcagtgagccctgactgtgctactgctactgcactacagcctagatgacagagtgagaacctgcctcaaaaaaaatgtttttggcattttaaacttaaaaaaaatatatatatatatatatagccaagtaactctccagaaagattgtaccaatttacctttgatgcacagaataacatatttaatttttattttgcttctccatcactaatattatgattaaaatattagtaattactttaattttaatatcttgaattagtagtacaagtaagagatttaaaaatgtttaatgactattttactatcttctgtgaattgcctatccacgtcctttgctcaattttcttttttttcttgttttttcttctcttctcttttttttgagacaaggtctcgctctgttccccaggctggagtacagtggcgtgatcttggttcactgcaacttctgcttcctgggctcaggtgattctcccacctcagcctcccaaatagctgggaccacaggcatgcaccaccatacctaactaatttttttgtattttttgtagagactgggtttcgccatgttgcccaagctggtctcagactcctggactaaagcgatctgccctccctgacctcccaaagtgctgggattgtaagcatgagccactgcgcctggccctttcctcaattttccattagcaaagtcatcttttatatgaattactcatttcataatatgtaggatagcaatcagaaacatggtattttcctctatacaaatattttaatttgtaagtaattacactgggagtcatatacttatgcaaataatcttaactggtacggatattcaccatcagacactttcttttcttctcccagccaagatgtgatgaacaggcaatacatctttttgtttgttttttgattcaattatatttatttctgccccaaactttttattttgaacagtttatactctacagagaaattgcaagaattttaataaatacctctctgtccttctcctagcttcaccctttgtttgttgaaaggagatactttagtgcagtattgcaacagcttatgtagacatgcaaccttgaggtcacagacctatgagggattgagacaaaggcaaatttagcaaatattttccagagtactctgctgcaataaccacgtacccaccttcagcaatgacctggtgaacagggagactactgcttagtaacggagcaattctcagctcaaatctggcaggttctaagttttcttgcctctgtggttttgaatggttgctcttactatgtgaaaatggaagacatcatgtcctgttcatgtttaagaattaattgagatttccccaggggcaaatacttcacgatactgctttcctcagtgatatttaatgcacttcctgccctcatccccaattaattaagcattttcctctatacaggagatttatgaagtacttggaattccattaaaaagaggtaatatgtgacttaaatgaatgcataaatacatcaaatataagatatctcagaaatggtttctgtgtgaattttgttatccacaagcaacttgtattattttcatggctacaagaaatttcaatgtggctgcttcccaagctgtttcccaagcaagtaataaatgttgtattactttatttgaatataacaaagctttaatttatgattgcatgtgcttacattgacaccttggcatttcccttcaggcttttctggacatgaaaaagatgagtgaatttggctggatgggtctttctgttctgattcaccagctgcaccccaagcatcagctaactaacttggaaatatattttgttttggtggggaatctatgacaaaatataattagatcagtgataccactgggccaataatgaaaagcaaatgctatgtacaatagtgtcatgtttatttatgaagtgtagtatcattatcccagaatgaataatgaatgaggcatggaacttaggtggttagaacctgtaagaacaatactgtgggcttcatccccaggtgtcctccttatcatcacattatttcacctccttaaattactatttactcacctgaaaaatcagttcataaaatgttctcaccttcattaaaagaacactagtaataattgatttccattaaaagtatccacatatttggggggaaacttgtaattctttattctaaagagtttccaggaactgaaagtaaatacataaacacaagacttggattaaaatgtaaataatatcttttaataagaacccaacaaggcatcttaacttcattatattatgcattctgtagaaagttcaaaaaagatgataagttccttgttttgttttgtttgagatggagtttcacgctgttgcccaggtttgagggcagtggcacaatc

SEQ ID NO: 8739 - DNA, 23672 bp, Homo sapiens
cttaagctagtggttcagcattagtgccttacaaatgttaactgctgttatctcattcatcttttgtaacaactgtgtgctgtgcaacaagggtgacaactggtatgcctgccagagctgggcaggtcacacaaacagacgaagtgggctgccagtgatggggcccaggcaggtgagacagtaagagcccccatttaaaggcattctgctcaacattgttacataataatctatggcatgaaactcacctatggaggcgagagctccttgttgctcttgatgtcaatggaaaaaattgaccatgacctacctggtccttaggtggggttaacagctattctgaaagaagaatgctgatttgacaagaactgggcgtgaagccaaccatgtggtctagaaaggacacaattgcctttaagccaaggcctaagcctatcaagactgagttaatgaggctgccccatcaagccagcggaggtcagccctcaccagccctggctggctctctggctgcagagttgctgagcagggctggagaacagaccaaatggggccagccaagttcgcacatcctcagagccacccgctcaagtgtttagctctcctggggtgattgacttcagtgggagcgtggctctgccatgattcagacttctggcctccagaactgtgagagagtgaattcctattgtttcaagccacccagtttgtggtgattaattatggcagccaactaacattcctcttttcctccaatttcataagaacaggtgttgctcttcttgacactcagctgtgtgttctcttggcctcctgctccctgggggagtctccttccattaataaccacctttaacctccctttcagcttcttcccccaaacctgggaagtccctccttccaagccacagctccctctgccccacctccttcccagccttctcatcaagaagcaatctgccttgaccatctctttgacttctcagcctgctggccctgggctcctgctcccaccttcccacccagatcaccctggtggattccatggaccagtgaccatcctcatctacttgaatgttctgctgcatctgacactgacagtgacatcccttgtcctcccttgtttactgccctggtcctcctccttcccagccatcatcacctttgtgagctctctccctctctgctcaggcttatgccgagggtctcagcgttctatgcttcatcctcttctcttgtcctctccttgccccaggacacccctgatcccatgtgcttccttcattttatttcctgtctctgttcttgcctccaaatctctctttagacccattcacctgtgtcatctctgccagcaggcaccacaggcccttcaggctcactaggtccaaaactgaactcatcatcctccatacaggcttccaaaacctacccctcagctcacaccaggtccattctccttccttaatgtgtctcctcctctccagcctcacccccgcttccttggcccacaccaccatcatctctcgcttggattatcacagcagtgtcacttggtcctgtcttgatctccaggtgaccatacccgtgacagcccaagataatttatccctcctttacttacagaatgaagttcaaccctggttcccaacccagcaggacttccaagccctccatctggccctgatctggcttctctctgtcctcccttcctcctctctgatgggctcccggtgccccaccacccccttagcctgtactgctatcactcctgtggttctctcagcccaaaatgcagcctcccactgctgtgctgtaagctattctgtctgttcactcctctccacccagccagggctgataaaaacctagacaaggttcaaaaacccagatccaaggtcaccaccttcacaaagcttttcctattccattcctctctccaaccacgggagaatggaccattcctccctgtgtgtctttattgtggagacatgtgtcagagcatcgactctctatctttagttcatctattgagatattgatctctcttcttgaggccaggggtattttctgggacatggttagatctcaataaacattgatactggagggatgaaatgaaggaaggatggatagaaggctataaggatgggtggatggataaatggatggatggatggatggatggatggatggatggatagatggatggatggaaaaatggatagatggatgggtggatggatgaatggatggatggatggatggatggatggatgaatggatgaatatatgggtggatggatggaaggaaggaaggaaggaaggaaggaaggaaggaaggaaggaaggatggtagaagaaaggtagtaccagtatgctttagctcatgcaggcaaacagatgatgggcagagggaagcatggtggctgattacaggaggatcatagcagatgtttaaggcaagattgacagccccacaaagactgagaagagaagataagaaaaatgggaaagttattaagacacaagacctagatcaggagctagaagctggatcccagaacaaggcaagagcctaatgactcgagtagccaactcatcccagtttgccaaggtctttgccagttttagcactgaatatcccacaccatcggaaattactcagtcccagcaaattggaatggttggtcaccctactagtaattaagaccagtgccccacttcagagcagaagcatcagccaggccctgagtgacatcttgtaggctcttgaactggtctcactcaatccccatgaggcccagtaccatggaacagagggcagggaggctgagggccaagcagaggagcacctgtgctcagcagggcaaggcatcacaggggccaacattggtttccctgcccttctcccagaaaccacctccccactttgatcctttcccatgccctgctaggctctaggacaccaaattctcatattctagccactggccctccctaggcagtcaccctgggtgttatggactgaattgcttctcccgcaaattcttatgttgaagttttagccctcagtgtgactgtagagattgggcttttagggaggtaattaaagttaaataaggttataagggtggcactctaatctgataagattggtgcccttttaagaagaggaagagtaatcagagagctcgctctcttcctctgcccaatccctctcttggggggtgtgtgtgtgtgtatgtgtgtgtgtgtgtgtgtgtgtccagtgtgggctcacagggaagaggtcatgggcgaacagagtgaaggcaaccatctataagtgccagagagccctcaccagagaccaaccctgacggcaccttgaccttggatttccagcgtccagaactgtaagaaaatacatttctattgtttaagacatccagtgtgtgtttaagccaggccagtgtgaggtattttgttacagcagccagagaagactgatacactggggtgccatgcccccgagactccttccaaatctctcctttcaaaacgcaccaccctcagtcctgattccttcagagctctttctgcatggcagtgggagtcatgagttacctcagactttcccccaaattctcaagacattccttaagatgtaagcttgggaaacggcatgtgatgtctttccctcgtgggtggtcagagcacagacagcacacacaggctggagacggcccacaggaaaggtgggctaaccacctttcccaaagtagtttcatctggaacccatttgggcggtgttacactagtttctgatggctgctctaagaagttatcacaaacagtggctcagacaacacaaaattcttctttcatggttgaagaggccagaggcctcactgggctagaatgaggatattggcagggctccactctttctggaggctctaggggaggatccattcctttccctctccagcttctagaagcttcctcactccttggcacctggctccgacatcacattgacttttcccttcctgcttctaccatcacatcaccttcttctgactccaatctcctgcctctttcttgcaaggatccttgtgattgtaattaggacccagctggataatccatgacaatctcttcaagatccttaacttaatcacatctgcaaagtcccttttgtcatagaacgataacattcacaggttctgggtattaggacacggataacttcggggttccattactcacccataactggtatgcagtgctgatttccatcctgtaggtacggtttagggatctctaggtcaatgagataatggactcttgctcatgttacatggcataatgggaagaaagccaaacctagaaaaagagggactcaggttcccttgttagagcctcttcttactaactgtgggattaggggctgattccctgacctgctgtgttctgtcttctctccaattcaatgggaatgaactgtgagggcactgagcaaaaactaaggtctcaatacctagtagtagtgggacttgcctctggatacccagtagtgatcctgccgcctgtttctggatatcctacagtagcaatcccacctgtttctggatatcctacagtagtgatcctgcctgtttctggatatcctacagtagcaatcccgcctgtttctggatatcctacagtagtgatcctgcctgcttctggatacccagaagtgatcatgcctggttctagatacccagtagtgattgtgtttcctctagatacccagtaggtattgtgcttgcttctagagatgtagtagtagctggacttagctctagatacccagtgctcatctctagactgggctgagatcagtgtctcccttgaagggttattgtaaggatgaaaaaagataatgcgtttaaagcacttggtgtagtaggtggtctttttaaaagtgtgaataaatactagttcttattatttctgtggatatccaacagccacataattgggccccaaagccatgaagaaggaagaggaaatgtcttaaaggttgtcgatggacagtgtttgctgaacatcaaaatcactttccaggtattacctctgatttgctctaccaactccacaccccacctgcagccacataaccttccatgatcacggccatgcacaacacaccatgtcccccaggcaaggggaccttagaaacataaccaggcttgagacagcactctgcaccggtgtcttggaaatgctcttaagagtgtatggctgagttagggaaccaggatttcaaagtagaaagggagaatctacccaagcccatagaaatcctgaatccactcctttctcagcaacaagcactggcctgggagtcagccacttatgcaccaaccccactctgcccctaattaaatgcatgactttgaaaattcccctcattcttctgagccccaattcagtgattggtgcaatcacaggcttggctacagtgacccattcattgcaggcatggtgagactctcaatccctctcatttccactagaatctaactgttgggatctatgacccagtcagcatagcaggcctgtggggagctctcaggttcaagcatatgccccccctaatctacaagaaattagctgcagaaaaccaaggaatagaacctggaaaaagagagggtttgctagagctgtccctttccctgtctctggaatgccaacaatagggaggctctttggtcttgtctctcaggagtgcccatgccattccaggaaaatgatggcccagctggtggtgtaaggcttggggggcagcgagtgggcatcgtggtgaaagcctcgggatcagggagctgcgtctgcaggcaggcctgctggccggaaacctgccaggaaaggaaggggctgtcycggggcggggccagggaggggtggagacagggccggctgtggtcagtgacaaatgctggctgcaatccagccagccctctgccctttctgagcccgagggactgccacctccactgtgtgcacrctcagctacgggacacagtaagtaccratgccgcaamgggaggtccccagggcttgagggcatgtgaggcgaggagaggatggactctagagttttggggtttggggtctgcaaagctctgaaggagtctcatctctgcagtttcaggtatccaaggcagcagaggtgagtgggtcccccgagctctgtgaccttatgctccacactaactctggcagagcctccgtttcctcataggtaagatggaaataattacaccctctggatggtgtgactgaagattaaatacagcgggtgctctcactcagcacatctggccatgtctgcagacacatttggttgccacaactggaaggggggtgggggttagtgacatctagaggccagcgatgctgctgatgatcccacaatgcccaggacaagatcacaaagcatcatcctgttcaaaaggtcaacaggatcaaggttgagagaccctgaaataaggccatggggacaaaatgtcggctggataggaggtgctcagtaagtggcagcttctgttgttttctgtgcctggagtcttgggsctttagaaatcaggaacaatgatccaatattatcggcttccgtgagataagggcatcttgcctggaggctgccacccaggccrgtcatggcagctgctcatgarrgacagtaacaatttggcagtttgttaaatgaacaaaatgtagaaataaagtaagmagaatttttagtttttctgaaggtagggcttttggccagatatgcagcaataaaagagcaaactgcttccttgggccagtgtccttgctcatagatcaggaaaccgaagcatgaagaatacaggcggcagatgcctgaaggtaacggacgtgttcatggtgctgacggtgatgataagtgacagatgtagactcatctccaaacttgtcaggttatagacattaaatatgtgcaactttatgaatagcagtcatgtctcaatcaagtggttttaataaagaaataataggaagccagagctgagagacagggagggagttgttcaaggtcacctggcaagtgagctccggggcggggagagctcagctctgggtggccagcctggctttttccactgctcagtgtccagcttgcagtctaatgtctctgaattacagagaaggagactggtcagttcattcattcattcattctacaaaggtttatggagcatctctcctgactgcaagctcttgaaggtgagagcagcacaaatgagggtcccwtggagagagaggccggaatgaaaaatgtcaatgacaaatgcatatataaaggcacatgtgtaattgaaagagctttgagagaaagagtcaagggactgttccagagaatagccatggaaggggaaaaggtccagtgtgataaggtattgcaaagaagtgacatttaagcaaaagcctgcagcctatgcagaagttggcctcagtgagaaaggttgggggagggttccagtagagagggaaggtatgcaaaggcccagagttaggacagaacttgctgtgtttgagaaactgggaaaagaagagtgagcctgggggtatcacgtgatccagggcagagcaggtccaggccaggtgcagccaggtcacagcagccctagtgggttagagcacaaatcaaagtttagcatttatctgaaacacaggagttggccatgagtttcttaggcgaggaagcgctgtgaccatatttatgattgaaggagattcttttatatgctgtatatagaaagcctttcagggcaaagaaaggaagctactggggtagccctgggggagatgaagggagcttccactgggggcagtaagaaagccagggaaaggcggcagctttaagacctgttttggagatagaacggacaagctttgctgatgggctggagtggaacaggaagtcaagattacttcttctgggaagttctgttcctgggtctttaggatctagaggaagctgtgactttgtctctcatctctgcctgggctccaagcctcacatccctttttgtaattagaagatattggacagaccgtcctcactaacacaattcccacagctgagtccagggtagaactgggcaggacttcactgcccaacacgggaaatatcagtcagcagatttgggtttcggggatggtggtgggccagcgggaagactgaccagggcctacccatcacatccccaccacctcccacctcaattcaccttggcctgagatgacaggtgaacatgactgatcctctctcttccctctgcagaaacactaaagccagggaccaggagaggggcagcccaaccaagctttcaaagcactcagtagaggctggtctgggggatgggaggctcccagggcttcacctgtctctgtcaaagccatgtatttccaccagaggcccaagagtgcgatggcaaaccctggatttgaaactaagaaacgtaaaacaagcactgaggactccactgcctcttgagtgacctctctgaccctctgtttcttctgcactgttaggataatgatactaactccatgttgttgtagagaagtataaatgagctaatacaggtgaaccgcctggggataccaggaggtgaggtcgaggaggaacgaggtatcactcctcagagccactcagagasaggctgtgcacgagtcagaggaacctggattttaattccggttccatcactcagtagctgaaacaagctattccacttcacttagcctcagtctattcaatctgtaaaatagagtgagtttacttttggaaaactctgtaaaatagagagcttacttttggtgaaggttaaacatagtaatatttatggagtgtctagtatgtctttaataattagtggttttactgaaaagtagagagagttggcccagagggagcaagatttctgggtctcaaacatgtagcccaggagagcctaagtgaacctggggccctctccaaacagatcctgggggagactcagtgcacacccggagaagcagctcctccccatcggatctctagtgcttggcagggggcggggtcttgagggggtgtccacaacacatggcagactgcagatgaagaaactgaggcccagagggggtgaggcttgcccagggtgacctagtagctgaatagatgggagaatggaggccagggcctcactgagactctctggtcagctgcccctgggctgtatccaataaggaaactcccctgcttctgaagctgttctcgaaattatcagctcagtgtgaccctgtggggggttgagccacattgtttctttagaagcatctccatacatggctggttccaacccttggcaggagggaccatattgtgctgtaaaatagactcatttagagaagccggagattaaagcacccacctatgtccttcaaagctctccaggcaagtgccatggtgggaacaggtagggagtgtcagtggggggaagcccagactctgctcactcattatctgcagattagggctattgttggtggctactaagtcagggatttcaaaatcaggaagatgcagccaggaaaagaggaggcaggactctgcagaggaggcaggactctgcagagtcagagtgataaccgagtctgagtccaagctttgccagtgttagcaagcgactccatctctctgaacctcggattacccatctgtaaaatagagctagcagcaagatgtacctttttgggtggtgcagggctgaaggagttggcacagtgcctgaaagagggtgcgggcaatgcgcccaactgctgtggctgctgggtttggtgccaggttcgattctgcaggcagaaacttctacatgaggctccttctcggaaggagctcaggacacaatttggaggctgggctggcaagggtgacctgctggagctattcaacttcacttaaagacaggcctgcagtccaagcctgcccaattcctgagaccattctctctccactgctgagccccacggccactctgcaagggatttcccacccacctgtttggggccctttggagtttggttttaattgggtcacgggatgctgtgacaggctgcccctgcctggtggggatctggggtcactgatgacattgtgcccatggagagagcccagcagaaagggattccctccaaggcgacacacagggcaaagctcacatcagaagccaggcaggccctctgcacctggtaattagccrgccygggtgctgtcaggctcacacgtgtgtgtgtgtgtgtgtgtgtgtgtgtgtaaagcatgtaccctatggtacagttgagaatatggaggcctcagatggggcttttgccagaaactgccatgcctactgctcacacttccatagcacgtgcccccaagcaccccatggtgtaggtgctgttattatcactatcttacagttatggagcagtggctcaaggtgtaactgayttgcccaaaatcacactacaaggacacagcagggctgagatttgaacccaggcagtggcttcagagcctgagctgtttcctactgcagagggaggaggcaagacttctacccgtagccagatggggaggcatgggcacaggaayggctcttgggtgaagyggagggaggaagaggaggactgaaggcsaaggccacrtcaggagtgatgggakaccccacaaaggcctccctgagaagmgctagagacaaagatgagtgcctcctcatctggaagatgaaaagatgtctttgcctgcatgggctgcyrtcacaaagtcccaggggctagggggcttcaacaacagaaatttctttctttacaactctggaagctggaagtctgagattaaggcaccagcaggatwtgttccttccaaggcccctctccttggctcacaggtggctgccttctccctgtcttcacctggtcttccctctgtgcatgtctctatcctgatctcctctttttaatttttgtgtaaggacgtagtcatattgggttggggcccactctagtgacctcattctaactcagtcccctctttaaaagccctatctccagatatagtcacattctggggtattgaaggtaaggacttcagyatatgcattttgggggcacaattcagccagaacaggaggacrgtggggatgtccacatgaagaggttcaggcagaattcctttaggaggggaagatgtctctctgtgggacaagggtggcatggagcagcccctgggggaaggagaaggggacwgtttgcatactggtattctgcctaccccagggtggacactcactcagcgtttgctgaatgaacagggcaaggccagcagtgctgatggtsccaggcatgtagctggtctgagttcatagaaggaccacagcgccctgccatgtgccaaaccaggacaccagagtgaagrccagaagctcacatggaagcagcttagttccctggtaacctcgagatgctgatgagacagagcagagcagagggaaccctctccctccatatcccatcctccaaaatgtgtcccttgatgtggatgggtagacaggattcctgccctggcagccagacccctgccttgggtctgcacctcctctccctccttcctctccccgtcatccctraatcttgtcctcragccactgccaccctgtgtaaaccctcatgyccagtcttgsgggtgccatcccttctctttraagctgaatggaccaaacatacccattgagtgttgggtggggacatctctggaaagtcagcacctggaccagctccacccctctctgaggacaccttctttccctttcagaacaaagaacakccaccatgcagctcttcctcctcttgtgcctggtgcttctcagccctcagggggcctcccttcaccgccaccacccccgggagatgaagaagagagtcgaggacctccatgtaggtgccacggtggcccccagcrgcagaagggactttaccttygacctctacagggycttggcttccgctgcccccagccagaryatcttcttctcccctgtgagcatctccatgagcctggccatgctctccctgggggctgggtccagcacaaagatgcagatcctggaggkcctgggcctcaacctccagaaaagctcagagraggagctgcacagaggctttcagcagctccytcaggaactcaaccagsccagagatggcttccagctgagcctcggcaatgcccttttcaccgacctggtggtagacctgcaggacaccttcgtaagtgccatgaagacgctgtacctggcagacactttcccyaccaactttagggactctgcaggggccatgaagcagatcaatgattatgtggcaaagcaaacgaagggcaagattgtggacttgcttaagaacctmgatagcaatgcggtcgtgatcatggtgaattacatcttctttaaaggtaaggcccttgggcccaaacctgcactttctttggcttttctgctgcttttatctaaagaatacccaattccctcacatacataaaagacggggagtacgttaagttcttttgggtgcctgttgagaaaaattaagtaaacaagcagccagagaaggtaagatgaatgccttcttgctgtggatgggattagtgaggctgagatgctgtttcctccacggaggaagagctggttgctgtcttcgggcccctgrggacatctgaagccccagctttctacaggctctgaagtatgaacccattgtggccaccatggcaaagacaccaacaccttagccactcagggcaggacacagaccccagaagggcttaaagggcatttcccagtcccccgtatccctcagatcttggcccctctgccctcatagaggccaagactccctcagacaaatgcttgttcctctgaaatgcctcctcctgactyctcagcaagagctgacctctgcttatctccccgacactccttgtaagcattcctgctcgcctctgcagctcctgccagttgctgaccctggggaaagcaagagtggatagagaggagaagagaggagaggagagggtgggaagggttgcgaaggaaggtaaattgttaacacctccccttcctatggtcacagatcatgagtatctttggccatttgggtggctataacaaaataccataaactgggtggcttagcaacaacaaacatatatttctcatagttctggaggctgagaagtccakgatcaaggcactggcagatgcagtgcccattccttggttcatagagagtgccttcttagtatatccttgctggaaggaggaaggcagctctctgtggtctcttttgtaaggacaccgatcctgttcatgacagctccacccccatgacctaatcaactcccaaaggccccctgtcctaataccaccaccttgggggttaggtttcaacatatgaacaatgtggggacacaaacattgagaccacagcastgagtgtcgaacttggactctgagatttcctatcccctggtgcagggcagtccccattacaccagattgctgagggcagctgggaaataagctaaggacggtattgactggggtcttccttcgataacgattaagaagttggaaacaggccaggcatggtggctcacgcctataatcccaacattttaggaggccgagatgggcagatcacctgaggtcaggagttcgagatcagcctggccaacatagtgaaaccccgtctctactaaaaaatacagaaattagccaggcatggtggtgggcgcctgtaattccagctacttgggaggctgaggcaggagaatcacttgaacctgggaggtgggggctgtagtgagccaaaattgcgccactgcactccagcatgggtcacagagcgagactccatctcaaaaagaagaaaaaaagaaaaaaaagaaaaaaagaaataaaataaaataaaaagaagttggaaacaatcacttgtagcgttttgttcagaagttcccawaggaaggtcagagaagggtcattgaagacttcccaatgggaaaaaccattcatttccaggatccatactaacttctttctaaaatttaaatcaaaatattgsaatgaaagtgcaaacagagaagttcacccagatatcaggtagcattcacagccagccacatttttcaccctcttcacttggagatttggtcttgagtaaaacgttagagaatcagagaacaycagggrtccagggcctctgaagatgtgaaaaccaacctccttgttttgcaaatgtggaaggaaaagtcccacgaaaagtccaagaatgtgcccaatgttataaagagacttgccttcatattcaagaggttcaacagtcactgctctggggctgccrtaaagatggtctccgctggctatctttactgtcttcactccttttatttgcagctgagaatttctaattctgacacaaaattctttttcatttttcccttttttcatctttagctaagtgggagacaagcttcaaccacaaasgcacccaagagcaagacttctacgtgacctyggagactgtggtgcgggtacccatgatgagccgcgaggatcagtatcactacctcctggaccggaacctctcctgcagggtggtgggggtsccctaccaaggcaatgccacggctttgttcattctccccagtgagggaaagatgcagcaggtggagaatggactgagtgagaaaacgctgaggaagtggcttaagatgttcaaaaagaggtactttcagactaccccagggccagcctaaacccacacagccccagggagacacacacgccctaccagggccacacagcactggtgggaaggactcacccagccaaggagctgcctccaggcccagaggcatcctgtgacatccaagtcctgggggcctagcccagttggagggacaagagctggaaactgggttccttagggtggtgccagagtgggcagagacctctgggcagcccacrtccaagtccagagcaaggggaggctcatcctagaaaagaggccagaggagccataaccaccattgttccttgggttaaggagtccttttttaaaaccatcaaaactaagaatccagtgcattatgaatccaaggggtgaggctcagtgtgccaatgccccagaacagtctaagaaagctccttttccctttccaggcagctcgagctttaccttcccaaattctccattgagggctcctatcagctggagaaagtcctccccagtctggggatcagtaacgtcttcacctcccatgctgatctgtccsgcatcagcaaccactcaaatatccaggtgtctgaggtgggttcagaagctcctatgcatctgcttcccaagrtctattctgttctattctttctaktctactctaccccatttcattccattccattccactcaactccactccactccactccactccagttcactctattcaattccactccactccactccagttcactytattcaattccactccactccactccagttcactctattcagttccactccactccactccactccagttcactctattccattccactccattccactcctccactcctctcatccactccactctactcctccactccacatctccactccactcctccactccactcctccactccactcatccactccactcctccactccactcctccactccactcctccactccactccactcatccactccactcttccattccactccattccactcctccactccactcttccactccactccattccactcctccactccactccactcyattctattctattccattccattctactctattctattccattccattgcagtcaactccactccactctctactattctattccactcctctcccctccactccattccattgcagtccactccactgcactccactcctttattctgttctgttctattctattctattctattctattctattctattctattctattctattctattctattctctccctctccctctcttttcccacaagtagtgaaagtttcactttgtgtcttatccttcatgtaatgggaagccatatccaccactgttccttgagttaaggagtcctgttttaaacaatcaaaactaagaaggcacttcctagctatgtgrtctccaaaaaayacttgactctctgagcttcctttctctcttctataaaattgaagaattacaccttgctcaaagatgccatgagaattcaatgacagacacatgcgaagtcaccccccagcacagtgcctggggcagagtagctgctccattgttccatttcctacttgctccatggctcagttgaacagatacttagaggttgatgcccataggcagaagctttgccatttgctatgatgacttcacctgcccctrgtggcctggtgatgcctggtgtctcccctgcagatggtgcacaaagctgtggtggaggtggacgagtcgggaaccagagcagcggcagccacggggacaatmttcactttcaggtcrgcccgcctgaactctcagaggctagtgttcaacaggccctttctgatgttcattgtggataacaacatcctcttccttggcaaagtgaaccgcccctgaggtggggcttctcctgaaatctacaggcctcagggtgrgagatgaagggggctawgctatggcccwtctgtatgctggtagctagtgatttacacaggtttagttgactaatgaggyattacaaataatattactctatgatgattgcttccacccacacractgcaacatacaggtgccttggggaaatgtggagaacattcaatcttgccgtcactattcatcartgaagattarcactgagatccagagaggctggatgacttgctcaagttcaccagcatggtagtggcaaagagaggtccagagtcctggcccttgatgcccagctcagtgccacaaagctcartaggagggatgttccagtggatgagggccaccaggaagcacaggtccaaggctggtcccacacttatcagcagcaacaactstcagttcatcctgcatgggaaaaatgttggaatgggagtctgaaatggggctactgtttcagtcctaaygtgctgtgtgacattgggacaacactttccctctctggacctcagtttccctctgtatacaaggatcagattcttgctgtgacccaagaactcctgaaatcatatagaaargctggggtgggccctgtcattcrtggttgatttcaatacactcaagtgccattcatcctttaagaaaaacatctggatatcaaggtggaaatggcccatttaatgattgattatatcattttgtggatatagttataatctgatgggcctggctgggagtggaagaagggaagccttttgcaaatagtagagtrtcagttgcaggtgccaatgrctaactttttgaattctatgttggcattaacaataaagcattttgcaaacactggttataactgtctttatggaggcagctctgggaatggtgacattgatagcttaccatgctccaggccgggtgcctggcccttcacctggatggtcgcatttgcccctcataagactcccatgaagaaaggcaccactgttatcccatctgttattcacagatgggaaaggcaaggcttgaagtggttaggtggcttacccagtcacatatcttctaagtggtgcagccagaatttggcggggggagtgcgaccaagaaccctacactcagtcctgtgctctgtgctgtggaggagagatgaccaggagcagaaacttcattcagggacatctcaggcaccagctcccccatgagccagctaagttccctccctcccttcaccaagcaccatgtgtttcctcatgtgccgaatgaagaggattagatactcaagaatggaatgagtgggtgagtgagtccttcgctgcacccaagtctgattttctgtgcgcctgctcaccccaccctgcatgttctaagcatgcttccataaggctgtgccccaccctctgattctagagtctggactgtatcagaggtgagtgcctactagaggtaacaaggtcaggaccccaaaccttgtccatcccccaaagtactgagcccccaccatgcaccagcccatgccagatgctttgcacttgtgatatcacccatcccttgacaacccagcaagttctattattgttcccattttacaggcaataacataagtgctttcccagggtcccacgctggtgacagtgagggcccagggtctgagagcccagatcgcacatgtgcgggctggtggcaggggagatggcagcaaccagactcagacatttctctgcagttgtgctgtgggctcagggtggctctttaygaaggggccccttcatggggtcatgcactcctgtgtgytttcccttgcatcatgccttgcctgtcttggcaaatatttctctggagtttacccagccagtccaaggtcacagggaagccctgtctgtgtctcacacagaaggtcaacgtccagcactgtccaaactttactcagcaaacagtcacaaagcagctcctgtgtggggggtcaggggtgggctcactgtggtctctgctgcatgtcacacattgaagcactgtgctgggggtcatcacaggctgtttaactcaattgtcacatgagcctgggtgcacaaaatggtagagcagctcagagagagatggacagacagcatgaacctctgaggagtcaggttttcttggatgaagggacactaagatggctttggagcgtgagaaggacttcacctagcaaatgtgggaaaggagtgagacctccaggcagagggactggctggagacgagcgtgatgtggtgagccatggagtgtatgggtccccacagaacttcagtctgggcctgcacagggcatgtggaggagacaaggaggagggaggtggccgtgccggcggttcagtgacagagatcctaaatgggaggccaatcctaaatgggatgatctctttcatcccaatttcagggtagtttggtcatccacgccacattccaagtgtcccctgggccctttctctccctcacccycctgtctgcacatgagtagatgcctccatgcagccctcccaggacgctcacctctatccacagatgcttctccaaaacccaccaggccctcccatggaacgagctcacctacagggtaaaatcaggtcacggtcacatatagcctgactactcccctcaggaccctcattcacagccactgtattaatttgctggggctgccaaaacaaagtgtcctcatctgggaggctgcagtagatttgctgaaattgatttgctagcgttgctgaaattgattcaagcttgattctggagcttgaatcgaagatcaaggcaagtgcagggctggtttccctgaggcctctccccttggtttgcaggtggctctcctctccctatgtcttcacatggtcctcctctgcatgtgcctgagttctaacttcctctcctctcctcatctccaccagtcttatagaattagggccccccartgacctcattctaacttaataacctctttaaagtctctatctccaaatacagtcacattttgaaatattgagggttaggacttcagtgtatgaattttgggaggatgcaactcagccaggctcactcttatcattacagctgcactagtgccatgcctggttcccagtggacaccccaggaacagccatccatccagagtgatattctgtgacatcccctacactccacagctcatcacatcacactcgtctccagtcggtctgtctgcctggaagtcccacacctgttcccacatccactgtctgggaggtccttttcatgcttcaaagccagctcagtgtcctcctttgtacaaaaaaatgtcctgacctctcagaacttcattctttctctctttctgtcgatctttgtctgaactcctctatcattttgtgcacccaggaacgtgtgacaattgagttgaacaggctgcaaaaacgaaaaagaagaaagaaatgctgagttaaacaggctgcaatgacccccagcacggtgcttcaatgcatgaaacgcatcaatgacttgcagcagaggccacactcagcccccctctgccctttgagtttttgcagctcttgccaagatcattcttgttcttagaaagcccaccattattttcctttctagccatatggattctaaaagttcctcttgtgagctgtaatcagaatgcagagaagtaatacaaggttagggcccaggactctttctcccacctctccctgcagagactcagatttttttaaaaaatgaccttggtcttcgggggaagaacttcccaccacagtgaacagccatgcccagcctacacttgactgtgcggcttacttagctcatccatccaaaggctattcctgggttgcctagtggaaatccaggcatggagctagtgcaagcacaatgataagagtgagcctggcagacactgaccccagcaataatcaggtaaacaaataaacagaactacaaactatgatgacaagaattcatccatccacagatattcactgaatggccactgtgtgcctggcactgttccaagtgctgaagaaaaatgaagaaaacaaaaatccctgcccttatagaggagacattataatgtgacaagataacataatgaaaaagaatgaagaataaaatagaaaagtaaaatggattgcatgtcacttgatgacaagtactgtggaatgaggccgtcatctaaatggagcacagaaagtggaacatggcgacatctcagccaaaagacccggcagacaccatcttggccaagggatcgaggttggcatcgccagctgtgagcagtgctgacatcttattatcttcgatatggcgtcatgagcaggctgcctcctcttggtgggatcttcccccaaacccagaacctcagtctaatcacaagaaaatgacagccaatcccaagttcagggacatttggcaaaatagcccaccactcctacttaaaagtgtcgaggtcttgaaaggcaagraaaccctgggaaatcgtctttggccggaggaaactcagcagacatgacgactaaatgcaatgtagaatcctcggacagaaaaggacattagtrggacagctggtgaaacccaagtaagtccaggctgtaccaatgtccacttcccagttctgaggaacatgctgtggtctgtccacatttacattaggagaagcagggagagcgtatatgggacctctctgtattgtttttataacttttctgtaaatccaaaactgtcttaaaatagtttttttaaattatactttaagttctggggtacaggtgcagaatatgcaggtttgttacataggtatacatgtaccatggtggtttgctgcaccccctttttttaagaaaatgtttcaaaaagaaaaacagccaagtaggggagggcacacgagtggggttgggaattgcaaaggcagaagcaggagaccagttaaggaagaaaacggggcactaagagagacaatcaggaggacctgctgcagccagggccctgaggggctccctgaggtggtgccattgaagcggagttctgagggacaatcaggtgtagacactgtgagtctcagaagtgggaaaaggggagtgctgtgcacaaaattgagagacggtgcctgtggcagcagctgaggagggaaagagaaggtggggtgggaggcccatcccttccttggccacaaggacactgagtagggtgctgagatgggagtaacagtaataataacaggcagcacttggaggctgcgtcccgtgtgtctggcactcgcctaagccctttgtgcacattggctgagttaatgcagaggtgaactgagaggcacctggggtaggggctgggggacaggaagcaggtgacatctccagtcctctccagcgtccttagagcaggtctacagtactgatccttctctgccacccttctccaagaccaccttggtgggagtaaggggctctaaggtgacaacacacacaggagccacagacacaagacacaagacacttttgactcccaggagaacctagtatgggcatccacacacccttcctgatggtgactttttatgtagacatgcagagtgcagttaaccagctgttcctgcacacatctggattgctactcacacatctgtgcacacacacacacagcctcctggagcactgtggcttctgggtggctaacacagctaccacctctggttgtgctgagctgagcacccattgcctgctggggtggggagagggcaggcactttccctgcgcgaccccgtttaaccctctctgccccactgatgtggtccctgttgtccccgatgcacagaggaagaacctgtgtcaggacccccagagcggtgtctccactaagcagaagtctctgtttctctcctggcctctcccagaggggctgctctgaagcatgtggatttgatcaggataatcaaggtaaatgatccttatcttgatccatcacaaatgttaaggtacaaggctgtggagatggagagtgggtggagtctctgctgcccggtatcctaagctgggtgatcgcaagcagacacacacatgaccacctcttgggccatgcagggggaatgaatgtaatgaggccgatgttacagggttattgaaggctcaggggagaccaggccaaaaaaaaaaaaaaaaaaaaagctatgacctgagacctccctatagcagtgtttctcaaactctgattaacgttacttgaggagcttgttaaaaatacatactcctggccctgatcagataaatcagaatatttgacacagagtctttaagctccccctcgggattcaaatgcacacagatttttggtgctttgccgcctacagtacaagagagggcaggactgtcctgttcagtgcactgtgaccyggacgctcaggcccacggaactcccctactccccctgctccctgcggtgccacccacctagctttcgtgcctgagggtggtcctcagactcctcctagaacaggcccagaggctcttagctatgtaagtattcattcctccaatcactgcagagcactcaccaggtaacaagcacgcacacccaggcgagttccccatgctcgtccccacgttgatatctcagactctacaagtcttcagctgctgcctaggactctgtaagtccttgagcttgggacccctaccacacacaagcgctgggcgtgccccacaggcggggaagtgctggccatatacacccagtgaagtgggaattccagataatgagtaactttttagcaaagtacccatgccctttgaattgtgaggtgtttttgtttgctaaatctgacaattctacctgtagggaaca

SEQ ID NO: 8740 - DNA, 33175 bp, Homo sapiens
gggaaaagcaagagatcagattgttactgtctgtgtagaaagaagtagacataggagactccattttgttctgtactaagaaaaattcttctgccttgagattctgttaatctatgaccttacccccaaccccctgctctctgaaayacgtgctgtgtcaaactcagggttaaatggattaagggttgtgcaagatgtgctttgttaaacagatgcttgaaggcagcatgctcgttaagagtcatcaccactccctaatctcaagtacccagggacacaaacactgcggaaggccgcagggacctctgcctaggaaagccaggtattgtccaaggtttctccccatgtgatagactgaaatatggcctcgtgggaagggaaagacctgaccgtcccccagcctgacacccgtaaagggtctgtgctgaggaggattagtataagaggaaggcatgcctcttgcacttgagacaagaggaaagcatctgtctcctgcctgtccctgggcaatgcactgtctcggtataaaacccgattgtacgttccatctactgagttagggaaaaaccgccttagggctggaggtgggacatgcgggcagcaatactgctttgtaaagcattgagatgtttatgtgtatgcatatctaaaagcacagcacttgattctttactttgtctatgatgcaaagacctttgttcacatgtttgtctgctaatcctctccccactattgtcttgtgaccctgacacatccccctctcagagaaacacccacgaatgatcaataaatactaagggaactcagaggctggcgggatcctccatatgctgaacgctggttccctgggtccccttatttctttctctatactttgtgtctttttcttttccaagtctctcgttccacctaacaagaaacacccacaggtgaggaggggcaacccaccccttcataacttaataggcaaagcattatccaaacagactgttcacagaaaagaaaaatattaatgactcaaattcacaaaaatatgctcaatctcactaacaaaatgcatggacaagacaattcgatgcaacactgtaatcataaaagataatcaccctctaggagcgagttaagtaaaatccatgcaatagtattccatacagttactgaaatgaatgaaataatgctttataatgatgaagataatagttaacatttactgagcacttagtatatgccaggcctgtcttaacggtttatagataaagcttatgtctcaattctattattttttctatatttttttttagctgcagaaactaacacagaaaggttaagtaacttgaaaaagattaaaactagtaagtaatggagccatggtttaagtcccagtgtctggctccagagtcaatgctcttaactaccatgaagaatctccaagatgtatttttaagtgcgtgcttggggtggttgagggtggtggtgaagaaagatgcggaagtgtttatcgtatgctaagatttattgtttttaacagtttttgcttatatgcatagacaatctttagaaggacacacaagaaactgtactccctttggattttataacatacgtatatgttaccctttaaaaagtcaagtttaagttaaagaaaacacacccaaatcattagattctcactaggattctcaatgtgaaatagaagaggcattagatttggaaatatggagtctactcctggttttcctggtggctctagtaaaaaatcacaatctctttttttttttttgagacggagtctcagtctgttgcccaggctggagtgcagtggcgcgatctcggctcactgcaagctccgcctcccaggttcacgccactctcctgtctcagcctccctagtagctgggactacaggtgcctgccaccacgcctggctaatttttttgtgtatttttagtagagacggggtttcaccgtgttagccaggatggtcttgatctcctgacctcgtgatccgcccgcctcgacctcccaaagtgctgggattacaaacgtgagccaccgcgcccggccaaaaatcacaatctgttaaaccaggagtcaacaatctttttccacaaagtgccagatagtaaatattttaggctttctaggtccaatagcttctgttgaaactgttcgactcagccattgtagtgctagaacagccaggtgatgcgtaaacaaatgagagtaggtacagctaggttctaagaacctgggcaacgaaatttgattttcatttaattttcccaagccacaaaatattcttttgattttttttttaacttaaaaaaagtaaaaacaagtttttagctcacaatctacctttggcccacgggccgtagtttgctgacacttgaaccatttgttcaatgaagggcccgattcattatgtcaaaggtcatttcctactataatattctgaaattctctacttttaatattgcgagtaaggcagacagagaaaaaatgaggaaatacatctttagttatttttaatgatccaaatattaaatcaaagtaatgcgttggggccgagtgcagtggctcacgtctgtaatcccagcaccttgggaggctgaatcaggcagatctctcgagctcaagagctcgagaccagcctgggcagcagcaaaaccccatctctacaaaaaataccagaaaaaaaaaaaaagaaaaagaaaaaaattagccggccatggtagtgtgtgcctgcagtcccagatgctcaggaagctgagatgggagaatcgtttgagcctgggaggcagaggttgcagccagctgatactgtaccactgcactccagcctgggtgatagagccagagcttgtctcaaacaaaacaaaacaaattagctgggagtaatggcatgcgcctctagtcccagccactcaggaggctgaggtgggaagattgctggagcccagggaagtcaaggatgcagtaagcagatatcataccactgcattctagcctgggcaacagacccagaccctgtctcaaaaacaaagaaaaaagaaagtaataggttgggtgtttcaaaagatttttagccttaagatccagattatttaaaaagtgaactgcctactccctttcttggactccctcctctatgagtaaaaatgtattacagcaactgtaacacatcattatccccattccactttccactatgaaacttaagacttttgatgacagggataacatctactttatctttgtaactcctgcctctaacgcaatgcctagcaagtgatacaggtatgatgcttgttcaataaataaataatacatcacacagtaatgatttccaatttactcttacaactttacatagtacttaagaagtccttaagaaattctaaaaaatcctcaccaagcagataagcagcagataaacctgataaacacttacatgctgtagtatagtggtaataacctagygtcctggctctgaggtcagttaaaacatatgtaaatcttagctctggcacttactaatcatgtctccctaaacctcaatttctttgatcctgtaaaatgggggaaattataactgcttcatgatgtaattttaaggattaaatgagaaaaaacatataaagcaagtagcataattcctggcaaatgtaagtgttcattaaacaaccacctttataacaaagtatctcaagtcatactagactcctaactggtctttcttcaagtcctgctccctcaaaaatttaatcttccaaaaagcagctaaaatgatttttttttttttgagacagaattttgctctgtcgcccaggcgctcagctcactgcaacctccgcctcctgggttcaagtgattctcrtgcctcagccactggagtagctgggattacaggcgtgcaccaccacgcccctctaatttttatatttttagtagagacggggtttcaccatgttggccaggttggtctcaaactcctgacctcagatgatccgccttcttcggctggctccctaaagtgctgggattacaggcatgagacaatgcgcccagccagaatgatcttgaaaaaccaattcgggctcaagctttaaatcctctcgtagtttcccactataatgaaaagaaagtctaaagtgctcatcttgacttacaaagctaatcatctgtcgcctccttacccctccatgttcatcttgggccattcatcctctgcccattgagcttcagatccacaagcccttcagttcctcaccccagcagtttcctttgctaggactgctctttctggcagatgactaggcttcttcctctttcagatctcaccttcttaaatgtcacctcagacaggcaggtatcctgtccgctactgtaacatcctctttaaatagcccccatcacacctatttgttgtttgttccagcccctccgcgaaccctgcctctacccgccgcatggcagctacctgggagagtgcctggagttgaatgaatgaaaatagtctgtagggtgcactgcccttgtcaatcacaagcagatttaattacctgtgccagaactcacgggagggaaacaccgtccgccagccccgctctttcctggctacagataaaagctccaggttccgggggttccggttggtgaattctggggcgacagcttcattttccacagggtccacttcaggtttcgctgccggctcggagctggttgacagggctgcgaacctgcaccctgggcaacgggaaaaaccgcacagggcttaaaaatgacggatatggacagcgcacgaacccgctctaacgtctatccgcttttacacccccaatctttaggcccgaggggacgaaaaatacgtatgcccacagggtggagtcagcactgaccccgtccttaacttcctactgtggtcttcgcagtgccgcgagctctatttcgatccggcacgtcgaatacaaaatagaacccgcacgttccaatgtactgtgcaagcccaggcgagtgagctgggagaaggggggcaagactaattaccagggttcctgcaaaccgagaacccccaaaactgcgaccgaagcgccatcgctgagacgatctcggaaaagcctcgcctctttttcctcacggacgactcagtcgctcgccaggcgcagccatataaagtcagggacaagcctttggctgctgtagatccccaaactctccacgccagacgccgccgacccggaagtagcaagtcccctgccactgagtggccaagaaggcgatctgttatcctgcaycgccaatcatcgctcacgtcgaggggcacgcaggccctggagcccaccaaccacctcgtagctacgcccaagaccacgcttgttgcttaagtccggggtcaaaggcacacaccccacaaaaccatgtttgggttttctactcggagagcttgggcggtcattgactggtccacacacaccccacctgggcaccgcgtaggaataaggcagggcaagatgcagttttctccttaaaaagggtggttgtcttcctcgaaccaaaaattttcccgtatggcccgctggaaaaactgccccgtcccacccaggttcgcgcccttaaacttacactcctgaggcctggagcaaagccggccgatctgcctcacgctccccgagcagggacaaggaaaagacactaaacctaaaacgcacgactcgctcagaaccccaactctaacttggagaagggcccgcccctccagttacaccccagctccaagctccacccttcttacaaccttttctagaaggcactagaatggcccactgcgtctgcgcaacatcgtttgaggcgaaggttcaacctcttcccagcggtccaacatccgacttccgttctccgctttcgcgcccttcccatcggctatctaattggacaaaaatgccgaccccgccccttccccggagcctcacttccgtcacagtcctgtttctctccctgttgtccctgcctctttttccttcccgccgtgccccgcggccgggccggggcagccgggaagcgggtggggtggtgtgttacccagtakctcctgggacatcgctcgggtacgctccacrycgtcgcagccactgctgtggtcgccggtcgsccgaggggccgcgatactggttgcccgcggtgtaagcagaattcgacgtgtatcgctgccgtcaagatggaggggcctttgtccgtgttcggtgaccgcagcactggggaaacgatccgctcccaaaacggtaagggcgggccgggcctgggtcgggtttgcggccggggagggccgagtcccaccgcgaccggaccccggctgccctcgtttctctcctttacctccgcagaaagggcctcggggccccgcagccggacccagcccacccgccgttctctggggcagggcgctgtggccccacttttcccacagcgaggaggagccccgccgcgcgcggcagggttttgagaccggcaacgcgtggatgtggtgtccggkgcggcgttggaaacgcgccctccgcgggaaagcgggcctcccgggctcgcacgtgcgggccacgcctcgcacccccttttgtttcagggcgaccccctgagtgtccatgttaaacgccaggtttyattttaggaccatttaccagaaaaagagtaggtccatccgcgcgccctcggatgagcccggtgccctgtccgcccgcagctgcagtcgaggtcgggcgtccggcgtccagccgtatccgggttgacagcttcttacagtagagttagcccaggaaacgccactcgagtgcattgaccccaggagacggcagcgctaacttagcagagcgtttgctgtcaggcctttggatacctacagagcttactgtttcttgatagaytcctaatttttttcgtaaacaaatctgaaagtcaccaccttccccgttgactaccgatttctctcctcacagataaagagagttttaatgagcaaaaaacttgcagaatctgaaggaaaaggctggtatagctgtacgaagtggcagagcrtgaaattggtggttattactttttttttttttccccgccatcagattccaccccgcatcaaagctgtgccaaataggctcgctttgtttagggacagggtcccacctgtcgcccagacgagagtgccatcatagctcactgcattctccaagcacaggtccgcgccgccgcatccggctttgtttttattttttgtagaaatgggtttcgctatgttgcccaaaggggtctcaaactcctggcatcaagcgatcctcctgcctcggcctcgcagtgttgggattacacctgtgagccacagtgtctggccccatttacactcttagtaggtggtttttaaataattaacacagatttgtagatttgggaaatacgggggctgttggatgtcatttacctttaggctgaaattactgtctttcagagttgtggcttatcctcatttcttttttatttttaattgattgtctacagttatggctgcagcttcgattgccaatattgtaaaaagttctcttggtccagttggcttggataaaatgttggtggatgatattggtgtaagtacacataactgttgtgttagtttccttaaagtaaaactatcttcagtgttttgctatgttctttctttgactttatcagaatccacgtactggaaggtgatattaaaggtgaacgtgtattataatggggctgtgttgatttctataagtggttcatattttttcctgcgaatttcttaggatgtaaccattactaacgatggtgcaaccatcctgaagttactggaggtagaacatcctgcagctaaagttctttgtgagctggctgatctgcaagacaaagaagttggagatggaactacttcagtggtaggtagactggctaaagaatgatcatttttctaaaaaygaccgactttcagaaagttgaagccataagtgggtcatttgtgctgtgtcagaaataagttacatattctgaatgcccagaagattgagcaagaagaaaaaacaaaagaagttacacatttaagaggggaaataagcttcttaggtacagattcagaaacaaaatttgtaagttgatagttacagctagtttgtacagtttaagtaggaaagaatttgagttcatttgacatagccccattgttttaaatgttggtattcacaagttttgagggcttatttttccttttatggcagtattcagacatcacacagatttttttatggtctctcaaaagtcttgtttcctcccccatcaccccttgagacttggaaagctctcaacttttctgattatttggaggataaaatgttaccaatctgggggagaaacaatgtttttatattattatttttaagagaccatctgtagcacagtctgaagtgctgcagtgctgtcatatctcactgcagcctggaactcctgggttcaagcaatcctcctgccttagcctcccagagtgcttgggattgcaggcatgtgccaccacaagcaactaattaaaaacctcttttttttttttttaagagacagggtctcgctatgttgcccaggctggtcttgaactcctggcctcaagtgatcctcccttctcggcctctgtagtgctgggattacacgcatgagctgcactcagcctgttctattttttaaatcctgacaggtaatctcaggaattcaaaatgggagtgtgagaaattaataaatacatcatgatatgacagtgtgatcttaccgagtcagtaaatgtgatacacagtataaactcttcatagatcatccagcatgcyggtatagtagaaacactattgtttggtgagaaagatgttaattctggagaaactagatagtttgtggggaaaatgtatttctagattaaactttagccatgaaagaatggaatctactcctaaaatatgaatatgatctttgtctaacttacgataatgtgatttaacaaatgtagttttccttccataagaagctgacagtctttttgctttaaaaatatttcttagtgttttatcaacttgaagaactatcttttttaaataaaataatagcytaatataggtcatatgaatagtcacactcggtttagcttctgttgagcattttttctaaaggtaatagatgtgttgtcttttacggttgtattgatgaactagtttcttattgctgaactagtttcttagaacatttttctggctcctacccagttttggccatttgcatttataatacaataagacctcactgaacatccacagtggcttcatggaaactgactttaagaggaaagatgatgtataaaaaaacaagttttcctccccccatcagcgttacaataaacaactgtatttgagaaattgctgtccattgttttgcttaaagtggcagtttccaagaatttatgagtaacgtggaggacttggagtgttttgtagcgttcttctcccttcacgcccaggtttctaataaccagttaattcatttcatcactaccattttggttaataatatatggccattttagtgtcattccatatgtattgcacatgttgaatatccggcacactcagaccrgtgaatgttttctcaacaggttattattgcagcagaactcctaaaaaatgcagatgaattagtcaaacagaaaattcatcccacatcagttattagtggctatcgacttgcttgcaagtaagattgtttgcattcagagaaattttttttgatgtaatagttgtaaactgtgttgtcttaacgttttgattaataactaaattttaatttgaaaaccttcaatttaaatgttttagcatttaagtagtaatatttgaagttaaaaacttggaccagtatcttttttctcatttgactaccacattttctcctaataatagattttagtggctrtgcttatgggatagattaaacttgccatgatctgaagagggagggttttttcatgtcctcctcctatatgaaatggctgaacggrtattattacttacgacattttggctctgtgttaagcatgatgaatgcaaagagtttgagtagtgactttataagcgtttttctcccccacacttttaaacagggaagcagtgcgttatatcaatgaaaacctaattgttaacacagatgaactgggaagagattgcctgattaatgctgctaagacatccatgtcttccaaaatcattggaatgtatccttgtggttgtcagataaaatttagactttttaaagcataagactttgagatgggcatggtggtatgtgcctgtagtcccagctactaaggaggctgaggtaggagtattaattgaacccaggagtgcyagtccaatgtgggcaacatagcaagaccctgtctcgggagtgggtgcgtgtgtgcgcatgtgttgcgcgcacgcgtgcgtagtagcagcagtatcaattttgtgcaataaaattttgaataaccaattttatgcaaattgatatcaatagagaggagtaatgctgtatkgaaattacytgttgccttccctgcttttttagggtgaaaaggtaataaaaagcatgtctaaaagtgatatgaattgcagatagtgataatgttgtaacattttggtgacaagtaatgcttgctkctttaatagattagattactaaaaggaagtcccttgaaattacccttgatttttcacgtgtgtaccctttgtccattccaaacctgttactgtccttaacttttggcgtagaaatggtgatttctttgctaacatggtagtagatgctgtacttgctattaaatacacagacataagaggccagccacgctatccagtcaactctgttaatattttgaaagcccatgggagaagtcaaatggagagtatgctcatcagtggctatgcactcaactgtgtggtgggatcccagggtaaggtttgggatttggtttatagaatgagattgctacagattaaaactagcttttcttttggctgggcgcggtggctcatgcctgtaatcccagcactttgggaggctgagtcaggtggatcacgagggcaggagtttgagagcagcctgtccaatatggtgaaacctcatctctactaaaaaatacaaaaattagctgggcatggtggcacctgcctgtagtcccagctacttgggaggctgaggaaggagaatcactggaacctgggaggcggagattgcagtgagccaagatcacaccactgcactccagcctgggctacagagtgagactccgtctcaaaaaaaaaaaaaaataaaaaatgtttttttgtggattatgtgcagtacatctttttgtaatttaaagcacatacaacatggtagaaggaatgtgaattaaaagaaattacgtgcatttaatgccataaaatttttctaagataaaatgcaatgaattagtctaaatttgtgtgtttacatacaatcgattataggtactctttattatgcttttaaggatagacgtattaacttaatcttatgttcaattgtaggcatgcccaagagaatcgtaaatgcaaaaattgcttgccttgacttcagcctgcaaaaaacaaaaatgaagcttggtgtacaggtggtcattacagaccctgaaaaactggaccaaattagacagaggtatgttgagagattatttttggccttttaagtgtgagtgtcttggaggactttaacatttttagccaagtcaaactattttacttccagaaaaattagcctggtggtgtttttagagggatttggggttatacaacctatatgaaaatcggcctttttgtggaattttgattgtatgagtctattaatattaaagatgtaaaagacaggaatctaatttcctcaaagcagtacagaactcagcagtatagtattgactgtaacctactgtttgctagatactggaggtgcaggtgatattagtggttggcatgccagaagagctaatggtggaggtagtgtgaccattgctatagatttgactgcctgacagtcacttaaaacaataaattgtttaggctgggcacagtggctcatgcctgtaatcgcaacactttgagaggctgaggtggcaagaatctgaagcccaggaggttgaggctgcagtgagctgtgattgtaccactgcactccaacctgggtgacagcgagaccctgtctcaaaaaaaaaaaaaaaaaaaaaatagtttaaacagtagttaaaccagacctacaagaaagctttgccaagagtaagaaatgtgytgtcatcttttaaatcagtctgcacgggtrttcttttttccttccttcctcatacaacaaagtgtcctttcttccatcaaagccagtccctctacagtaagtgttctagagtctgtttccttctgctctagagccttttctttgattcttgtttcatacttgcatcttcaactaattatgctctttcctggattcttcctgtggctcttttgtccttcaagcttcttcrtacatccttgtgctataggtactccctatcgtacatctttacaggcagatgtcatgagtggtttactacacaaaacttctctggtgcttttcttctcatcccttttcagccctgttctccatttgagggactgcatgttaaggtctctagcgtgaaattcggaagacattttcagccttcctcttacttgacctttagcaaccctttgattatgtccttcttgaaatgctttcggggatggaaggctttgtgatgctgctttgtctggaccatgtcataatactctccaggatagccyctttgttcccatgacttcatgtattatctctctatgccagagactctttcagctgtttctctaagctccaaacacacatacctctatctagtagaatgcttttcaagcatctcaaagtgaacatgtctaaaactgaacttgtgataataccgcaaatctgcttttgaccattttagtgatggggagtccttcacacaggcagaaaactaggaaatgtccttaactcctcctttttaccaacactttttctcctaatctgtcaccaagaccgcttgatttctacctccaaattaaatttacctacttttcattttcttgcctagactgttgtagaaacacacccaagctagtctcttagagaagcttttctttcttcttcaatctaaattatattctgttgtaacttcctgtattttttcttcctggggcttattacagtttttaccatgagtttatataacagtgtgtagcacacagtacttgtttagtagacaagctgcttttgaggttgatctgtaattcattttactttaaaaattcttcgaatgatctattcacatggcttcactcatattgactcttcaaatctggatctcccatagtttatggtttccatgatgtaagtgactgcctcctgggagcttcacctgagtaacagcagagacttcaaacttaatcttgtcctcaactaaactctcatttcccatcctgcccccaaaactcttgttatttattttactccaggagtcacccaagccataaaatttgacttttctgtttaggttgtctttcagcttatatctcatgttattatcttcttgtcttcagccattcagtgcagtttccacattgataatcagggaatccttttgaaaacacagatgatatactagtcttgcttagagatattaagcttagtatctagattgtttggtgtaacctgcaaggtttttcacttttctggttctrccttcttttgtgctttcaactctggactcctgtttttgtttgtttgtttgtttttgagacggagttttgctcttgttgcccaggctggagtgcagtggcacggtctcggctcactgcgacctccgccttccgggtttaagtgatactcctgcctcagtctcctgagtatctgggattacaggcgcccaccaccaggcccarctaattttttstatttttagtagaggcggtttcaccgtgttggccaggttggtctcgaactcctgacctcaggtgatctgcccgcctcagcctcccaaagtgctgggattacaggcgtgagccactgcacttggcctggactcatcttcattgtccacctcctaggctaaatttatgtcttttatgtgcttgtaatctctgcataccactttartgacacttgccctggagtgtgattggtaatccctctccccactagatccttgaaggcaggacctgtgttccctgtttaaccatagttctcaattagtaattcaaatttgggttggggagagctaagtggtaatttttaattccttcaaattttccatgaattsgactaatttaaattctggtcagagataacaaaggataatacaatttgatctrtgattatcttgtgataaatacttaatggaagttaaattatttttaaaaatcacagaaggtaaytcaggttacaaaaatactttgcagagaatcagatatcaccaaggagagaattcagaagatcctggcaactggtgccaatgttattctaaccactggtggaattgatgatatgtgtctgaagtattttgtggaggctggtgctatggcagttagaagagttttaaaaagggaccttaaacgcattgccaaagcttctggaggtatgtcttgtgctggctgtcacataaaatacttttattatccctgatcctatcaaaggtctttttacattrgaatattgacagaaaacagctcaaaaacatttatattctcttaatgctttgtgctaccaacacatttatagagccatttttcatgtaactggagaaattttgttggaaatttgtgaactgaatttgttcatttctaaaatgacagttccatcttaggataaaaggagttaccgtgtgctgcctaactaaattctaaacttgtaatatagcacttttaycacaaatgctactgagtccaaggatattaaaatcatgaaagagcaatattcacagatcctttgtaactctcttattagcaactattctgtcaaccctggccaatttggaaggtgaagaaacttttgaagctgcaatgttgggacaggcagaagaagtggtacaggagagaatttgtgatgatgagctgatcttaatcaaaaagtaagagccactttctaaaattgtaaagttataccgattttgttaagtaaaagtaggttttcttcccatttatttgctgcttgtagtctcacagtgatacgagcagttatacgcatgggataaaataacattgggccactgtaaattgagatgaagtaaccattttcatctcttctgcakggactagacattgtttctgtatagtatatctaaatatcctgtgtaggcaggacttaagggaactttatgtagacttattttattaaaatgccattttttttgagaaattgatggtcttggcaaaaaaaaatttttaaaaatgctattacaagaattgtacttttgttttgaacagtactaaggctcgtacgtctgcatcgattatcttacgtggggcaaatgatttcatgtgtgatgagatggagcgctctttacatgatgcactttgtgtagtgaagagagttttggagtcaaaatctgtggttcccggtgggggtgctgtagaagcagccctttccatataccttgaaaactatgcaaccagcatggtaagaacagtcatttcttgtcttagaggcctgagagcagtagctgtggacttcaattttttttttcccttttgtgaagtcacctaattttcttcttttcctaggggtctcgggaacagcttgcgattgcagagtttgcaagatcacttcttgttattcccaatacactagcagttaatgctgcccaggactccacagatctggttgcaaaattaagagcttttcataatgaggcccaggttaacccagaacgtaaaaatctaaaatggtaagcatggtttcccgctctttgttaacctctgcagaacaggttgcattaaaaaggatagtagtcaattacatgtcagcaaacataagtaacagacttgtcaaatacttaacatgaaaaacttcacagcaagcatttgttgttcagtcactgtaattcaagggataatgactaattattagcactggtgtgtcttcgttaactgtgattgctaatctctccctgcttcttttggtagaaagactacctacaagatctctagtctgatttaaaaatcaaccttaatacttgaatgaaatgctggagttaataggccacctaatgaaattgtaagcggccgttaaataattctttcttaattgcaggattggtcttgatttgagcaatggtaaacctcgagacaacaaacaagcaggggtgtttgaaccaaccatagttaaagttaagagtttgaaatttgcaacagaagctgcaatcmccattcttcgaattgatgatcttattaaattacatccagaaagtaaagatgataaacatggaagttatgaagatgctgttcactctggagcccttwwtgattgatctgatgttccttttatttataacaatgttaratgcaattgtcttgtaccktgagttgagtattacacattaaagtaaagtacaagctgtaaacttgggtttttgtgatgtaggaaatggtttccatctgtactttggtcctctgatttcacatattgcaacctagtactttattagtttaaaaagaaattgaggttgttcaaagtttaagcaattcattctctctgaacacacattgctattcccatcccacccccaatgcacagggctgcaacaccacgayttctgcccattctctccagtgtgtgtaacagggtcacaagaattcgacagccagatgctccaagagggtggcccaaggctatagcccctccttcaatattgacctarcgggggagaaaagatttagattgtttattcttctgtggacacagtttaaaatcttaaacttgtctttttcctcttaatgtatcagcatgctaccctttcaaactcaaattttcattttaactgcttaggaataaatttacacctttgtgaaaattcatccctgcctatcttacctcgttccttttatgccaagtaagccaatgtctttttttttttttttttttttttaccttgggaagtaatgaactcagtcctagtaactagtatttctttaactattacccacatggccaacacctagaagatactatcttaaaattggattgtgaaattcactggtaagctctcagggttacttgtgcatctttaccttctctgggtttaatccaagttctttaactattgcagcagagacagctgcaaaggcttcattgatttcaaatatgtcaacatcttccagtgaccaacctgcttttgtaacctagaggaaagattcatagaaaagaggtctaaacttgggtggaaaggctaaagttaaaccattctttgtcaacataaatatatgctgcatgatactggtaactgctastttggtttgttcttaggttaatacagtgacattctcacacatttttgccttagtgacatccattccatccaaaaggttaagggtgtgatctaaaagatcccttagaaattctaaattgtcttaaaattttgaaccagtagcatctgttaygtgtacctaaggctaatgtaacagaatcagttcccctagaaagcatgtgatccaaatgctctcagtggctgggggtagtggctcacacctgaaatctcaacacttggggagcctaaggcaagaggatcaattgaactcaggagttcaaaaccagcctgggcgacatagaccttgtctctacgaaatgaagaaggcktggtgcacctgtagttcgaggtaatgggaggctaaggcaggaggaatatttgagcctaggagttttgaggctgcagtgagctatgatggtgccactgcactccagcctggacaacagagcaagaccttatctcaaaaatagaaataaatgctcttggttactcttctggtagggaaagactagagctaactacatgaataagctcacttaaggctaacaggaagacaaatttcataaaagggaatarggttatactcacagcttgctttatggctggaattggtcctattcccataatggaaggctccacacccacttgggaccaggaaactatccgtgctaaaggtgtaagyccacgtttatcagcttctgacttcttcataagaacracagctgcagcaccatcatttattcctgtaaaatatgagtgacttaatttctaccatgcttattaacctcagttacatatctgtggcttctttaccacctgaagacatgagttaaatgattttacctgttggctaaggcatttactataattcaacagactttacatagaaattatgtttggcaatatattgaccacaaaactttccaactagagaaagtggtaggattacagtagtcggggctgggcgtggtggctcacgcctgtaatcccagcactttgggaggtggaggagggtgaatcacctgaggtcaggagtttgagaccagcctgaccaatagggtgaaagccatctctacttaaaatagaaaaatcagccggtgtggtggtgtgcgcctgtagtcccagccactcaggaggctgagacaggagaattgcttgaacctgggaggcggagattgcagtgagccaagatygcaccactgcactccagcctgggcgacagagtgaggctccgtctcaaaaagaaaaaaaaaggattacagcagttggggaggggagatctctgacaggaaatggaagaataagcctgggcttcacaaggaggtattgggagtttctggtactggaaaaatacaaaggtagataaactgaagttccctaatttacttcttcatttgtatgtctagttgggatgtcaagaaaccaaattaattctttcagtataggttaagtcaatgatcaaatacagagaaatgacatgtttccttmaactgttttaagrataattttgtacataaatattgagttgggtgtggtggctcatgcctgtagtcccccagctacttgggaggttaaggcagggggctcacttgagcccaggagtttgaggctgcaagtgagcaatgatcatattgctgcacacgaacctggctggcagagtgagtccctgtcccaaaaaatagtacttttgtatataaataaagagaaaaatattcactcggtagacattatagaacatagtattcccccagatgtccttcagaaaatctaacctgaagcattggctggggtgactgttcccgttccatcagtaagaaagtaaggctttagcttggacatggcttctatgttgctcccatggcgaggaaactcatctgttttaacttcaataagacctaagcaaaggaaaaccaattactcaagattagtccagagacagaagtaagtgtgctgggaatggtgggttctctgccattaaacatgaggattcatatttagcagaaaagttttaatatgtgaccactttgatgacaacaggaggaaagtacacacaagaattattgtacatgaaaacaatttatgagtatgtccttatgagacacctgtgttttccaaatccataggccttcctgaggaaagtagctaccagggacctgtttgtgccaaattctgctatagtttgggtcatagtacttggctggttacgagtgagtggatcaggcagtctcaragccaatcgtgcactgctggcakgacataagagatatcagttatcaataagggagcttgacgggagcattctgtattagaaaatagcgagtgaccccaaaagatccaccctttagaaatgtgaaatggagatcacacagaaacagcgagaagtaatgggtgtccacttctgaggaggttgagcctatacaggaaacaggtcagctggtgcctcctaacaaccatgagccagtgctccagcttctcatgaaacctgctgtgtgtgcacagtggtcatggacgctctggaaccaagagtgcttgagtgctgacataggtcccatgttaccgtgtccygtaaacccagcataccccctccccacattcatgtatccaggacatatayttgcaacctgaaaaacataactaagatataatttctaaagattcctatgtattactcttttagatgttactcttacctataaataggttgatgtttaaaccactatgatatactcacctyttctagttgacaccaaaactggtacaatctctttgtcaaaatggccagctttctgtgcattctctgtcctgttctgggacagaactgcaaccttgtcctgatcttctctactcacttgccattttttggctacattttcagctgggaaaggagaaaaacagcaaaaaactaacattttcatgaactggcatttgatagctcaagtcgtccacatttgaccaagcactgactgaccacatatgctagcaggctcatggtggcctgtgcaatgctctgtgtggggtggccctgcctgccactggcagttggtttggaaatgttgcagtgactctcaggagtcatacttctctccttccctttctatataattgtaaacttacagaaatttccttcacccagagtcaccatttatattttccctccatttgctttaatattttctttctgaaccatctgagagaaagttggagatacaatgccttcttactcttaaattttaatttcagtgtatacttccccaaaacaaggccactttcttacataagcacagttataaaactcaagaaattgggccaagtgtggcggctcacacctgtaatcccagcattttgggaggccgaggtgggaggatcacttgagcccaggagtttgagaccagcctgggcacagcgagaccctgtctccattaaaaataaatttagccgggcatggtgtgtgtgccatgtagctagtagtcctagctgcttgggaggctgaggcagaaggatcacttgagcctargagttcaaggctgcagtgagccatgattgtgcctctgcactccagcctgggtgaccctgtctcacaaaacaaaacaaaaatcaggaaatttaacatgaatcaaacactattatctaatccttggtccacattcaaayttcacctatatttcagtaatgtccttctagctcctttatttgagccaataaagaagcatgcattgtacaactatcaatctctctagtttgcttttgtctgtaacagttcttcagactatgcttcttaagcttgatatttttgaagaacatgggcgagttcttttgttaagggtcatcaattttgatttgtctgatgtttcctcagaattagattaagattctgccaaaaggcaggtataccactgaatgatagtatgatttttctcagtgagtcttattaggacacaaatgacaatcagtttatcccaggtgatgttatctttgatcacttggttaaaatggtttggtattcaccaggtttctagcttttaaaggtaccattttttcatttataagtaatcaataatttatcagaggttctttttggattatccaaatatcttcttccccatcatattttcacccactagttttagcattcattcatgactttctaactccaacattccttctattggtaagatattaattggcattttaccayaaagaaaaccttttccttttctcccatttattcagttatttatatcaggatggactcatacattttcattttattgaataagttataactcattactytcattacttactttgatgctgaaatttttcaatacttgggcagttataacccattactatcattacttatttgcacgctgaaattgttcaaaatttaggcagttacaacccattactatcataacttatttgcacgctgaaattgttcaaaatttgggcagttacaacccattactatcattactgactctgatgctcaaattgttcaaaattccactacaggaaagtggaagccccgtaggctgcctcctgtgtgctttcaacatgtccctgagcatgtccttaattttttagcattttttccctagccttggaaagggccatttctccaaacaaccttagttccttttagtggataaatgtatttagaagatctgggtgtcaggactgcttgttgttactggtttgtcattgtttctaggtctgttcagtagaaacttccatatgtattatttataattttacatatacacacacactcatggtaacaccttgagttcatactgcattttgagttctccaaaatgcaacctaacaccacaagctacattcttctccctttccgtatttgtaactctcttctacaaatgtgagaattggccaggtttggtgggtcacacctgtaatcccagcactttgggaggctgaggtgggaggatcccttgagctcaggagtttgaggccagcctgggcaacatggtgaaaccccatttctacaaaaaatacaaaaaattagccaggcatggtggtgagtacctgtggtcccagctactcaggaggctgaggtgggggttgcagtgagccaagattgagccactgcactccaatctgggtgccagagtgagacccgtctccacacacacacacaaaaaagttattgctttgctttctatgtcttgtctttacttatcaagctgtttttctttctttttttttttttttgttggatgatgtctcactatgttgaccaggctggagtgcagcagctactaacaggcaaaatcaaccatagtatactatacaacctcaaactgctggcctcaagtgatcctcccaccacagcctccctrgtagctgggactataggcacctgccactgcaccctgtaaaagctattctcttatatatacttctagaagctttacattttttgcttttatttttaaatccatgatttatctcaaattagcttttatatagggtgtgaggtagggatctaggttcatctttcccatgtgagtaatctgttattccagcaccatttgttgaaaagactttaatttctccatttcattccattgatgcctttgttgaaaacgagcataagtctgggtctatttctgaactctgttctctttctctgtccttatgccaaaaccacattgtcttgtttacaacagctttataggtaatgttaaaatcagagcatgtaagtgctattttctgacttcaaaattgttttggctattctgagtgctttgcattttatacagtatttatttacactatttatttatttatttagagatggagtttcattcttgttgcccaggctggagtgcaatggtgcaatatctcagcttactgcaacctccgcctcttaggttcaagcaagtctcctcccttggcctccagagtagctgggactacaggcacctgctgcaacacctggctaattttttgtagttttagtagagatggggtttcaccgtgttagccaggatggtctcaatctcctgacctcatgatccgcccgcctcggcctcccaaagtgctaggattacaggcgtgagccaccgcgcccggctggaagctattcttttgttgttgttgttgttgttgtgtcactatgttaaccagactggaatgcagtagatactcacaggtgcaatcatagtagactatgatagcattgcccaggctagactcaaactcttggactcaagcaatctcttgcctcagctcttgagtaggtgggactacaggcacataccaccatgcctggctcctttagtatttcttgtagtgtaggtgtgcaggcaattcattttccttcatctaaaaatggctcttcactttcactcttgttttttttttttttgagacagagtctcactctgttgcccagactggagtgcagtggcatgatctttttttaactttttgctacaatttgctaaggtgtaatttttcccttgtctatcttggtctttgaacttcttttcacaccaaatgtggaaattttcttcagtttttttctgccccattctctctcttccttatgtatgagattcctattccatgcatgctagtcctatttattttgtcctgcagaccaccaaggctctgttcatttatattttatttttttgagacggagtttcattcttgttgctcaggctggagtgcaatggcgtgatctcagctcaacgcaacctccgcctcccaggttcaagcgattctcctgcctcagcctcccgagtagctgggattacaggcatgcgccaccagcctggctaattttgtatttttagtagagatggagtttctccatgttggtcatgtgggtctcaaactcccgacctcaggtgatctgcctgcrttgacctcccaaagtgctgggattacaggcatgagccaccacacctggcctattttttaatttaatttaatttaatttaattttttgagacagagttttgtttgttacccaggctggagcgcaatggtgtgatctcagcttgctgcaacctccacctcctgggttcaagctattcttctgcctcagcctcccaagtagttgggattacaggcatgggccaccacatccagctcatttttgtatttttagtagagacagggtttccccatgttggccaggctggtcttgaactcctgacctcagatgatctacccggcttggcctcccaaagtgctgggattacaagcgtgagctaccgtgcctggcctgttcatttattcttcattatttttctctgtgttcttcaggtcgtgtatatgatctatcttcaaacttcctgaccctttttcttctgtctccaagatgctgttaaggccattcagaatttttttttctttttttttagagatgaggtctaactatgttgctcagcctagtctcaaacccccagcctcaagtgatcctcccacctcagcctcccaaggtgctgggattacaggtgcgagccaccatgcccggccccatcccagtgaattcttaatttcagattgtgtactttgcaagttctagaatttctatttggttcttgtttatattttttccttttactcctgagatgtccacatctattcctctatgaagattatattttcctttgtatctttaaacatatgtaaaatagagcctttaagatcctcatctgataattctagtattgcagggtctgttgactgttgtggtttttttccaccctggttgtaagctatattttcctaattctttgtgtatctagaaagttctcattgcatgctgaacattatagttgctacataactggacatagagattttattatctttagagaatatattgagttttgtttccacaagcagtcaaaatactggcaaatcaccttgatccttttgaggcttgtttttaagcttattagtttgggtctagagtagcttttactctatggctttggccctacccctaaactgtggtctttctgagatgtcaatggagtgtccaaggagttcagtaaggtttccactcgcttgtccagaacttttatctcctagtaatctataaaatctccagttcacctctcctttgcagctcttttctactaggccttgtaagctgttatctacaagcttagtatttgatcaaagacttaaggggaaccttttgcagatttctggagctctttttttcttctcccccttattctgccccacaaactccagccatctcagaagccccaaattctctgcttcttcagatcactgagaccactgtttccagcttaggctctgcctctccataacacagtttgggaagtgccctgggtagagacagtgacagtggggttttcccttctctcaaggatctcagtcttacatgagtattagtcaaaacctgacatacataaaacagtggctttatatattttcacaagttttatgcttgtttatagtaggaaatctaatctttgtcaattactccatcatgacctgagccttttttcttttctttttttctaaagaagagcaatttattttcttacagttctggaggctggaagagtaccattcaatccacagtacaccttggaaagggctcgggatctgaatttttaatgaccacctctagttatggttgaggcagttggtcacacagtgtcttccattgtctgcctgtgtttttatagccttctctgttgtggctgtaagtcgagaagtggtcaagatgccttgagcttctcattgcttcccatatccctaagcccttccttccttcctagcattcatgcacacagttccctcttggaatcttgtacttttccccattacctttttcacatatttatgtgttacataaaaccagagccattgctgcatgcatttgagcaaggtgcttaacttctcagggtttgattctttaactctaaaatgtctattctgtttcttaagttttacatgtatactaaagacaagagtgcttttgatttcccagttgctttgccattaaacttagaccacaggacccttcagcatgaatgaccaataacccaattgtgtagtacaaaaagtacagctaggtaccaaaaaaacaactggtttatctctgtcactacctctgccacagaagcactatttgtgggccctgtttcttcatttggtaaaatgaggggttgatccagaagaactctgaggtacttcccacttctaacattctctgataatcaagagttcacaaagaagagaatacttacttcacttcagttaatcaaagaagagatataaaaatccttaagacagtctctggccatamggacgaaagcacctaagaagcagattagtatatkgtctttttaacctttttaaagctaatacagtttcagccatgtctgccttacctgtaatacccatatgacagttgtgaaatgcatctgtaagaccatcacagagtatactgtcagtcagtggcatctcacctatctttactcctgttctcaagtaagccaagtgaggagcctagaagtcagaaataaaaatggatttaggcttagttgcaattagtcttctccccagaatacaactcaaaactatctagtatttcctaagtcttcatctaggcccctttgcagcccttctccccagttctaggtcctcagccaggccaaggtctaaagacccctggaattagcagacttcatctttcctattgttgggaacgattactctcctacctacccattttcaattctccctcaaacctacccattctgtgtcctgtttccttaagaattccatttattctttccatcgaggcaattaattatctgttaaatgaagaaatcctctaagggcttaagtaaagctaacaatgtgttacctatttcaatggatgacataatgtctacagtgagaataatcaggctaactaaatgatggggagggatttctgagtagcggccagtcttaactctcaccaactcaacagcaggtatattagaatggaaagagtcattgattggacttagagtcggaagagttgtatttgaatgctggctctggtcctcagtttccttacctgtaaactgggaatggtatcatctaccctatatggggctgttgtgaacacatgtacaaaagcacctggtaaagtactacacagatgtcagtgtcatcccatcaaaatcactccgattatttttgttacctttagcctgcctcctcctgaacctcagcaatggctgggctgaatcagcttctatctagggaatctgcacctcagcccctgagctgcatcagtaggaagcagggggtatagtttttctttcaaccactatgccagtttgaggtatggaacttggtgaaacaaatcatgcctggcaaacctactggagaagggcaccacttggtggtcctcttttacatgttctataccctgaaaaggtcaaaaagtctggtccccaggatctccttgtcatgtgcaggaaggtaagtggcaacatctgttttttgccttttactcacaatgggaaagaaatttaaaaccaaggacatcaagcaactaatatgaatttaattcagaaaatattacatgcttcattaatagtttagaaaaagtatattcggttccaatcacactggttgataaacttcttatcaacccggatttcccacccaaactgaagaatacttcacattcaagtagggatcaaggttgtcatttctgtttatttgttcactgtttggttccagctctgctatgcatctgtttactctgttctggcatagacatgagtttctcagtgtgaggtcagtgaaagccacctcatcagagaggccttaccttgctcatattttccatgcctcctgcaaccacaatgctggagtctcctatccctattgactggactgcaaggcacacagcttttaggcctgacccacagatcatctggcagctccatgctggaacagagtagggaattcctgcacccacactggcttgtctaacaggattctgcccacagcctagaaagaggaacacagaggactcttagcaatcaaggagaaagacaaaatgtcacagtgaaagtgtgtggaaaattgccagttgggttacctgccacttctgaaagcctacaggtcaagtaagtgcccactggaggcaaaaaggcctgtatacactctccacctgtcacagtctagcccttgaatatatactgccttgtgctgctctgtaggtatttcatagatataagctttctcctccataaataagtcattaatacattaagaaagaagtgtcatcctcatcttttgatatggcttaaatagttgggcgcggtggctcatgcctgtaatcccagcactttgggaggccaaggagggcagatcacctgaggtcgggagtttgagaccagcctgaccaacatggagaaactctgtctgtactaaaaatacaaaattagctaggcgtggtggcgcatgagtgtaatcctagttactagggaggctgaggcaggagaattgcttgaacctgggaagcggaggttgcggtgagctgagatcacaccattacactccagcctgggcaacaagggcgaaactccgtctcaaaaaaaaaaaagtgcgggggggtgcttaaataagcattatcaaacctatgtctaataaacacaggatataacctaggcattatcagtgtttctaactagggccatttgctcccaagatcatggcttaagacacttgagaagaaaaagggttacttaaaaaggaaaacctttgataataagcagttctgttcttgcttagtattcattacactatgcttaaatggttatataacaaaatatatacaaactcagaattcacaaatacctttttttctcattctgagtactgaaacacaaatatcttttcataattcaactatgggacttcctttagttgggaagaaatacataatttacttaaagtagcacagaagagaatggagttaaaagtttcaaatattctcaatcgccattgtctgttatcagagtcaatggtaaatgtttataaagtggttactctattcccagtttcagatatactcaaacctaccacccttccttggagagtttgtggggaagaactagcaaataagtcgctgataaaaacttagagattatattcatcacaatgttatcaatctgggattaggctggaaactaaaaacgggtaaggttacttgagactgaaaacatatgcaggatcatatacatattaaaaagacaggcccagtgcggtgcctcaggctgtgagcagtggctcacacctgtaatcccagcactttgggaggccgggggggggggcgcattacttgaggtcaggagtttgagaccagcctggacaatatggtgaaaccccccctctctactaaaaatacaaaaattagctgggcatggtggtgcacgcctgtaatcccagctactcaggaggttgaggcaggagaattgcttgaacctgagacagaggttgcagtgagccgagattgtacggctgcactccaccagcctgggcgacagagtgagactccatctcaaaaaaaagaaaaagaagaaatgaggtacagggctgggcatggtggctcatgcctgtaatcccagcactttgggaggccgaggcgggtggataacttgaggtcagaagttcgagaccagcctggccaacatgttgaaaccccatctctactaaaaatacaaaaattagctgggcacagtggcaggcacctgtaatcccagtcacttgggaggctgaggcagaagaatcactggaacccgggaggcagaggttgcagtgagccaagattgcgtcactgcactccagcctgggcaacagagtgggactccatctcaaaaaaagaaaaagaaagaaatgaggtgctaacacaattaataatgctagcatttagcatactacgagcttcatgagaatgagaatttctatctgatatgaacattgcttatctccagctgctaaaatagtgcctggcacaaagtaggtgctcaataaacatttgttacatgattgtagaaggtatctggctcaaggaataggacagatctaagttcaagtgctagctccacttcaaactgtgaccctggtaagtcatttaacctcttaaactctcatttattcatttgtaaaatgaagataataggatataacagacttgtgaggaagattaaatgaggtaatgaaaggaaagcatttagcacagtgctttaaaagccttaaacttagtagacatgcaccggtagtcccagctagctcagaagttcaagggcatggtgcaccatgattgtgcctgtgaacagccattgcactcacgcccaggcaacagacagactccacttctacaaaaaaatttaaaaaattagccaggtgtggtggcctgctcctgtaatcccagctactccagaggctgaggtgggaggataccgtggagcccaggagtttgaggttatagtgggctacgattgattacaccactgcattccagcctggacaacagagtgagaccctgtctctttaaataataataataataattaattaattaattacgagtgttcaaacccaaagaatcagaagatgggggcactctcaggactcagctatattcctctggggagtgatatgccccatttgcaaggggcatgatgtggcacctattttccaagctcagaactgagccctaagagggcagggaacttacctgtattgttggaaccatactcccagcactaagcacagtatggggcacataggaggaactgaatacatttttgttgaatgagtgacactttgaggtagtaaggaggagcaggcatactttcctatgcgtcaggctggccctgctgctgcttcttcttcttctttttaaaaggagtctcactctgttgcccaggctgaatggagtgcagtggcacaatctcagctcactgcaagctccgcctcccgggttcacgccattctcctgtctcagcctcccaagtagctgggaatacaggcgcccgccaccacacccggctaattttttgtatttttagtagaaacggggtttcaccgtgtcagccaggatggtcttgatctcctgacctcatgatccgcccacctcggcctcccagagtgctgggattacaggcgtgagccaccgggcccggccggccctgcttcgtaagaatgaaaaggcagtgggccgcctgtagtcccagctactcgggaggctgaggcaggagaatggcgtgaaaccgggagacggagcttgcagtgagccgagatcacgccactgcactccagcctgggccacagagagagactccgtctcaaaaaaaaaaaaaaaaaaaaaaaaaaaaggaaaagaaaaggcagtgtaggtggtgtaggtcagtggtctaagttcattcacaaaaagcatattaatgaagctaagtctttttgtttgtttagagaaggggtctcactctgtcacccatgacggagtgcagtgacacaatcactgcagtctcaaactcctgggctcaagtgatcctcccacctcagcctctccagtagctgggaggcacaggccatcatacctggctattttattttttgtagagacggggtcttgctttgttgcccaggctagtctcaaacttctggactcaagtgatccttcctcctccgcctcccaaagtgctgggattacaggcgggagccaccctgcctggccaagaagctgagtctcaagctggatagaagctactgacagggctggaagaagggggccaacaggaggaatcataacagagggaactctgagcaaaagcaaggaggcaagaacttgagtgagtgagagagtgtgtgagtgtgtgagagtgtgtgtgtgtgtgtgtgtttatgggctgtttctaataagcctgacttctcctggaatcactgagacttacctgctgccaagacatgtccaaagatgacctcagacacatcttccggagccacagtggccctcttcaagacttctttgatgacagtggagcccaggtcctggacaggaacagcagctaaggcaccattgaaggaacctacaatagaaaggcggagagcgtggacatcacaagcctgcgggtaatacgggaaccacctacgagcaggggagcctcatgaccctgtttggcaaggccacgcgaggaggcagtgccctctcctcccacacgttcctacacctgctggtctgagcaaaggtcaaggtgggtgccacaactcgcagcagccgagggctggacaggcgacctccagaacggcctagggacgccgctgtagcccttctatttccccaaatccgaaggactggatgcgaccccatgcttcccaaacaaaaggaaccggcgggtcaagggcgttgaaaaccatgcggcacgaaggagacgaagtcacgacttctagccattgtgtgacagcccgaccccagcccaaagccgggctcag

SEQ ID NO: 8741 - DNA, 12648 bp, Homo sapiens
tggatgacataatgtctacagtgagaataatcaggctaactaaatgatggggagggatttctgagtagcggccagtcttaactctcaccaactcaacagcaggtatattagaatggaaagagtcattgattggacttagagtcggaagagttgtatttgaatgctggctctggtcctcagtttccttacctgtaaactgggaatggtatcatctaccctatatggggctgttgtgaacacatgtacaaaagcacctggtaaagtactacacagatgtcagtgtcatcccatcaaaatcactccgattatttttgttacctttagcctgcctcctcctgaacctcagcaatggctgggctgaatcagcttctatctagggaatctgcacctcagcccctgagctgcatcagtaggaagcagggggtatagtttttctttcaaccactatgccagtttgaggtatggaacttggtgaaacaaatcatgcctggcaaacctactggagaagggcaccacttggtggtcctcttttacatgttctataccctgaaaaggtcaaaaagtctggtccccaggatctccttgtcatgtgcaggaaggtaagtggcaacatctgttttttgccttttactcacaatgggaaagaaatttaaaaccaaggacatcaagcaactaatatgaatttaattcagaaaatattacatgcttcattaatagtttagaaaaagtatattcggttccaatcacactggttgataaacttcttatcaacccggatttcccacccaaactgaagaatacttcacattcaagtagggatcaaggttgtcatttctgtttatttgttcactgtttggttccagctctgctatgcatctgtttactctgttctggcatagacatgagtttctcagtgtgaggtcagtgaaagccacctcatcagagaggccttaccttgctcatattttccatgcctcctgcaaccacaatgctggagtctcctatccctattgactggactgcaaggcacacagcttttaggcctgacccacagatcatctggcagctccatgctggaacagagtagggaattcctgcacccacactggcttgtctaacaggattctgcccacagcctagaaagaggaacacagaggactcttagcaatcaaggagaaagacaaaatgtcacagtgaaagtgtgtggaaaattgccagttgggttacctgccacttctgaaagcctacaggtcaagtaagtgcccactggaggcaaaaaggcctgtatacactctccacctgtcacagtctagcccttgaatatatactgccttgtgctgctctgtaggtatttcatagatataagctttctcctccataaataagtcattaatacattaagaaagaagtgtcatcctcatcttttgatatggcttaaatagttgggcgcggtggctcatgcctgtaatcccagcactttgggaggccaaggagggcagatcacctgaggtcgggagtttgagaccagcctgaccaacatggagaaactctgtctgtactaaaaatacaaaattagctaggcgtggtggcgcatgagtgtaatcctagttactagggaggctgaggcaggagaattgcttgaacctgggaagcggaggttgcggtgagctgagatcacaccattacactccagcctgggcaacaagggcgaaactccgtctcaaaaaaaaaaaagtgcgggggggtgcttaaataagcattatcaaacctatgtctaataaacacaggatataacctaggcattatcagtgtttctaactagggccatttgctcccaagatcatggcttaagacacttgagaagaaaaagggttacttaaaaaggaaaacctttgataataagcagttctgttcttgcttagtattcattacactatgcttaaatggttatataacaaaatatatacaaactcagaattcacaaatacctttttttctcattctgagtactgaaacacaaatatcttttcataattcaactatgggacttcctttagttgggaagaaatacataatttacttaaagtagcacagaagagaatggagttaaaagtttcaaatattctcaatcgccattgtctgttatcagagtcaatggtaaatgtttataaagtggttactctattcccagtttcagatatactcaaacctaccacccttccttggagagtttgtggggaagaactagcaaataagtcgctgataaaaacttagagattatattcatcacaatgttatcaatctgggattaggctggaaactaaaaacgggtaaggttacttgagactgaaaacatatgcaggatcatatacatattaaaaagacaggcccagtgcggtgcctcaggctgtgagcagtggctcacacctgtaatcccagcactttgggaggccgggggggggggcgcattacttgaggtcaggagtttgagaccagcctggacaatatggtgaaaccccccctctctactaaaaatacaaaaattagctgggcatggtggtgcacgcctgtaatcccagctactcaggaggttgaggcaggagaattgcttgaacctgagacagaggttgcagtgagccgagattgtacggctgcactccaccagcctgggcgacagagtgagactccatctcaaaaaaaagaaaaagaagaaatgaggtacagggctgggcatggtggctcatgcctgtaatcccagcactttgggaggccgaggcgggtggataacttgaggtcagaagttcgagaccagcctggccaacatgttgaaaccccatctctactaaaaatacaaaaattagctgggcacagtggcaggcacctgtaatcccagtcacttgggaggctgaggcagaagaatcactggaacccgggaggcagaggttgcagtgagccaagattgcgtcactgcactccagcctgggcaacagagtgggactccatctcaaaaaaagaaaaagaaagaaatgaggtgctaacacaattaataatgctagcatttagcatactacgagcttcatgagaatgagaatttctatctgatatgaacattgcttatctccagctgctaaaatagtgcctggcacaaagtaggtgctcaataaacatttgttacatgattgtagaaggtatctggctcaaggaataggacagatctaagttcaagtgctagctccacttcaaactgtgaccctggtaagtcatttaacctcttaaactctcatttattcatttgtaaaatgaagataataggatataacagacttgtgaggaagattaaatgaggtaatgaaaggaaagcatttagcacagtgctttaaaagccttaaacttagtagacatgcaccggtagtcccagctagctcagaagttcaagggcatggtgcaccatgattgtgcctgtgaacagccattgcactcacgcccaggcaacagacagactccacttctacaaaaaaatttaaaaaattagccaggtgtggtggcctgctcctgtaatcccagctactccagaggctgaggtgggaggataccgtggagcccaggagtttgaggttatagtgggctacgattgattacaccactgcattccagcctggacaacagagtgagaccctgtctctttaaataataataataataattaattaattaattacgagtgttcaaacccaaagaatcagaagatgggggcactctcaggactcagctatattcctctggggagtgatatgccccatttgcaaggggcatgatgtggcacctattttccaagctcagaactgagccctaagagggcagggaacttacctgtattgttggaaccatactcccagcactaagcacagtatggggcacataggaggaactgaatacatttttgttgaatgagtgacactttgaggtagtaaggaggagcaggcatactttcctatgcgtcaggctggccctgctgctgcttcttcttcttctttttaaaaggagtctcactctgttgcccaggctgaatggagtgcagtggcacaatctcagctcactgcaagctccgcctcccgggttcacgccattctcctgtctcagcctcccaagtagctgggaatacaggcgcccgccaccacacccggctaattttttgtatttttagtagaaacggggtttcaccgtgtcagccaggatggtcttgatctcctgacctcatgatccgcccacctcggcctcccagagtgctgggattacaggcgtgagccaccgggcccggccggccctgcttcgtaagaatgaaaaggcagtgggccgcctgtagtcccagctactcgggaggctgaggcaggagaatggcgtgaaaccgggagacggagcttgcagtgagccgagatcacgccactgcactccagcctgggccacagagagagactccgtctcaaaaaaaaaaaaaaaaaaaaaaaaaaaaggaaaagaaaaggcagtgtaggtggtgtaggtcagtggtctaagttcattcacaaaaagcatattaatgaagctaagtctttttgtttgtttagagaaggggtctcactctgtcacccatgacggagtgcagtgacacaatcactgcagtctcaaactcctgggctcaagtgatcctcccacctcagcctctccagtagctgggaggcacaggccatcatacctggctattttattttttgtagagacggggtcttgctttgttgcccaggctagtctcaaacttctggactcaagtgatccttcctcctccgcctcccaaagtgctgggattacaggcgggagccaccctgcctggccaagaagctgagtctcaagctggatagaagctactgacagggctggaagaagggggccaacaggaggaatcataacagagggaactctgagcaaaagcaaggaggcaagaacttgagtgagtgagagagtgtgtgagtgtgtgagagtgtgtgtgtgtgtgtgtgtttatgggctgtttctaataagcctgacttctcctggaatcactgagacttacctgctgccaagacatgtccaaagatgacctcagacacatcttccggagccacagtggccctcttcaagacttctttgatgacagtggagcccaggtcctggacaggaacagcagctaaggcaccattgaaggaacctacaatagaaaggcggagagcgtggacatcacaagcctgcgggtaatacgggaaccacctacgagcaggggagcctcatgaccctgtttggcaaggccacgcgaggaggcagtgccctctcctcccacacgttcctacacctgctggtctgagcaaaggtcaaggtgggtgccacaactcgcagcagccgagggctggacaggcgacctccagaacggcctagggacgccgctgtagcccttctatttccccaaatccgaaggactggatgcgaccccatgcttcccaaacaaaaggaaccggcgggtcaagggcgttgaaaaccatgcggcacgaaggagacgaagtcacgacttctagccattgtgtgacagcccgaccccagcccaaagccgggctcagaccacctagcagttccgcccctgccgcaggcattaccgatggcgcctcccggagccggccaatcaggggccccggaggagaacacctccctacgccamccaaygggagaggcaggccacgcgatggctctaccccgggagccaatccaagcacgagggacggagtacgcacatcgggagaggagagggtggggctgtagcaccaggtcagggaacgcgggagccgcagggttccagggatcccgcggctcctcgcggcttggcctgaccggcttcctccacatacgcccctctcctacacaagtccggccctcggcgctcctgccgaagcagcaggcgcctcggactctgcgcggctcccgccggccactcacctatgatggtccgcgccgccgagacgatgaccacaggatctgagcctgcattcatcttgcttctcctgccgccgtctgccctgcgctgcctgcaagctaggcaaagctcctcctcgcagcccacaggcctgccgcgggcgggacctgaggtagccccgcccctcgccctccacctccccgcgcaccacctccccgcgcatcccactgtgcgcaggcgcaaggccggagcaggggcgggcggaggcgcgcggggcgcggggcgcggggcgcggggcggaagtgaggccggggcgcggggcgcggggcggaagtgaggccggggtctgggcytgcgggcagaaccgcggacctcggacgcatttacagagcgcctgaaaccccagtgtttctggacaccccaatgttggagttccccgacttgacgtyttgggcttttttttaaaaaatcttagggtttctcgaaacagtaaagactggggggtgacaaagacttatctctcgttcagctcaggactggaatcccacgggcgagaatctcgagtgcgagcccggcccgcrgcgggtctcagcacagctctgatgggtccttttgctctcggcggcttcgggaggtcctatgcgtttctcctggcgccagtcattcgctcgcgtgaggggcttgctaggagcgtctcggtgcgagccccctgccttctaagatcaactctggctgtgaacgggtgaggacgccgggagcgtcttagcgtcacaaaagttcctttggttgacgtttggacagtgaaaggagcatgtaacaagtggggtcagttttgtttaaaaccctttctgacttcccagcctcttactgggcaaagttcataatttttctgagctttctagggtttccaggcaagcttatgaggggccaccgttacagcaacttgttgggaacacctggatagtggaacaagaaagctttgtcacaaagtcatgaaggggaaaactgttgacggacctggagaatcttcctgaagaactttaaagttgattgaaagaatcattaaatcctggaaacctacattaagactttgcagagatatgcggatgggtcagataaatcagagaaggtaaagagtgtaggccccagaggtggggcaatagagaaggaaaaaaattgcataacagtgcaatttcaggagaaatctttagggtctggaatagtggtgaaatcagctgtctactctgctaagaactcagcagcacactgaagtctcttcagttgtcttcaatgtgtttcctgtcccctaacatatctgagtccaaggaattcaaggaatgcctcccgtggcttttgctctattctatcccattttccccttactccctggccacttctgagtctttgtgggcttactctcacatccccttaacatgttccccaaggctcctactttgcaccagctccctgggtaataccagtcattcctacggcatcaatcaccacctgtatactgacaagtctgaaatccttacatctaacctcgtctcctaagctgactgaccctcttcatttaaattcttacaagcacatcaggtcgggcaccttggctcacacctgtaatcccagcactttgggaggccgaggagggcggatcatttgaggtcagcagtttgacaccagcctggccaacatggtgatatcccgtttctaccataaaatagaaaaattagccgggcgtggtgccgtgcgcctgtaatcccagctactggggaggctgacatgggaaaatcgcttgaacctaggaggcagaggtttcagtgagccgagatcacaccactgcactccagcctgagcgacagagagaaactgtctcaaataaataaaatttcctataagcacatcaaatttgacatattgaaaccaaactcttccagcctgtttcttctgtaatctcagtgagcagtgaaactatcttctgttaaccaaaccagaaatttacctctgaaactccccctaaacatcacttcttccagaaaaaccttccaatctcctgcatttggtgcagcatcttacccctaacttcctctttcaacttaccatgtaattcctagtttatctgtctcctctactgactacataagctttccaagatgatcctgttacactgctttatgcacagctcctagcacattataggcagttatgaatgaacaccaatattctttatggccagtgcctagcacatttgaatgagtatgaatatattcttctggagccaagggatatagagtttcctgcctgaaggctctatctagagtaagtttaggagccaatcttgagaaggtaattgcatgcttctgctgagtggccaaacagaatctgtcccctgaggagtcctcattatagctactcatatgattatctactcatatgagacagacagagactaagaataatgaatgaaggaaagaagaggaattttttttttttttttgagacggagctcgctctgtcacccaggctggagtgcagtggcgctatctcggctcaccacaacctccacctcccgggttcaagcgattcttctgcctcagagtcctgagtagctgggattacaggcccgtgccatcatgcccagctaatttttatatttttagtaaagacggggtttcaccatgttagtcaggctgatctcgaactcctgaccttgtgatccgcccacctcggcctcccaaagtgctgggattacaggcgtgagccaccgcgcccggccagctggaagataatttttaaaattatgtcttggccggccgcggtggctcatgcctgtaatcccagcactttgggaggccgaggcgggcagatcacctgaggtcgggagttcaagacctgcctgaccaacatgcagaaactctgtctctactaaaaatacaaaattagctgggcgtggtgccacatgcctgtaaatcccagctactagggaggctgaggcaggagaattgcttgaacctgggaggcggaggttgtggtgggccgagattgcaccattgtactccagcctgggcaacaagagcgaaactccatctcaaaaaaaaaaaaagaaataaaataaaattacatctagatctcaaatcataaactacctggactggtgagcagggtgagtgggcaggaagccacaaaaatctccaagtgcttactcatgaggagccatcattacagcagtgctatggagccagtttatcctgaaggggccttctcagcatcttcccccgctggaagatgcaatcattcttggttaagtttcataaagagttgcaggagtccaagccaggtctttgctacaggctggattcaccaacctaccatgcagcaaattcctccttggtctccatgaggggaacagtgaatcaccaaagtggaattgccataggatgaaggtcagcagtgtactccttaccactaggggctagctcaacactccctcagcacagccaccccatgatgggtccagatcagttaatgacattacctgggattatgaaagtgttcactataaccacagggataggtgaactcccaagacagtgacgtagagcagcaggcaatgatttgagtacagggcataactactcatgaaagagggaacatctgagaaagaaagttgtcagaaggaatggctttacattgttttgcaaaagtgtctcaaaaactggagtagtcagttgtatccaatacacctgaggagccaaggaaactgacatctattgcgctctctgtatgaggactaccaggaaccaaactggggcaccaatcagggggcactgtgatctttagacttcccagcctccaaaaacagtgaggaatgcgcgtgtaaagccacccagtctgtggttttttttttttttcacagcagcccaagctaagacagcagtgagtgctcttacaggggagaaaaacaaaacaaaatatcgagcctcgaggatacatttgcccaaatcagttaagtgtaataccaggattcaaaccaattagatgcagaagccactctatcacctctcttatcacaggcataccagaaaataaagcatccaattccagaaatgagaaatactgactctgtgtaccacagaataagtgctctgagttattcatcaaggcagactcaacagaaacatgaaaatgtcacattaacaggtccatattaaattcagtcataaaattgtatcactggttgaaaaattaatttcctatcacaaactcttgattacattacaccaacaggacagagaaattacatttttgtttaaattggtcaagttgaaggatgtacataacaaaagccaaacacagtatctgatatatcaaacaccaaaatgtttaatcacatgcaaattaaaaatcgtataggattttttactcacttgagcagactgtagaaaaggttaatcaaggttgggcgcggtggctcacacctgtaatcccagcactttgggaggccgaggtgggtggatcacaaggtcaggagttcgagaccagcctggccaacacagtgaaacctcatctcttctaaaaatacaaaaataagccgggcatggtggcgcacgcctgtaatcccagctactcaggagtctgaggcaggagaattacttgaatccgggaggtggaggttgcagtgagccacgatggtgccactgcactccagcctgggtggcagagcgagactctcggcaaaaaaaaaaaagagaaaaagaaaaaaaagaaaaggttaatcaagagacagtgcagtatttaacatactgctgaagaccggatatacctgtatcagctaaacaagcaaaagcagcaattactttcaaataagttgtacctcagttttcgagtattataactccactcccaaggttccttgattgtattacaagttatgtctaaaacaatactttgcttttaacagaaatggaatttcatttcaaccatatatgaaagctacacatttgaaggccattcaatatcatacttttatacttaattacctctgagaaaatggagcaaattttgacattcttccaccttaaaaacattttctcctacctacattctaacaccccttactcatataatattaccagatatgttgttagtaaaaatcagtagtgctggccagcgttttaaaacaaacatcactgactacaaagatactctacttgaaatcaggtcacaaaaaaccaacgctgcttttcaattaaaactcaaaaagggccaggagctgtagctcactcctgcaatcccaacacgttgggaagccaaggcagaaggatcccttggggccaggagtttgaggccagcctgtgcaacatagcgaggccttgtctctactaaaattaaaataaatgtagctgggtgtggtagtatatgcctatagtctcaggtactcggaagcctgaagtgggaggatcacttgagtcgaggactttgaggctgcagtgagccatgactgcaccactgcacttgagcctaagtgacaaagcaagaccctgtctcaattaaaaaaaaaaaaaaaaaaaaaaagcctaagaaatagatgactattttctttatacttttctgtattttaaaatattttgtaacaattataagtcaagaaaaaattttaagtgtagccctaaactccagctccgttttgcaaaataaggcataaattaaaaattgtgtgcaaaatcgtaatcgatgcttggtcttaagtttgactgttgtggtacttgaaggataatgagtagaaattcaatgactcaatgaaaatgacaaatgctaaacatacacccaaaacaaaacaaaaaagctaattaaggagttacaataaaaatctttatttaggtttggtcagtacaggtaagatatactggagtcacagagcaatatgcattaacaggatacaacagttcataaaaactgagtaactatgcacacaaatttcttaaacagtcacctaaagagaaaatgcacagatgtatggtggaaaaaactgtatctaacactgaaactactacaggactccatcaatgagtccaacttttagtgataaaaaactactgtactgggcaaacttggcagtcataaacccacatctactctaacaagtctgaatggtgcataagtacagtaacagcatgagtacgaatgcccttacacagcacagattytaaacagacagatttatacagacatcattgtgttgtattttaaggaaaaatttccatttacaatttcacattaactcatataaaaataacttgaccctacacaaaatgtccttttagcaacattcaaagtaattaactgttacaatttccaaagcggcagaagtattgaagcaaaaaaaaaaaaaaaaaaaaaaaaagaaaagaaaaaaaaaacaaagaaaaaaaacaacaaaaaaaaaccaaaacgtacacccacaaaaaggcaaattgtgacaaaagtatgcattaattttctggacagtatcctctcccaaattaaatgacactgtataaaaatttgctgaaaaaatattacaaaactgaaccctgtacatttacacttgagtccaagccattctgaacgtggcgggaacccacagttcgattacctttcccactcactgctttctcctcttgagggtcatgact

SEQ ID NO: 8742 - DNA, 16849 bp, Homo sapiens
gaactactgctattaaagtcttgaaccctctgaaaaatgaaaaccagtctccaaagagagaatctggagaccaccctttccaagtttgaactggaacatgggcgaattttctcattcttgcagttattcctataattgcctttccattgtcatcaatttccaggcagcaattagttcgattgaactttccacatcctcctccttcctgggcgaggaggcagtctaaagctaatctattttgatagatagcattcctcatttttgtagattgctgggctaatagatctaaagcccttgctgtttaattagtgatgatctcaagcactatctataacctcatgatgcagttaagcatgtaaataggagaccagtaaccccatgagccatcgtcccccaccaggtagctggcccatagtagtgaattattctctcagggggccattcatcatctttccagtcccctatggctgtgtctttctttacgctccttctatatctttctctcttctcatcatagacaggatactctaaggcttctccttgtcttagagggattaagaagaaagacggcctaattgttccaagtacacaggcccctgtccatttggctggtagctgtcggtaggcccgtggcccacagatccgatagagaccagagggtgcttgccaggtatttggagcttcaagctgataccaggtgtggtttagagcagagaaacgggagaatggatttggatgaggtggtttgggactatctttgccgcgccataaagtttttcctaattttttaacatgtttctgttccaaacatgttaattcccctactgggtctgtagaagtttttccctagcaagcaatacagtatttcccgataatagaagtttttaagagccagacgcttgaacttgtgggagtcagtttgcaggaagggtcagtcagagtaaagttattttgaggcattaactcttttgcttcccaaggccattggtctcccatgtttgtccctccacaaacataacatgaggagatgcctaggctgccagcaatgttttcagccatctgagcaaataggtttttggctaaagggggaggctcggcaacttttgatttatgtgctcatagaatgacttaaagactcggaattgctgctgggatgacttcttggtttgagtcctctttatgatatataaatttactttagctttttgactgctgctttgtaatgccatggagtaacctgtagtccatataggtagatccggctctaagatagtaagatttacaggattgcaagtgcttgtcttacagtccggttttgctggcgctttgatgagcaagattggctttagcctcagtgatgatcggtcagtgaactgtgttgtgcggttccagcaagctattgctagggccttggaggggcaaacagggtatgcacatacaattttgtactggcagtttgtacagtaccctgtaggaccagagattgtgagataggttgggttcacggatgttaactgacaaatatcaaagtatatggctatagccccccctggggggtagaggcttggctttgatttataagacttcctttctttgactcagtatgaacctcaaaccaagtcctaggtaaagacttagaaggtcatagcatatataaggctggccatttcctgggtcacaaattgaataggtgatccgattgtaagtacaagttcctaggtgagtccctgtacactcctaataagtatagaataatagagtcctagttatactgtttcctgaccctgtagtgtgtgtacaatggggacactttctaagggtacttattttaacatggtcaaggggggtgataacagcaaaacaatgtacagcgtattcatatccagcaaggacagaagagggccttgcctgggggaggagattgagcacagcaacggaacaatagtaaaacagttagtattataaggaagactactagtcctaagatttctaaccacatttacttgcttgacgagtcctcaagcttcggccgtgcgtagactagtcagcttcgggtgtgtgactagagcggggcttgtctccttaagcttcagccgtgcgttgactggtcagcctcacgagtgaccagagcagggtgatcgtcctcagcagcagcttgttgtcttctcaggatcagctgggttggatgatctgtgtcctgctggctggtccactcgtcctgagctgccggtttcagccgactgtggtggatccaagacataacacctgcaactttaacagcaacgggagtggacaagatgacagtacagggcccaccccatatgggtcctagagaagttggattccactttttaacccaaacagagtctccagatttaaaggggcacactggtctatcaggcttacaggcatcctttcttgtacccagccatggacctcttgcatggctattcctaaagcctgcatttgctttcttaaggttaattcctctagttcctggagatcacctttaatttgacctatgatttggggttggccaactgaacaaaacctcatagggtaaatactcagtttgtttggtgggggtgcacctgtctcggaggaggaccataggcaaaacctgaacttatctcagatgagcttcctggcaatatttcttcagtagctgcttgagtgtccacttcatgcgttccacttttcctcaactatgcagccaataggctgtgtgtaacttccattttatttttaacagtcttgttaaatctcgtactatttcagctacaaatgccggcccattgtctgactgtaaagatagaggcagtccaaacctggggataatatcttttaacagtactttagtcatttgtcgtgctttttctgtcctggtggggaaagcttcaacctatcctgaaaaagatgcaaataaacactagaatataccgatagcttctggcacggggcatttcgtttaagtctataaggaagttttcacaaggcatggctccttctcctgttctgtttcccagaggaggggttccttttctcctctttttgtaacttcatataatagctcagccatcagcgagaaatctggaatccagatacggcagaatcctgctgccttcaacttctaatgtgaccacagactcctggaggcccagtgagaaggagcccggtctgtcctagtcctcacatccttcagctcctgccagcccaatcagattagtatctggttcctctaaggtatggcagcccttggccaatggcctctttgtctcacggccttggccatttccctcattgccttctggacattcatccttccagtgcccccttttttttttttttttttttttttttgcatctctcacattgatccctctctagccttggtcagctcttaaatccttgtctaacttgacctcttccacgtccacatctgcgtccacatcctctcacatggctaatttctctttctataagggctgctgccaacagatccgcctttttcttaagcctttcatctgcttccttttcccttccttagttctcctgctcctgcagtcggctggcagggctgggcaaggacaaacctgaatataaaattcagtgtgtctgctgcccaccagtcctttatgcttggagaagagagagatgtttctctttttcytctcttctatctattaaacctccgctcctaaagtcctcgtgtttgtccctgtcctaaattttcctggtgcatgacaacaaaccccgggtatgtagaccagacaatgtagccgcttcaagggatttgagtgaggaaggaatgaatcaatggagcccaggggggttttagagcattcaaactattcaggatgatactatggggaccaagggagagctttccccttctccctctgaaggaccactgaaaaatcactgacagattgtctcataggagaaaagcatacatatttgtttaatgcgtatacacgggagcctttgaaatggagacccaacttctcaacagagtacagagcttagataccatcttgaggttccacaaagaatgtgggctcagagcatggccaaaactaggttaggggctgggcgcagtggctcacaactgtcatcccagcactttgggaggctgaggcgggcagatcacttgagctcaggagttcgagaccagcctggccaacatggcgaaactccctctctactaaaaatacaaaaattagccgggtgtgatggcgggcgcctgtaatcccagctacttgagaggctaaagcaggaggatcccttgagcccaggagttcaagactgcagtgagctgttattgtgccactgccctctagcctgggtgatagtgagaccctgtctcaaaacaaacaaaaaaacccctaaatctgtggactctgggtgattatgacatgtcaatgtaggttcataaagtataacagctgtaccccctggtgggggatgttgataatgggggagactgggttggggcgaggacatacgggaaatctctgtaaccttcttctaattttgctgtgaacctaaatctgctctaaaaatgtatatatataaaaagtggggccttcctttccctctcccctgccccagccctctcccccacctccttcctctccctgctgcctcccctctgccctcccctttcctccttagccactgtaaatgacactgcagtgaatatcctggagcacaaagggcatgtctcccagttcagaattacctcctttatttagggcaggttctcagaactagagtagccgggcaaaggtctgaggcaaatgcctttgccctggggcgccccagccacctgcaggccccttatttcctgtggccgagctcctcctcccaccctccagtcctttccccagcctccctcgcccactaggcctcctgaattgctggcaccggctgtggtcgacagacagagggacagacgtggctctgcaggtccactcggtccctggcaccggccgcaggggtggcagaacgggagtgtggttggtgtgggaagcacaggccccagtgtctcctgggggactgttgggtgggaaggctctggctgccctcaccctgttcccatcactgcagagggctgtgcggtggctggagctgccaccgagcgtctcggtgagggtgacctcacrctggctgagcttacaggccccatcttaagactttgttcgtggtgttctttcacttctcagagcctttcctggctccaggattaatacctgttcacagaaaatacgagtggcctcctcttcctccacaacctcacacgaccttctcccttccctcccgctggcctccttttctctcctgtcactctgcctgggcatgccccagggccttggctgtgtcctttctttcctcagggaagaccacaagtttgggctagatgcctccgcacccccccacccacaccccctgagcctctagtcctccctcccaggatgcatcaggctggatggtgacatctccccacccttgaatgagacggctttatgctgctctgggacccgcacccagcttggactgcttgctccatggccccaggaaaagctcgtacagataaggtcmgccacttgggtggggggcccacagcatgtcaccctctctgtcccagaagtcacgtgcttggtcccctgtgaagcccctytggggacctaggggacaggcagggcatggagacaaagtatgcccttttctctgacagtgacaccaagccctgtgaacaaaccagaaggcagggcactgtgcaccctgcccggccccaccatcccccttaccacccgccaccttgccacctgcctctgctcccaggtaagtggtaacctgcacaggtgcactgtgggtttkgggaaaactggatctccctgcacctgagggtgtagaggggagggagtgcctgagagctcatgaacaagcatgtgaccttggatccagctccataaatacccgaggcccagggggagggccacccagaggctgatgctcaccatggggcgcctgcaactggttgtgttgggcctcacctgctgctgggcagtggcgagtgccgcgaaggtaagagcccagcagaggggcaggtcctgctgctctctcgctcaatcagatctggaaacttcgggccaggctgagaaagagcccagcacagccccgcagcagatcccgggcactcacgctcatttctatggggacaggtgccaggtagaacacaggatgcccaattccatttgaatttcagataaactgccaagaactgctgtgtaagtatgtcccatgcaatatttgaaacaaatttctatgggccgggcgcagtggctcacacctgcaatcccaccagtttgggaggccgaggtgggtggatcacttgaggtcaggagttggagaccagcctggccaacatggtgaaaccccgtctctactaaaaatacaaatattaatcgggcgtggtggtgggtgcctgtaatcccagctactcgggaggctgaggcaggagaaccgcttgaagctgggaggtggagattgcggtgagctgagatcacgctactgcactccagcctgggtgacagggcgagactctgtctcaaaaaatagaaaaagaaaaaaatgaaacatactaaaaaacaattcactgtttacctgaaattcaaatgtaactgggcctcttgaatttacatttgctaatcctggtgattccacctaccaacctctctgttgttcccattttacagaaggggaaacgggcccaggggcagggagtgtggagagcaggcagacggstggagagaagcaggcaggcagtttgcccagcatggcacagctgctgcctcctattcctgtgcaggaagctgaaagccgagctactccacacccgggtccgggtccctccagaaagagagccggcaggcaggagctctctcgaggcatccataaattctaccctctctgcctgtgaaggagaagccacagaaaccccaagccccacaggaagccggtgtcggtgcccggcccagtccctgcccccagcaggagtcacacaggggaccccagatcccaaccacgctgttctgccgcctgcggtgtctcaggccctggggactcctgtctccacctctgctgcctgctctccacactccctggccctgggaccgggaggtttgggcagtggtcctgggctcctgactcaaaggasaggtcaccttcttcttgggcgagctcttcttggggtgctgagaggccttcggcaggtcatcacgacccctccccatttccccaccctgaggccctcaggatggacaagcccaaacaaagcaacccccacggccccgctagaagcaaarcctgctgtgctgggcccagtgacagccaggccccgcctgcctcagcagccactgggtcctctaggggcccgtccagggstctggagtacaatgcagacctcscaccatttttggctgatggactggaacccagccctgagagagggagctccttctccatcagttccctcagtggcttctaagtttcctccttcctgcttcaggcccagcaaagagagagaggagagggaggggctgccgctgaagaggacagatctggccctagacagtggctctcagcctggggacgtgtggcagggcctggagacatctgtgattgtcacagctggggagggggtgctcctggcacctcgtgggtcgaggccggggatgctctaaacatcctacagggcacaggatgcccctgatggtgcagaatcaaccctgccccaagtgtccatagatcagagaagggaggacatagccaattccagccctgagaggcaaggggcggctcaggggaaactgggaggtacaagaacctgctaacctgctggctctcccacccagaccccatgctgcactatgtgggcttcgtccctgtcattgatggagacttcatccccgctgacccgatcaacctgtacgccaacgccgccgacatcgactatatagcaggcaccaacaacatggacggccacatcttcgccagcatcgacatgcctgccatcaacaagggcaacaagaaagtcacggagtaagcagggggcacaggactcaggggcgacccgtgcgggagggccgccgggaaagcactggcgagggggccagcctggaggaggaaggcattgagtggaggactgggagtgaggaagttagcaccggtcggggtgagtatgcacacaccttcctgttggcacaggctgagtgtcagtgcctacttgattcccccagggaggacttctacaagctggtcagtgagttcacaatcaccaaggggctcagaggcgccaagacgacctttgatgtctacaccgagtcctgggcccaggacccatcccaggagaataagaagaagactgtggtggactttgagaccgatgtcctcttcctggtgcccaccgagattgccctagcccagcacagagccaatgccaagtgaggatctgggcagcgggtggctcctgggggccttcctggggtgctgcaccttccagccgaggcctcgctgtgggtggctctcaggtgtctgggttgtctgggaaagtggtgcttgagtccccacctgtgcctgcctgatccactttgctgaggcctggcaagacttgagggcctctttttacctcccagcctacagggctttacaaaccctatgatcctctgccctgctcagccctgcaccccatggtccttcccactggagagttcttgagctaccttccatcccccatgctgtgtgcactgagagaacactggacaatrgtttctatccactgactctyatgggcctcaactttgccaccttacaaaataatttcagcccaaggcctcattaaagaccttcatgtaataatagccaattagaaggaaaaataaggccgagtgcagtggctcgcccttgtaatcccagcacattgggaggtcaaggtgggaggatcacttgaggtcaggagtctgagactagtctggccaacatggcaaaaccccatctctactaaaaatacaaaaattatccaggcatggtggtgcacacctgtgatcccagctactcaggaggctgaggcagcagaatcagttgaacccaggaggtggaggttgcagtgagcmgagattacgccactgcactccagcaggggcaacagagtgagactgtgtctcgaataaataagtaaataaataaataataaaaattaaaaataaattagcaatctgaaaaagataggaagataaaagtatacctagaagtctaggatgaaagctttgcagcaactaagcagtacatttagctgtgagcctcctttcagtcaaggcaaaaagggaaacagttgagggcctataccttgtccaatctaattgaagaatgcacattcacttggagagcaaaatatttcttgatactgaattctagaaggaaggtgcctcacaatgttttgtggaggtgaagtataaattcagctgaaattgtggaacccatgaatccatgaatttggttctcagctttcccttccctgggtgtaagaagccccatctcttcatgtgaattccccagacacttccctgcccactgcccgggacctccctccaagtccggtctctgggctgatcggtccccagtgagcaccctgcctacttgggtggtctctcccctccaggagtgccaagacctacgcctacctgttttcccatccctctcggatgcccgtctaccccaaatgggtgggggccgaccatrsagatgasatccagtacatctttgggragccctttgccaccccactccgggctaccggccccragacaggayagtctctaaggcyatgaccgcctactggaccaactttgccaaaacagggtaagacgtgggttgagtgcagggcggagggccacagccragaagggcctcccaccaygaggccttgttccctcacttgccagtggagggactttgggcaagtcacttaacctccccctgcatcggaatccatgtgtgtttgaggatgagagttactggcagagccccaatcccgtgcacgtgcacagccagtgcccagtatgcagtgaggggcatggtgcccagggccagctcagagggyggggatggctcaggcgtgcaggtgcagagcagggcttcagccccctgggagtccccagcccctgcacagcctcttctcactctgcagggaccccaacatgggcsactcggctgtgcccacacactgggaaccctacactacggaaaacagcggctaccyggagatcaccaagaagatgggcagcagctccatgaagcggagcctgagaaccaacttcctgcgctactggaccctcacctatctggcgctgcccacagtgaccgaccaggaggccagttccatgccctccacaggggactctgaggccactcccrtctcccccgacaggcaactccgagtctgcccccgtccctgcaacgggtgactctcaggatgcccctgtgcccctcacaagtgactctgaggctgcccccgtgyccccctyaggtgactctgaggctcccccgtaycccctacgggtgactctgaggcccgtgcccaccttgggtgacactgaggctgccccatccccgctaygggtgactctgaggccgcccctgtgtcccccacagatgactccgaggaagctcagatgctgcagtcattagtttctagtgtcccatcagccttggtctcaagaggccgagagggtgcaaccccaggggctcccctcccatcttgagctcttcctgaataaaacctcattcccctgtctggcgtctttgctctcaaggctaagctgcaggaaggagtggacctcagttacccttacagcaccaggtgggggcccaacctgtgaccccatcacctggcacaatccccaggctctggggcgttgatggtgccatcctcactttcgagtggaggaggtgggcccagggaagttgattggcaggcccaggagtgggagtcaggcacaggtcactccagagcctgcccttccctgaatggaaccaggctgctggctcccaggggctagattctgtcccagatggtgggaggggctggtggcagctgcagtcagagagggagctggggtctggcaggctgtggctgcctctggactaggggatcccagccacacccacatcctctgggtgcagggagtgaagtctgtgttctaactggggtctggggaacccgcctgggaaaagaaagggattctgctcctccagccggatgyaagtggaagaaagaataacacatcacaccagaaggttggaagcagaggatggggagggtgctgggcagtaggcgctgggtggtgggcctctggggggtgcccaatggctctggcagagttgacggggcagsggcagagggcagaaggcagagtcaggagtactcctgcctctgctgggtctaagcccaggcacatcactgagcacttgaccagcctgacctcaccatggccttgtgaggtgggtatggtgtacaccctccttttagacgtttatagatatttagaggaaaatgaggccctgacagggcatcacgtgcccaaggtcactcagagcaaggatttgaacccaggtccctgactccaaagccagtgcttggaacaacgttgggggtcttcttccccactcctcacctaccttctaaacaggcactgtggggcagggtggggcttagatgagagaaaattctggaatcctgagcaactttgcctggggggctccgcggtggagggcagaagcacccaaggaccagctagccactctctctgcccctccagcctacaggtgggaggataaggctcagggccgacaagtcctgtggcctcatgcagcagagctgagccgggacgaaccctgtcccctggagaagcaggggacaccctggctggctgtgaccactttggccaccctgggcttcctgggttggtcaaggggtctctggtgtaaaaaggggactccctgtcaaagactgagtgagatggagctgcccggcaatgtgggcctctcccagtgactgtccctgttctcttgggcaacggaagcccgaggatacaatgatgtgtcccttccttggccacactggtacccacagggattattgtgtttctacctgtggagtcagctctcaggcgcctccagcactgtgggagaaacccctgggaccccagtgcctcttcccaacccttgggactggcacccgtctcttgttgagagaaagcacagtcatgtctgtcattcagaaaatcacatccctggatggccaagccacgtcagaagggatgggctgtggggatccaagcgtgttctacctctgggctgcacccgccatccctctgcttcggtttgaatgcttgtccccgccaaaactcatgctgaaatttaatccccaatgtggcagtattgagaggtgctgcctttaagaggtgactggatcatgaggccctgtccccgtagatggattcatccattcatggattcatgggttagtgggttatcatgggagggtaactggtggctttgtaagaggaagagagacttgagctagcatgtgagcaggctcagcatcctcaccacgtgatgcccagtaccgtctcgggacaccagagtccccaccagcaagaaggccttcacctgctgcagcctctctgaggcaggaggagagggaattagggaagccaagggttggggcataagcaaaggaacagcaggtacagcccgttcacataagccagagaacagcaggtgcagcccgttctcataagccagagaacagcaggtgcagccagttctaggcaggattggggagcacacaggccacatcctcactgctgtgataacaagtcaggagcttccacttcaacctctgattgaccctgggccaatcctccacttcagcctctgattggtcccaggctaatccttcatagggtgtaaccaattggaggcctctaaagggcatctggggtgttctttataaaaaccctgagaagcattgcaattgggaggtccttgagccgtttgcttgggcccgctcccacccggtgggttgcacgttcgcttcaatcaatctgtgcctttggtaagctgttttcttgttgctttgtctttttttttttttttttttttagtggagtttcactctcattgcccaggctagagtgcaatggcacagtctgggctcactccaaactctgcctcctgggttcaagcgattctcctgcctctgcctcccaagtagctgggattacaggtaccggccaccacgcccagctaatttttttgtatttttagtagagacggggtttcaccatgttggcaaggctggtctcaggtacctcggcctcccaaagtgctgggattacgggcgtgagccactgcgactggcctgttttgtctgtcattgtttcattcttttgttactttgtgagttttgttcacttctttgttcaatacaccaagaacctggacaactcagtcaggaccttccatcctataacacctcaacctcggacttctcagccttcataactgtgagaaattccttttctttataaattacccggttttaggtattctgttataagcaacagaaaatctactttaaaagcctccatggcacaggtgagccctgcagtgtgtctgggtgatgcctgcagctgtcgagaaggaggagacagctcagagtcacctgcaatctggctcttgccattacagactccagatgatgaagttgaaaatactgacaggctggaggccatctggggtcctgctggctcccagttccaggaagcctggaagagcactggggtgagctcgggccagcgcatgtttactgtcacaggggacatgtttcagcactttcattgtaaggctgtggccttctgtgcttgtggatcctcagtctcagtggccttcctcttcccccsaccccaactcctgtgttgcgtgtttaacacacctacscccaaccgggacataactaaatcctagactgtggacaaagaatacagtcacctcagggggctgcgagctctaaaggctcagggcccagctacccctttaggatgggtcagtaacaacacgactgactctgtaaattggtgatcacctgagactggacctcagcaccacacggacctgtgcttcaccttggccatcgggggagagtatggaggtcttttgctggcaggaatcagcacccttatcctggcaatcagcactcactggccattcatgaggctccagcaggacgagtggccacagtgtgcagggcacaggggatggggctttccaaggtgtttctggatgacatcaatcacacaaggagttgtaggaatgctggcgtcctggttcacgggtagacgccagaggatgccaagggtgctgggtagaaagcagaggatgccaagggtgctgggtggtgggccccttgggggtgcccaatggctctggcagagttgttggggcagagtcgggaccacccccacctcttccgggtccaagcccaggcactgcactgagcacttgatgagcctgacctcaccatggccttgtgacgtgggcactgtgggcaggaatgcttatggaatgaggcccactgtaaccctaacacagcatcacaagtctttccccagagagaaaacgcacaggcaatggaaatctatggttaggaacaaagattcccgtctaagaaaaagggtggaccacgggcctctagaagggactgagggggcaaagtcctgcccgtgcactggctaacactcttcctttagcttttcccccccactttccatattgtacattttatctgtttataatttttcttagtgctgactaaattccagagttagaccttgaaatccacaagttcctaattggtggtcaacagaaacctcagcaagacaagcagaaaatgctcctcttcccctaaagctgtagaaaggcagccaccaacctgggctaggaaatggtccttacagatactatttttttttaactgtggtaaaacctatataacaaaactgatgctaatttaactgtttttaagagtagaattgagtgacattagttcgattcactgttgggcaaccatcaccactctctatttccataattttttcatcaccccaaatagaagctctatatccattagctaactcctcatttcccctccctctaacccctggtagcctctatcctttctgtctccatgaatttgccttttggagatatttctcataagtggaattgtaatgttttcaaagttcatccatgttgtagcatgtgtgggcataccataccttttttttttttttttttttaagaagcggagtttccctcttgttgcccaggctggagtgtagtggcacaatcccggctcaatgcaacctctgcctcccgggtttaagcaatactcctgcctcggcctcccaagtagctgggattacaggtgctcatcaccatacccggctaattttgtatttttagtagagatggggttttaccatgttggtcagactggtcttgaacttctgacctcaagtgatccacccaccttggcctcccaaagtgctgggattacaggcatgagccattgcacctggcctttttatgactgaataatattccactgtatgttgctggcatgcaatggtgcattctcttataaagcattatcttctcatcctttttatttgtgtaaagttggtaggaatgttcccactttcattccaaattttagtaatttgagtcttgtctcttctttgttcatctaaagtattgtcaattttgttctttagaaataaccagtttttggttttgctgattttctctatttttctattctctattttgtttatctctgctgtaatctttattatttccttcattctgctagctttgggtttagttcgctctttttctaattcctaaatgtgtgcggataaattattgatttgagatctttctgcttttttaatgtagtcgtttacagctataaatttcccccaagcactgctttcgatttcaccgcatgctgtaagttttggtatgttgtgtttttgttttgtctcaaggtgtcttctaatttccctygtgacttccttttagacccattggttgtttaagagtgtgttaagcctgggcacggtggctcacgcctgtaatcccagcactttgggaggctgaggcaggtggatcatgaggtcaggagttcaagaccaggctggccaaaatggtgaaaccccatctctattaaaaaatatataaaaattaaccagctgtggtggtgcacacctgtaatcctagctactcaggaggctgagacaggagaattgcttgaaccttggaggtggaggttgcagtgagctgagatygtgccacggcaccccagcctgggcgatggagcaagactccgtctggagtcggggaggggaagagtgttaagatccttttgtagttgatgaacaatgatgattgggtgttcatgcacatgcgtgagatgtgtcaccctcaaaccctgttacgtcggcacgttacccatctgacgtgaaaaagaagagagtgcattaacttccacatattcatgagtgttccagtttttcttctgctatggatttataattttatcctattgtaattggaatgatactttgtataatttcgttttaaaaatttattgctgggtgcagtggctcatgcctgtaatcccagcactttgggaagccgaggcagggagatcacctgaggtcag

SEQ ID NO: 8743 - DNA, 46878 bp, Homo sapiens
aggtgatctgctcgcctcagcctcccaaagtgctggaattacagtcatgagccactgcgcctgtcatgttttcttctttttctgcattgctattaaaaattttggctggggccgggcgcagtagctcatgcctgtaatcccaactctttgggaggccaaggtgggtgaatcacctgaggtcaggagttaaagaccagcctggccaacatggtgaaacccctgtctctactaaaaatacaaaaattagctgggtgtggtggcgggcgcctgttatctcagctacttgggtggctgaggcaggagaatcacttgaacctgggaggtggaggttgtagtgagccgagatcgtgccaccgcactccagcctgggcgacagagcaagacttaatctcaaaaaaaaaaaaagaaaagaaaaaattgtttcctcataatcgtaaagctgttatactcactgcaggcacagctagtacattttgctcaaccccacaggctccgttccctttacgaggtatttatttatttatttatttttatttttgcgacggagtctctctcctctgtcatcctggctggagtgcagtggcatgatctcggctcactgcaacctcggcctccagggctcagtcggttcttgggcctcagtcttccaagtagctgtaagtacaggcatgcgccaccacgtccggtgaattttttgtatttttagttgccatgttggccaggcttttactagctatttataatatgcttgagtcactcacaggaatgaaatactgtcagcatcaatagttagcagctctttcaaaatacattttattgcctctataagaaaccttaactattctattagtccagtaattccaaatggtcttattatttcttgggttttgtttgtttgtttgtttgtttttgagacgttgtttctctcttgttgcccaagctggagtgcaatggtgtgacctcggctcactgcaaactcctccaaggttcaagtgattctccggcctcagcctcctgagtagctgggattacaggcacgagccaccatgtctggctaattttttgtatttttagtagagactgggtttcctcatgttagtcaggctggtctcgaactcctgacctcaggtgatccatccgcttcagcctcccaaagtcctgggattataggcatgagccaccgcacctggctcgtcttattatttctatacataatatatgctcttttggctgggcgtggtagctcaagcctggtggcagacgcctgtaatcccagctacttgggaggctgaggcaggagaatcgcttggacctggaaggcagaggttgcagtgagccaagactgaaccacctcactccagcctgggcaacagagtgagaacccatctcaaaaaatactgataataataagatcatcttcagaactcagttcctggtgcatgaagagattcaatacagccccctcactctcagttcttagaaagaagaatatgccagcctgaccaacatggtgaaacccccgtctctaataaaaatacaaaaattagctgggtgtggtggcgcacgcctgtgatcccagctactcaggaggctgaggcaggagaatcgcttgaacctgggaggtggagattgcagtgagcccagcctgggagacagagcaagactcattctcaaaaaaaaaaaaagaagaagaatatgaaagagataggatcaataactaccttcattgtttaatagcctaagagtgaaagcccagcacagtggctcacccctgtaataatcccagcactttgggaggttgagttgggaggatcacttgagcccaggggttcgagaacagcctgggcaatatgtcaaaagctcctctgtagaaaaaatacaaaaattagccgagtgtagtggcacacacctatagtcccagctactagggaggctgaggtgggaggatcacctgagcctgggaggtcaaggttgcagtgagccatgattatgtcactgcattccagcctgggagacagagccagaccctgtctcaggaagaagaaaaaaaaaaaaaaagccaaatctttttatcccaggatgtctgaaaaggacagagtctatggagcatggatgcagaaaagtagttattcctaccagaaaaaaaaaaaatgaaatgtggacacagccactcaagatcagagactcaaccagtgaaagcaattagcttcaatttcattgtcaccaggagggcgcacaccagagaacctgggagaaagcctgggctagagcccttagcattctcagtgttactggtgctgtggttcaacaacctttgtgggaatgaggagaaccagagaccatcaccatcacacgtaaaaaggatcctatagcaacaatgtggctgtcaaaaatcagctggaggccaggcgcggtggctcacgcctgtaatcctagcactttgggaggccgaggcgggcggatcacctgaggtcaggagtttgagactagcctggtcaacatggtgaaaccccgtctctactaaaaatgcaaaaaattagctgggtgtggtggtgcatgcctgtaatcccagctacttgggaagttgaggcgggagaatcacttgaacctgggaggcagaggttgcagtgagcccagactatgccactgcactccagcctgggtgacagactgagaccctgtctcaaaaaaaaaaaaaaaatcagctggagcttaaattatacattgtttgcaatccagactgtacttgctttcttgtcaatggcttgagatatgtgcagaggccccttaaacatgtgtaggtgacctttctctgtcgcccaggctggagtgcaggggcacaatctcagctaactgcaacctccacttcccgggctcaagcaatcctcccgctgcagcctcctgagtagctgggactacaggtgtgtgccatcaagcttggctgatttttttgtactttttttttttttttcgagatggagtctcgctctgtcgcccaggctggagtgcagtggcgcaatctcagctcactgcaagctctgcctcccgggttcacactattctcctgcctcagcctcccaagtagctggtactacaggcgcccgccaccatgcccagctaatttttgtattttttttagtagagacggggtttcaccgtgttagccaggatggtctcgatctcctgacctcgtgatccgcccgcctcggcctcccaaagtgctgggattacaggcgtgagccactgcacctggccgattttttgtatttttagtagagacagggttttggcatgctgcccaggctggtctggaactcccgacctcaagggatccgcctgtctaggcctcccaaagtgttaagattacaggtgtgagccaccacgcctggcccagaaatactctttttttttttttttgagatggagtctcactctgttgcccagcctggatggagtgcagtggcgcgatctcggctcactgcaagctccgccttctgggttcacgccattctcctgcctcagcctcccgagtagctgggactacaggcacctgccaccatttttttttgtatttttagtagagacggggctaatttttttttgtatttttagtagagatggggtttcaccgtgttaaccaggatggtctcgatctccttacctcgtgatctgcccgcctcagcctcccaaagtgctaggattacaggcgtgagctaccacacctggcccagaaatacttctttatcagaaatattactggcgggtgtagcagggcacgcctataatcccagcactttgggaggtcgaggcaggcagatcccttaagcttaggagttcaagaccaacctgggcaatatggtgaaagccgtctctacagaaaattagccaggcacagtggtgtgtacctgtggtctcagctcctagggaggctgaggtgggaggatcacttgaacccaggaggctgagattgcagttagctgagattgtgcccctgcactccagcctaggcgacacggtgagactctgtttcaaaaaacaaaaaagaaatatgacttatttacaaatatttctttcttttttatttttagagacagggtctcactattacgtaagtattataaattatatatatatgtttgtttgtttgtttgtttttctgagacagagtcttgctctgtcacccaggctggagtgcagcggcacaatctccactcactgcaacctccgcctcttgggttcaagtgattctcctgcctcagcctcctgagtaactgggactacaggtgcccgccacaatgcccagctaattttttatatttttggtggagatggggtttcactgtgttagccaggatggtctcgatttcctgacctcgtcatccacctacctcagcctcccaaagtgctgctaggattacagacgtgagccagtaagtccgacatcttttttttttttttttttttttgtggaaacagggtctcactgtgtctcccaggctggagtgcaggggcacaatctcgactcactgcagctttgacctcccaggctcaagcgatcctctcacctcagccttccaaggagctgggactacaggcaccaggcccatgctactggtccctgctgtttacaaatacactagacttgggttttagctgctctctcaacaccaggtgggaaatggattgttcggaaggtagaggaatagaggagggacctgcttaggaaggtgggggtgctctagatgagagaggaggtgctgtgacctcaaggtctggggaaagtgggtgagtgcagggccccatcaaggctctcaacaaggcctctctctctggagctcagatgtgaagcccagaaggcaggtcagaggcctgaggtcagaggcaggtcaaaggtgggggtcccacctggtccccttggcgccttcccttggaatgcagtgaccagctgcctggaagggtgggcaaggggacaacaggatggggtaaaggccagttacaagtagaatcctggaaggccgggcgcagtggctcacgcctgtaatcccaacactttgggaggccaaggcgggcagctcacttgaggtcagaagtttgagaccagcttggccaacatggtgaaaccccgtctctaccaaaaagtacaaaaattagccgggcgtggtggcacatgcctgtaatcccagctactcgggaggctgaggcaggaaaatcgtttgaacccgggaggcagaggctgcagtgagccgagatcccgccactgcactccagcctgggtgacagagtgagactctgtctcaaaacaaacaaacaaaaaccaagtagaatcctggatagacagtggctcagggamtcagctgtccccaaatcacctaccttagctctttgtgcaggggatgggggatccccaagatcttcaaagatagggaggtatcctcaagatcttcaaaggtggccaggcgtggtggctcacgcctgtaatcgcaacactttgggaggtcaagatgagaggaggccatcttaaggccaggagttcaagaccagtcggggcaacatagcaagactctgcttctgtttctgtttttgtttttgttttttaatgtttcctcgaaatcccaccttaacatctacacaatggtgcctacagttttccccattaacttcctctctggggacagaatattcccctacccacctaagttcagccagaaggagatgcctcatcccccccacccaggcttcccagtgctgagaacaaaagaaaccagtttagttagcatttcctgtgaattcaaatgggggccagcagtgcaactgggaccagcccattccctgggggagactcagcagtgctggccactttgcagagccccgtctgggtcccccaccctggcccccaagggccacagcatccccttccacccacaggcctgggcaaggtgcagtccccagacttctgcaatcttaaccgctgtgcttccgtcgcagtgggaggccccgccttttcccctgcctgcccttcgggcacctcaggaaggcaccttcctctgtcagaatggcyaccatggtaccatccgtgttgtggcccagggcctgctggactctgctggtctgctgtctgctgaccccaggtgagaccagtcaagccggggagggctggagagggctgcgttttggggatcagtagagggtagaggaatagaacgcaacgctgttcacatcctgccacactgcgacctggccgctgactctgtatcctcgggagaaagttctggttccttagttcagccttcaggtggtcaggccccagcataggcttgtacgccatccctctcccctaacacacacacacacacccctcatgcttcctgctccatctgaactcctgaaatttgccctttgcgtatgtgcttccctctgccaggatcacctgtccctttcacttgctaactcctacttagccttcagtttcgggctgcaatggtccccgcttccaggaagccttccctgactcacctcctcctatgctggatcagagcctcttctggcctccttctgagttctccccggtctctgatggattctacctttcccactggaccatgaaggcaggaacccttctgtctcggcacaaggagagaggtgttaaatggtggggcctgttgatgcgtgggttggggracaaggaaacaaacaccaggacttcttcatgttcctgaaggtgtccaggggcaggagttccttttgcgggtggagccccagaaccctgtgctctctgctggagggtccctgtttgtgaactgcagtactgattgtcccagctctgagaaaatcgccttggagacgtccctatcaaaggagctggtggccagtggcatgggctgggcagccttcaatctcagcaacgtgactggcaacagtcggatcctctgctcagtgtactgcaatggctcycagataacaggctcctctaacatcaccgtgtacrgtgagtcracgtgtccggaggtgggactggtcttgggtagtggtgtgggcaagtggccaatggctcaggagagtggggaccctcagtttgcaaagaatggaccacagttctgacccagagctcagacctggacatttgtgtgtgagatacaaagayagacagagacagagacacagagacagagacagagatatagagacgcatctcaatctcatgccaaggcagcagttgtgaaatcaattaacttgggccccaacaagcattttttttttttttttgagacagagtttcgctctttttgcctaggctggagtgcagtggcacgatgtcggctcactgcaaccttcgcctcctgggttcaagtgattctcctgcctcagcctcccgagtggctgagattacacatgcacgccaccacacccagcaaattttgtatttttagttgagatggcatttcaccatgttggccagtctggtcttgaactcctgacctcaggcgatccgcccacctcagcctcccaaagtgctgggattacaggcatgggccactgcgcccggccccaacaagcttttttttttttttgagatggcgtctcttactctgtagcccaggctggagtgcagtggtgcaatctcggctcactgcgacctctgcctcccaggtccagctaatgcccagctaagttttgtatttttagtagagacggggtgttccgcccacatcagcctctcaaagtgctgggattacaagtgtgagccactgcgcctggccccaacaataatcccaacactttgggaggccaaggcaggaggattgcttgagtccggaaatttaagaccaggcagagcaatatagggacaccccgtctctacaaaaataaataaaaaatattagctgggcatggtggcacatgcctgaagtcccagctacttgggggaccaaggtgggagaatcgcttgagcccaggagttcaaggctgtagtgagctataattgcaccactgcactccagcctgtgcaaaaaagcaagacccttgtctcttaagcaaaaaagggggtacccctttcagtcagcagtaggcaaatggaggttttacatttacacttttttatacctttattttagagacaggatctccctatgttgcctaggttggtctcaaactcctgggctcaggcaatcctcccacttcagtctctccagtagctgggattgcaggcctgagccactgtacctggctacttttttttttcttttcttttctttttttttttttttgagacagagtctcactctgtcccccaggctagagtgcagtggcgcaatcttggctcactgcaacctctgcctyccgggttcaagcgattctcctgcctcagcctcctgagtagctgggattacaggcgcatgccaacacgcccagctaatttttgtatttttagtagggacaggatttcaccatgttgcccaggctggtctcaaactcctggcctcaaatgatctgcccgccttggcctcccaaagtgctgggattataagcgtgagccaccatgcctggcctactttttgacttttyttttctttgagacgcagtcttgctattgtcccccatgctggagtacaatggcgcgatgtcagctcattgcaacctccgcctcctgggttcaagtgattctcctgtcttagcctccttagtagctgggattacaggcgtgtgacaccatgcccggctaatttttgtatttttagtagagacagggttttgccatatgggccaggttggtctcaaactcctgacctcaagtgatccgcctccctcggcctcccaaagtggtgggattacaggcatgagtcaccttgcccagcctttttttttttttttttttttttgacatagagtctctctctgtcgccaggctggagtgcagtggcactatctcagctcactgcaaattttgcctcctgggttcaagcgattcttgtgcctcagcctcctgagtagctgggattacaggcacgtgctaccatgcctggctaatttttgtatttttagtagagatggggtttcaccatgttggcaaggctggtcttgaactcctggtctcaggtgatccgtccaccttggcctcccaaagtgctgggattacaggcatgagccacagtgcccggcctgaggcccagcgttttgtaggtgtactggggagggcacccagcctgggagtgtcaagtctcctgtgactgtgccggagtatcttgagaggctgccacagggctggtgaaccaggaaagccctgagtgtctgaacctgattggagagaactgaataatcctgaccttttgatccacccaccccggcctcccaaagctctgggattacaggcgtgagccaccacgtctggccataaacaggaatttttaatattcatatcatagtcataaacgttcatcccttccatcctcatttttttttattgtgccatctttgagaacagaaagttttgtttagcgccttgcaaggtatctgacaacacaggaaatgataatcactgcgctaatgataatagcaaacgcttcgactggcccagctctaagccctctaagtttattaactcaaagctcacagttctcggcaggacyaccctgtctcctccccagtccctggggtgagtgggtgggtttgcaggacccgctaagtgccatcctcccctcctctctcagggctcccggagcgtgtggagctggcacccctgcctccttggcagccggtgggccagaacttcaccctgcgctgccaagtggaggrtgggtcgccccggaccagcctcacggtggtgctgcttcgctgggaggaggagctgagccggcagcccgcagtggaggagccagcggaggtcactgccactgtgctggccagcagagacgaccacggagcccctttctcatgccgcacagaactggacatgcagccccaggggctgggactgttcgtgaacacctcagccccccgccagctccgaacctttggtgagagaaggggcttcagacggtgggtgacgagctgagccagggtagacggtgccctgaccttggggttcctgagagtggggtaccccggacctcacaggcttctgggaaggaaagcccccggccactgggcaaggtggccccggaagggaggcccgagccgtgggatctttgaagaaggccgttttcatggccctgtgtgtgtgtcctgtgaagaagggtgacccagtcagcaagatatcctgactgggggggatgagggtgtcctggggaaggcacagtcctgggggttgtactatgcccacctttctccccagtcctgcccgtgacccccccgcgcctcgtggccccccggttcttggaggtggaaacgtcgtggccggtggactgcaccctagacgggctttttccagcctcagaggcccaggtctacctggcgctgggggaccagatgctgaatgcgacagtcatgaaccacggggacacgctaacggccacagccacagccacggcgcgcgcggatcaggagggtgcccgggaratcgtctgcaacgtgaccctagggggcgagagacgggaggcccgggagaacttgacggtctttagtaagaggaggcgtgggaagggggcrcggcctcagcagtctgggggcgtggcagagggggcggagactagccgaaaaggtggggcctggcttgccccaatagcagttgcaacgtgggttgggcctgagtgcccgaagctggacacagcgcggaaagagggcgaggcttgaacggccgaaagcgtggcccggatatyccgagaggaaaggggagggcggagggagcggcttgacccacaggaaggtcctgttcattaagctcctgggcaatgccccgcctttaggcttcctaggacccattgtgaacctcagcgagcccaccgcccatgaggggtccacagtgaccgtgagttgcatggctggggctcgagtccaggtcacgctggacggagttccggccgcggccccggggcagccagctcaacttcagctaaatgctaccgagagtgacgacggacgcagcttcttctgcagtgccactctcgaggtggacggcgagttcttgcacaggaacagtagcgtccagctgcgagtcctgtgtgagtcggtcaccctgacctttaatccctccacccctkccctggaaagattagacgctcctctgcaccactgtgcctcgggtgtgttgggtgtctgatcacacatggtggttccacagatggtcccaaaattgaccgagccacatgcccccagcacttgaaatggaaagataaaacgagacacgtcctgcagtgccaagccaggggcaacccgtaccccgagctgcggtgtttgaaggaaggctccagccgggaggtgccggtggggatcccgttcttcgtcaacgtaacacataatggtacttatcagtgccaagcgtccagctcacgaggcaaatacaccctggtcgtggtgatggacattgagggtgagctaayacggggctgcgggtctggaccsgtaagccggggggcgggggggttggagacagaagggacgcatattgacttagcgctttctctgcacagctgggagctcccactttgtccccgtcttcgtggcggtgttactgaccctgggcgtggtgactatcgtactggccttaatgtacgtcttcagggagcaccaacggagcggcagttaccatgttagggaggagascacctatctgcccctcacgtctatgcagccgacagaagcaatgggggaagaaccgtccagagctgagtgacgctgggatccgggatcaaagttggcgggggcttggctgtgccctcagattccgcaccaataaagccttcaaactccctaatctgtggtttgattccacccgcgctgcaagtctctcccacccaggtgcacatccactgagtagcgtcgctgcgacggaagggggcggggcctgtggcgcgcagacgcagcttgaactcttgagaggtgggctggggcttagccaacggggcaaggggggcgggaaggaggtggggtttctcccagccaatcgacgggcgcgccctcgttgccgctctatgccgctccgccccggctcgctggtcccagaaggcgccgggtttcccaagatggcggcggacgtgtcygttactcaccggcccccgctgagccctaagtctggggccgaagtcraagccggcgatgccgcggagcgccgggcgccggaagaagagctgcygcctctagatccagaagagatccggaaacgcctggaacacaccgagcgccagttccgtaaccgccgcaagatactgatccggggcctcccgggggacgtgaccaaccaggtattggggggggcggtgtaggagcgtggcgggaaataccacggtgcgcgtgcgcggggggaaccgggcgacaccaacgctgaggtgcgcgggggtcgttggcgggggcgcccaagcaccggatccacgcgggatcgggagagaccaagagcgggacgtgggggggcgatgatgaaaggggaaaccgactgcgaagtgagggagggcgttgctaggggcgaccacaggcttgggcgacaccaagtgatggaagcgggcggggaatggaagggggcggacagctttggtcctgttggggaattgtgaatgggctggtacattggaccaccagttgccccctgcttggatgatgcttttctccacccactctaccacagggtggcgggrcctcacatccagaagtttcaggactgcggagagtacgcccctccatatcacgcgtttattcactgctctcagagataaatccggaagttaacagcagcccctgggtctcagcccccaaaacctcaggattaatttgggaaaatggggtcttctgccaccagcctacagacctacaggaaggaagcgaggcctgtgttctatggagcccctcgtggctaatcttcctgctaggagtgcccttctcatggggccagcatggggcagcgcttcccaatgctctttggacccagggaaatggcatctatactgccctgccctatggcggtgaaataggttctcgcttcctgctgctgagattccctgctctccggcccaccagcacaccgggtgggcacgtggctagtggaaccccagggatgttgggaggggctgaatttggggacagatcgggacagggatcattaaggatggtcaggtttctttctgggtcttcctctcagtgtctgcagtctctcagctgggaacacattgtctctcctgcaagatgcacagtgtgtctggtcccagcaggcgccagcactttgccttcaaagctggcttgagaggctgggcatggtggctcatccctttaatcccagcactttgagaggctgaggcaagaggctgtattgagcccaagggttcgagactagcctgggcggtatagtgaaaccctcatctctacaaaaaatttttaaaaattagccaggcatggtggtgcgtgcctgtagtcccagctacgcaggaggctgaggtgggaggatcacttgagcctaggaggttgaggctgcagtgagctatgattgtgctactacactctagcctaggtgacagaacaagacactatctctaaaaaaaagaaaaataaatgagctggcttggaagagggcagctttatcagcaggaggaaattgggaggcatgtgaacccacacaacgtggggcttactagaaggtgggctccccagtcaggtacccatgggtggctgcgctgcccaactgcatggcctccagcagatctcttcacttctcctagcctaagttttctcatatacaacatgagtttgttaatacttcacttacagagttgttggaaacagtgaatcttgcaaaaggaggttcatgcaggttaaatggcttccctaaaggcatactcttttttttttttttttttttttttgagacggagtctcactctgtcgccaggctagagtgcagtggcttgatgtctgctcactgcaaccttcacccctcgggttcaagcaattgtcttgcctcagtctcccgagtagctaggactacaggtgcacgccaccacagccagctgatttttgtatttttagtaaagatggggtttcaccttcctggccaggatggtctcgatctcttgatcttgtgacccgcctgcctcagcctccaaagtgctggaattacaggcgtgagcccggcctctttttttttttttttttttgttgttgttrttttttttttwttttttttttttttttgagacggagtctcgctctgtcgcccaggctggactgcggactgcagtggcgcaatctcggctcactgcaagctctgcttcccgggttcacgccattctcctgcctcagcctcccgagtagctgggaatacaggcgcctgccaccgcgcccggctaatttttttgtatttttagtagagacggrgtttcaccttgttagccaggatggtctcgatctcctgacctcgtgatccacccgcctcggcctcccaaagtgctgggattacaggcgtgagccaccgcgcccggccttgttgttattgttgttgacagtgtctccctttgtcacccaggctggagtgcagtggcacactgcaacctctgcctcctgggtgcaagcagttctcctacctcagcctcccgagtagctaggattacaggtgtgcgccaccactcctggctaatttttgtatttttagtagagacaaggtttcaccatgttggccaggctggtctcgaactcctgacctcaggtgattcacccgcctcggcctcccaaaatgctgggattataagcgtgrgccaccccgcccagccagctaaaggtataccctctaagagcatgttgcctgggtaatagcacagtctgcagctaggttctgaatcccatctctgccaggtatgagcagaatgaccttgacaaaattactgcatcgagcctcagtttcctcattggtaaaatggggggtggtaattgacctgccttcatagctggtggcagctatgaagcggcactgggttgcccccttccatctccagtaactccctgtcttttgtcttgtatctccacaggaagtacatgacctgctcagtgactatgagctcaaatactgttttgtggacaaatacaaagggacaggtttgtggggccatggggygggccagggcagggagtgaccatccctgaagatgggagggcctrgctcactgtctgctgctctgagcttcaggcccagtattgccccccaggccaacatggcaggttgccccaatctgcctgtcatcctgtcatcttgggacagccttcatgttctccttggagaacactgggcatcgggctgattctcttcctactccactcgcttggcattgagctaattcttgacaacgtttggccgtgggttcattctcttcttacccctcttgcctcactcagccagtcacccctgcttgtgtggtctttttttttttttttttgagatggagtcttgctctgtcgccaggctggagtgcagtggcgcgagctcggctcgctgcaacctccgcctcctgggttcagcccattcccctgcttcagcctcccgagtagctgggattacaggcatgtgccaccatgcccggctaatttttgtatttttagtagagacagggtttctacctgggtgggtccaggttaaccaggtgaggaggtggggctcagtgttccatgctcaagaaacagcagctgcaaaggcccctctggagtgtgcctggcgtggtccgggtggcagcggtgagatgggaggggaggtcagcgagcccgcacaggctgcactgcaccctgcagctagaagccacaagatggatgtggcgtgatcgttttgaacaaagcttcctgcggccgctgggtggatcgcaaatctggggcagcacgtggcagcagggttcaggggcactggtggcctggaaaggtggcaggggtgggcagtgtgtagagtgggcctctggagtccggctgcctgggttcaagtccaggctcccctactcggggcacaggggtgctgctctgggcccgtttcctctctggcaaaatggtgattgtgatgattaagttatatccatttgagagatgaggaaactgatacccccaaagccacctggggcttggggcttaaatctgggccccagtgagcatgggcttaaccactgcccttggtatcacccgagtgacccacagcgttcttaggacagagccaggcccacagttggtgagcgctgctgtgggtgcaggtggacgcagggctgggagagggagtgggcttcgtggagcctagagtcaatggcaggcgctctcgcctgtgtgagtcgccaaggctggcaactgctcagatcagcaggcacctgagatgcccagcatttggaggtcccacctggtttgcagggtggcggggtggaggggcaggccctcagggcccggctgacctcgcactgccctcctcccaccgcagccttcgtgaccctgctgaatggggagcaggccgaggccgcaatcaatgctttccaccagagccgcctgcgggagcgygaactgtcggtgcagctgcagcccacggatgccctgctgtgtgtggccaacctgccccccagcctcacacagcagcagttcgaggagctggtgcggcccttcggcagcctggagcgctgcttcctggtctacagtgagcgcactggccaatccaagggctatggctttgcygagtacatgaagaaggactcggctgcccgtgccaagtcrgacctgctgggcaagccgctgggaccacgcaccctctacgtgcactggacggatgccgggcaactgacgcctgcccttctccactcccgctgcctctgtgtggaccgcctgccacctggcttcaacgatgtggacgctctgtgccgggcgctgtcagctgtccacagccccaccttctgccaggtgagccctgtggagagcattggggagcaggtgccaggcccggagcacctgagagagtctttggagtcatctgccttttcttttttttttttgagacagtctcactttgtcacccatgctggagtgcagtgatacaatctcagttcactgcaacctccgcctctttggttcaagcaattctcttgccttaacctccagagtagctgggattataggcgccccgcccccatgcctggataatttttatatttttagtagagatggggttttgccatgttggccaggatagtcttgaactcctggcctcaggtgatcctcccaaagtgctgggattacatgcgtgagccaccacacctggccaggggatttgaatccctctgcagcctcaggcctcactgtccctctatcagatgcatgcaaggccactcttgtaactatggatctcgaggcttgctcaccactcacctcctcattcgctggtaccctcgtcaaacctcccatggggtcccagacctggaccaggcattgaggaggctgcagaggagcccacagtctatttgagccttgaggtcagagactgaggctttgccagatcccagccccgccctcgagctcgggccagtcactggctctctgatctgcagtttccctcctccataagcagggactcaatacttgcacaatgggttggcaaaacagtcccttgttcattcaagccacacatgccaggcacttctgtgtgtgtgcctcgccctgtaacaggtgcagtggggcgagaacaggccagactcactctctaagagcccccagaaggtcttgatccccagagatcccaaaggggacattcccccagcactcgctgtggactctgagtacrtaaccttcagttgcttcatcctgtagcaaccctgagaggcaggtatcactcccattttcaggtgaggataccaaggcacagaggggtcaagtaacttgcctagagttaaacagccagggtctggcagagctgggatcagaacaccgcagcctagctccagagcttgggccagtgagcggaggccagtgcagaggcttaaaaggggtaggcctggccaggtgcagtgactcacacctgtaaccctaacactttgggaggctgaggcgggcggatccctcgagcccaggagttcgagaccagcctgggcaatatggtgaaatcctctctatacaaaaattagataggtatgatggtgtgcctgtagtcccagctactcaggaggctgaggtgggaggattgcctgattctgggagtccgaggctgcagtgagccatgatcgcaccacagcaccatgacactacagcctgagcaacagagctagaccctyatctcaaaaacagagagacagtcctgggctcggacccccagctctgtgggcttgagtgggtccctctcgtgtaagtggggtattggtgccccatttaaactaggtgtctgttgggaggcagaggcaggaggatcactcgagaccaggagttcaagactagcctgggcaagatagtgggacaccatctctatatttaaaacaagaaacaggctgggtgaggtggctcatgcatgtaatcccagcactttgagaggccgaggcaggtggatcacttgaggtcaagagttcaagaccagcctggccaacatggtgaaaccctgtctctactaaaaatacaaaaaaaattagccaggtgtggtggtgcaggcctgtaatcccagctactcaggaggctgaggcaggagaatcgcttgtacctgggaggtggaggttgcagtgagctgagatcacgccactgtaytccagcctgggtgacaaagcaacactgcatctcaaaaacagaaaaaaaaaaaaaaaaaaaaaacaggccaggcgcagtggctcacgcttgtaatgccagctctttggaggccgagacggacggatcacctgaggtcaggagtttgagaccagcctgacaaacatggagaaatcccgtctctactaaaaatacaacaamaaaaaaaaggtagccaggcatggcgccacgcgcctgtaatctcagctactcaggaggctgagacaggagaattgcttgaacccagaagactgcggttgcggttagtggagatcgtgccgctgcactccagcctgggcgacagagcgagactccgtctcaaagaaacaaaaaaaacaaaaactgagtatccatgagccacgggaaccccctctctgtttacttatcattcatccattctgctgctttctcttggacacctgctacgtaccaggcctgctatgtaccaggccgcctgtgcgggctcaggacagaagatgagttagcacaatggcctcacctttcttttattttattttatatttttttaagacagagtcttgctctgtcacccagtctggagtgcaggggcgcgatcttggctcactgcatcctccgcctcctgggttcaagtgattctccagcttcagcctcccgagtagctgggatgacagcgcctgacaccacacccagctaatttttgtgtttttaatagagatggggtttcgccgtgttggccaggctggtcttgaactcctgacttcaggtgatacacctgcctcggcctccccaagtgctgagattacaggtgtgagccactgcgctggcctggccttaccttcttatgtggagatcaaaggtcacagggtcatgaccagctacaggtactctcctagcctgtttccacatctcaaaatrgggctggcagtgcttcatgatcaggttgttgtgaacagctgcccattcattcctccactcgaacattcactaaacttaattttttttttttttgagacaggttctcaatcacccaggctggaggagtacactccggcctcgacctcctgggttcaagaaatcctcctaccttggcctcccatgtagctggggaactacaggaatgcgtcaccatgcccagctgatttttaaaattttatgtagaggccgggcacagtggctcatgcctgtaatcccagcactttgggaggctgcggcgggcagatcacttgaggtcaggagttcgaaaccagcctggccaacatggtaaaaccctgtctcatggcacggtggctcacgcctgtaatcccagcactttgggaggccgaggtgggtgcatcacgaggtctggagatcgaggccatcctggctaacatggtgaaaccctatctccattaaaaatacaaaaaaaaaaattagctgggtgtggtggcatgtgcctgtggtcccagctatttgggaggctgaggcagaagaatcacctgaacctgggagacagaggttgtggtgagccaagatcccactactgcattccagtctgggtggcagagcgagactccgtctcaaaaaaaacaaaacaaaaaacaaaaaccctgtctctattaaaaatagaaaaaaaattagccaggcgtggtggtaggtgcctttaatcccagctactcgggaagctgaggcaggagaattgattgaaccagggaggtggaggttgcagtgagccaagatcatgccaccgcactccagcctgggcaacagagcgagactccctcaaaaaaaaaaaaaattatgtgaagatggggtctccctatgttgcccaggctggtctgaaactcctgtgctcaaacgatcctcctgcctttgcctcccaaagagctgggattatagattcgagccactgggcctggtctcaccaaacatttgttgagcatctgatgagtagcaggcgttgaagtgatgtcctccgaggagcccacctttaatgttaggtgacccygctgaatggagggtgggcttgacagtgaagcagcttgaggttcacacatcagtccctcgacttaggaattgtgtggccttgatcactctgtgacccctctgagtctctctctgttcatccctaagatgggtgtgtttatggccgggcacagtggctcacgcctgtaatccagcactttgggaggccaaggcaggcggatcgcttgaggtcaggagttcaagaccagccttgccgacatggtgaaacctcatttctactaaaaatacaaaaattagctgggcgtggtggtgcacacctgtaatcccagctaccaggaggctgaggcaggagaatcacttgaacccaggaggtggaggttacggtaagctaagttcacatcactgcactccggggtgacagagcaagactctgtctcaaaaaaaacaaaacaaaacaaaagccgacaggtttggttatgggagatctgtgcccagaccttggcacagggcgtgggcagaggtgaagggctgctacctgcacctttgctgcccgggcattcagcaagtgccggtgcccagcccaaccacttcccttagcactgctacctggcttggccactgtctggaaygagagcccttccttccccacccgttgctgattatctcttttttttttttttttttgagatggagttttgctcttgttgcccaggctggagtgcagtggcgcgatctcggcccaccgcaacctctgcctcacaggttcaagtgactctcttgcctctgcctcagcctcccaagtagctgggaatacaggcatgtgccaccacgcctggctaattttgtatttttagtagagacggggtttctccatgttggtcaggctggtctcgaactcccgacctcaggttatctgcccgcctcggcctcccaaagtgctgggattacaggtgtgagccaccgcatccgcccgtggccttggctttgttggtgaggtggctcccagctccgccctccctccagctgtgtggccttgggtgcgctgacctctccgtgcctcagttgccttctctgagaaatgggtatgatgcagcctcccagggtcattgggaaaatcagatgagctgatgcaggaatgaggcacagggcagtggaggcctggcgtggagttcacccttatggggcagctgagtctggttacggttgtcacttcccggggtggtgcagtcactgctgcccagatgctcatgactgcctgccttcctccggcagctggcgtgcggccaggatgggcagctgaagggcttcgcggtgctggagtatgagacggctgagatggcggaggaggcacagcagcaggcggacggcctgtccctggggggcagccacctgcgagtctccttctgcgcccctgggccccccggccgcagtatgctggccgctctcatcgctgcccaggccacggtgagcctgtgcgggcagaggtggcggggtggggatgggagccccatggggatgtcagggccccagcggcactctgagctgcttctgttccttcctgcaggccctcaatcgggggaagggactcctccccgagcccaacatcctgcagctgctcaacaacctgggcccatccgcgtccctccagctgctgctcaaccccctgctccatggcagtgcgggggggaagcagggtaaggtggggctggacaggggccccactgtgcagaacaggggctgcagcgctgcccccggcacttcccgaaactgctcatcttggctgcagtgacaggagccccaggagtagggccgagggggagtatggagtcatagcgggggctgctgctgtccacaactgggggccgggaccagggccacacagcagcctgcagtgaggtggggtgctgacaagagggggctgaccttcactggagtagcctctgccccttctaggcccttcctttgggcaagtccactgcccaccccccggccccagagtgtcagtttcctgccccatcaatgggttcagggctgtgtttcgtgaggtggggcagggaggacacagggacccccacacatcctcctatgtctccctccaggcctcctgggtgcccccccagccatgccgctgctcaatgggccagccctgtccacggcgctgttgcagctcgccctgcagacccagggccagaaggtaacacacgcatccccctcacccactgctctacagcccctacaggctcttttcaacacagctggtgcgatcggtggggtggggggacctctggctgtgccctgggggcgcagaaccagggtgagggcgactcccccaaacccctgcctttcccacccacatccccatccccctctggcaattgctcatgatggttcgccatctttccctccattctgagagcgcccctggacttggtgcctggggtggggtcaggggacctggacacgcccatttacagcctgaaactgggtgtgggctgggagcgccgctgctgggcaccagtttgtgaatagactctgctcggaagctctatagacatgcctgggaaaaaactccaggtctatcccctcagtgygtgcrcacacacacacgcacacctagaaacacaggtatacatatagactcacacatacaaagatgcaaatatacacacagagacatagacacacaaagacataagacaaagacacacacatagacacagacacacatatagacacaagacagactcatgcacacagaaacaaagacacagatatacacgcacacacacacacagacacacacacacatagacatacacccatgctccgtcctgtctggtgtggttccctggattctaagtcaggtgtgtctgtctggtggtaactgacagaatatgtgagcctgtgggtctggccttctgtgactaaaagtggctgaaacactgtgtggctgtcccattccatgtggctgcagttgatactgtgctgcaatcattggccagggaactggggcctggagctcaggagaccctcggtcaccatggctgatgggacagtgatagagttggagtgtggcgggcactggggaaccctgtgcctgtctgcccaggatcggccrtgccctggagttggggtgtgtctgccaagactctgggccacacctgtctgcttccctgggccmccctgcccccatctgcaactgtctgtgctctgtccctagaagcccggcatcctgggagactcacccctgggcgccctccagcctggggcccagccagccaaccccctcctcggggagctgcctgcaggtaacgcagaccctgcccacacggtgtcccccagccacttccccttccttccctgctacgtggcctcgggtgagtgacccaacctctgggtcccagcgcccttgtccatcagttgggtgccctccactcagggcccagggatgagctctgctcagtggccagcatggatttgtctcttgacccctgggccctggtccaggtgggagctggagggccctggggagaggggtcctgtgagcctgggcccctgaaatcctccttccctccctaggagggggcctgcccccggagctgccgccccggcgagggaagccaccacccctgctgccatccgtgcttggccctgctgggggtgaccgggaggccctgggcttgggtcccccagcggcccagctcactcctcccccmgcccctgtggggctccgaggctctggcctcagaggcctccagaaagacagtgggcctctgccgacgccccctggggtaaggccctgccctgcgcgcggcaccacaccagcctcctgttccgcagggttccctctcccgggggccctctcgaatcctgccttcccgccacaggtctcactgctgggggagccccccaaggactaccggattcccctgaatccctacctgaacctacacagcctgctcccggccagcaacctggcgggtaaggaggcccggggctggggaggcgccgggagaagccgccgcccagctgagggccccccaactaaccccccagcccctggaggtggcagcagcagcagcaaagccttccagctcaagtcccgcctgctcagccccctcagcagcgcccgcctgccccccgaaccaggactgtctgacagctacagcttcgactacccctcggtgagtgcctggctgcagctctctgtcccctaaggccaaatcattctccaaactgatatttctctaggattgactatgccaggccatgtgctagggaggcggcagggaacgtgccagatatggtctctgcttttttttttttttttttttagagacagggtctccctctgctgccctggctggagtgcagtggtgcgatcatagctcactgcagcctcaacctcttgggctcaagcgatcctcacacctcagtctcctgaggagctgggaccacaggcaygcacctccatgcccagctaatttttaaatttgtggtagagacggagtctcattgtgttgtccaggctggtctcaaactcctgacctcaagtgagccacccgcctcagcctcccaaagtactgggattacaggcaagagccaccgcgcccagcctcatgcccttaaagtttcccgtctgtctgcacatcaccccctgcttccggtccacctgcctgtctgtccattctcgagccctggaggatcttgggtctcagtctgtctgtcatcctgcgtctgtctttctctcccaagaggacttaggccacactgtctctccccagagacagggcttgccctttctatccctctctcccacctttgattcctgtctgtgcccctggagatttggtccttctatgatgccaacctccttggcaggtcagaaattgcaaactgggccaggcacggtggctcatgcctataatcccagcactttgggaggccgaggcgggcagatcacctgaggtcaagagttcaagaccagcctgaccaacatggagaaattatatattataaaatatataataaaatatatatttcatatataatataaaatataatttatgttttatactaaaaatacaaaattagccaggtgtggtagacatgcctgtaatcccagttactagggaggctgaggcaggagaatcacttgaacctgggaggcggaggttgtggtgagccaagattgtgccattacactccagcctgggcaacaagagcaaaactccgtttaaaaaaaaaaaagaaagaaattgcaaactggccgcccacaggtcacctgggtgatgtttggccccctctgtgtttcaaacaaataacaacaggaactaacgccaacacaggaaaactgcaagagtccacacagctcgaattcccagcttgcctgggaaactccaaacacttaggcccatggggggcaccccccttcacagcagccatccctgccaagctgcatccagccccaaatttgcctcttcctggtcccagagtggtggggactgtcttccctgatgacagctctgccatggagttcagccaggggtgaggctgggacagactccaacccaatgtgcttctcccgctttcattcaggacatgggacctcggcggctcttctcccacccacgggaaccagcccttgggcctcacggacccagccgacacaaggtaagagccacctggtatggcatgtgtagcaatcagcttttactacatgacaggctgtgccatgacttagtagcctggaacagcagaccttgtattttgtgtgttctttgtgggtttttttaagacaggatctcactgtgttgcccaggctggagtgcagtggctccatgatagctcactgtggcctcaaactcctgggctcaagcaatcctcccactttggcctcccaaagtgctaggatcacaggcatgagccaccataccatgccaggcattktattacttcttgccactctatggggcagtgggcggtccccggcactcacctgggtctcagtgagctatgtggcctcacatatttggcgtccacaggctggaacagtttctstgtgcccattcgtgcggtgatgatccctgggttcctggaggaggaagaggaggcgggtacccacgtgccagctctcctcagtcctattagccaaagctagtctttgcaaagcccagaactgccgggcatggtggctcacgcctgtaatcccagcactttgggaggccgaggtgggcggatcacctgaggtcgtgagtgtgagaccagtctgaccaacatggagaaaccccgtctctactaaaaatacaaaaaattagctgggcatggtggcgcatgcctgtaatcccagctactcgggaggctgaggcaggagaatcgcttgaacctgggaggcrgagggaagattgtatacaaagggctgggtactacaattgtctgcttcactccaccggcccttyttctacagatgtcccccccgcccagtggcttcggcgaacggagcagcggtgggagtggcgggggccccctgtctcacttctattcaggctcgcccacttcctacttcaccagcggcctgcaggctggcctcaagcagagccacctcagtaaggtgaggaacctctctggccaagcacaggccccctgggacagctaggatttgggggtgcctgccaccggggctctgtaaccctcggtgcccaggccaaagctggggtggtggcagrggttggtcttgctcagggtggagtagcaacagcctattgtcctccatccactctgcatcaagcacctagcactgccagcattccgggctttctgtcacttcctctctctacagcccaggctgtgggtgctactggccccatctgacagatgagaaaaccgaggctcaaataaaatggagcaattggccctaggtcttatagctagaaagtagcagaagcaagatttgaacctgaaactgttcgctttccctcagggctggggggcagtggcaggggggcggggtgggtgcttcctctggcccccagggagtgacctgttccacctctccatttctcccaggcaatcggctcttccccgctggggtccggagaagggctcctgggcctcagccccgggcctaatggtcacagccacctgctgaaggtacgggcagggggtggggacatgcagggctgggaagccccggccccccagcggcccctgacccgccccgccctgccctctgtctccagaccccactgggcggccagaaacgcagctttgcccacctgctgccctcgcccgagcccagcccagaaggcagctatgtgggccagcactcccagggcctcggcggccactacgcggactcctacctgaagcggaagaggattttctaagtggctggcaccagagataactcaagggcctgcaccaaatcgcttttgggttttctgatgttttgttttgtgttttttttaaaccattttctctctttcggtaatagaaaaatctctgaaagactttactgaccaatcagccggagccccaggagcccaaggggtgtgggggagtctggaggcctcattatgtctctggcttgctccccacgctgaaaccctgcagccttaagagagaggggccccggcctgctctccctccctccccccatctcctcctccgctgtgcccgtctctccggagccctcctgcctcattgctcctgtaattttggcctttcgagtgccttggaggtttccctgacctcccgtgaagatacagagactgtctcctttttttttaactttgwcaactgacttctgtttccttttctaagttttatttttcaaaccaccccggacagcccccagctctgattccttcaaggcccggcctgtccgggccaccattccacaccttgcggtttgaaacagctgtttttcccacatttgctgcaggcatggctgtctcctgcccctgcctgcccatctggcctataccccagccgtggggcccggggtccctgccgcagccccctccccttctgatgccttaaaagctgggccccaggccctgctggccagagccacagatgscaagctctgggagcttgactatggaccaaacagctctggcctagggattgggccaccctacccaggatctccaccctggggacagtagaaggggaaagccttcatcttggcgaaccggccccaccaccccctcctacccgggcctccgtgcagagatgggctttctctgccagtcccctgctgtctgtmtgtgggagtcggacattgtgcccatctcccggagcctctgctgtcactcgcttgttgaagatgaattcttgaattctgcctgcccacccccggccagatccctggagctggcctccttccagcccagtgccagaaaccagcactccatgaagataaactctgggcccgcccaccagcaggacctgtcgacctgaggtgaccctgggccttgcccccagccaactgggccaccagcttccctcccttgactctgggggtccacatccactccaaggggactattcccccgaccccaccccagtctccccacacggacctttgctgaattaaagtttgtaagtaaatggttttaaagaaatcagagttggctggttcttgggacaaacagtgggcttgagtgggaggtctgggatggccccgcgggtttacctgagatggattccgccctgctcttcccacctggtcaccgcaggccctaagcaaacatctgcgcttatgttccattgattatgggctttccctcgcctccctggcgcggcgcatgctcagtcggtgagtcacgtgatgcatgtcatggccgcctccatggcccggggaggcgtgagtgccagggttctrctgcaggctgccaggggcacctggtggaacrgacctgggggcacttccgggtcgggggagggggtggcgctggggacaaccagaaagtttcaagcgacaggtayctggggcgcccrgggcgggcagcgttaatccgtcagatgccggcggggcggggctcggcgcagccgctcaccgaaccgtgttttccaggctcgcgcccggckggagaggaggacgcgggcggcccggagcggcccggggacgtgtgagtgcagggggccaagtcccccattcctcatcccacggaattcctctggtccccatcttgccctgtagcttcatctcgaggtcccccttctgctttgccctattcagtacctgtgcgtcaagcctcaattcctacttcctaaccctagattctacccgggccctgagcccatcatccagttcggcattcgcacttycatctgtccccagggtgaacgtggtgttcgtagaccgctcaggccagcggatcccagtgagtggcagagtcggggacaatgttcttcacctggcccagcgccacggggtggacctggaaggtaggaaccgggcagagggaattaaggaggtccttatmcatttgtccaaaaaaaaaaaaaaaaaaamccacaaatyaggtgtgtctcttcacgtctttttcccaccaaatatggactaaaatccaaacccctcaccatggcctcatctgttgccaagctcttatttgttaagcatttattagagatcactaggactcctggctcccaggattttgtgttctcttcccccttcctccctgtattctagccacattggctttctttttgttgttgttgttttgagatggagtttcactcttgttgcccaggctggagtgcaatggcttactgcacctcagctcactgcaacctccacctcccgggttcaagcgtttctcctgccccagcctccagactagctgggattacaggcgcccaccaccaagcccagctaatttttgtatttttagtagagacggggtttcaccacattggccaggctggtctcaaactcctgaaaggtgatccacccgcctcagcctcccaaaatgctgggattacaggcatgagccaccgcgcccagcccacactggctttcttgtggttcctcaaacaaccaagctcattcctgcttcggggcctttacatttgctgttccctctgtctgaagtgctttcccagcaaacattctggctctttctcatccttcagacctcagtgtaaatgtcatgtccctaacaatcccattcccctcagcccagctgaagtacccatgccctagttactctgtcttatcagtgtgatatgatatatagcacttctcactttttttttttcaagagacggagccttgctgtgtcgccaatgctggagtgccatgatgcaatcatacctcactgcagccttgaactcctgggttcaagtgatcctcccacctcagcctcccaagtagctgggattataggcacaagccacaatgccaggctgttttgtttcctactttgtcatctgtcccccagtgagattggtgacccatgtccttattcatgcttatctgttgcctgtcargatgtaacagatgtttgataatttgttgagagaaaaataataatagaaatttcttgtccaggcrcagtggctcatgcctgtaatcccaacactttgggaggccraggcaggcgactcacttgaggacaggagtttgagactagtctggccaacatggcgaaaccctgtctctacaagaaacacaaaaattagctgggcgtggtggcacatgcatataatcccagctacttgggaggctgaggcacaagaatcacttgaacttgggaggcagaggttgcagtgagccaagatggcaccactgcactccaggctgcatgacagagcgggactctgtctcaaacaaacaaaaaaaaaaggccaggcgcggtggctcacgcctgtaatcccagcactttgggaggccgaggcgggcggatcacgaggtcaggagatagagaccatcctggctaaaatggtgaaaccccgtctctaataaaaatacaaaaaattaggtgggcgtggtggcgggcgcctgtagtcccagctactcgggaggctgaggcaggagaatggcatgaacccgggaggtggagcttgcagtgagccaagatcacgccactgcactccagcctgggcgacagagtgagactgtctcaaaaaaaaaaaaaaaaaaaaaaaaaatatatatatatatatatatatatgtctttaaccatgttaataaatattcactgactgaatcttcatgacaacttgagtagtagagactgttattccctattatagatgaggcaactaaaccccaggttaagtagacctggtctaagggcaagtgagtgacaatactagactcaccagtccattgtagccactaatctgtgctgcctttctatgaatacctactgcgcgtcaggcagcaatatacaaaacaaataaggcctctgtcatctcacatccatttcggtctaatagggacaataatcccacaggtaaatacataattatgaccaacttgggaagggttgtctggaagaaaatatatagggtttgcttttgggatgaatatatcagggatcctgattttatcattaaaggggaagatatgttgggaggggttatgaaaggcctacctaaagttctgttctggaatccagcrgccaatagtctaggacagggattggaatgtgagatagatttatttgttcatttatttatytgagacagagtctcgctctatcacccaggctggactgcaatggcatgatcttggcttactgcaacctctacctccagggttcaagtgattctcctgccttagcctcccgagtagctgggattacaggcaactgccaccatgcccggctaagtttttgtatttttaatagagatggggtttcgccatgttggccagggtggtctcaaactcctgaccacagttgatctgcctgccttggcctcccaaagtgctgggattacagacatgagccactgtgccgggctagtagaggtaagtggcctggcaaggtgtggtggctcacgcctgtaatcccagcactttgggaggctgaggcgagcggatcacgaggtcaggagatcaagaccatcctggctaacatggtgaaaccctgtctctactaaaaatacaaaaacaaaattagccaggcatggtggcaggcgcctgtagtcccagctactctgggaggcggaggcaggagaatggcgtgaatccgggaagcggagcttgtagtgagccgagatcacgccactgcagtccagcctgggcaacagagcgggactccatctctaagaaaaaaattacaaaggaaaacaaaggaatgaatgagggggatgggggaactgcaagactaagtgaaggagtttggattttattctgagtgtgaaaaccctttggaaagttttaggccaggagggacatgatccccaagcaccggtctctgtgatcagaggatgtgggggtgtgaccaagggcaggtggtcagcagaaaacttcaggttctgtctctttcaaccctaattcctggtctggtgcagtggcatatgcctgtagtcccagcattttgggaagccaaggcaggcagattgcttgagcttaggagtttgagaccagcctgggccacatggtgaacctcgtctctacaaaaaaaaaaaaaaaaaaaaaaatatggccaggtgcggtggctcacacctgtaatcccagcacttagggaggccgagataggtggatcacctgaggtcaggagttcaagaccagcctggccagcatggcaaaaccccatctctactaaaaatacaaaattagctgggcgtgatggtgggcacctgtaatcccagctacttgggaggctgaggcaggagaatcacttgaacctgggaggcagaggttgcattgagccgagatcataccattgcactccagcctgggcaaagagagcgaaactccacctcaaaaaaaaaaaaaaaaaaaaattagccaggtgtggtggtgcgcacatgtagtcccagctactcgggaggctggggtgggaggatcgcttgagccgggaggttgaggcagtaagctatgactgagccatggcactccaggctgggcaacagagtgagaccctgtctcaaaaaaaaaaaaaaaaaaaatcctggccgggtgcagtggcttacgcctgtaatcccagsactttgggaagctgaggygggcagatcatgaggtcaggagatcaagaccatcctggctaacatggtgaaaccccagctctactaaaaaaatataaaaaaattagccaggcgtggtggcaggcacctgtagtcccagctacttgggaggctgaggcaggagaatggcgtgaacccrggaggcagagcttgcagtgagccgagatcgtgccactgcactccagcctgggcaacagaacaagactccatctcaaaaaaaaaaaaaamaaaatcctaatgcctgattccttcccccaccacactgactgctgagtcagccggtccatcctccaagagcagyggagaggtggggacacattagcccagcacagtgatagggtcacagcaagggctcacagactgcggggagcctgcctggcctttcccctctcagctacctggcagccaagtccctgctccttaatggttctgcatctcagcctgctagggagtccctgggaaatggggcctcccagatgtccgtttgtaaaccctacacactggggaacagctagctgaggacattgaggacatgacacagtgcctggtacacacagtggagctgcaggcccaggagggagacgtgaggcacgtggtggaagagaggtctactcctctacgccattcgcatagcagccccttcctgactctgccactcacctgcgcccccttcacttcccacccctaggggcctgtgaagcctccctggcctgctccacctgccatgtgtatgtgagtgaagaccacctggatctcctgcctcctcccgaggagaggtgagtgggtcagccctgtctagctggcagcttcaccctggagcattcagcagcccccaccatcctccccacttccagttcctggaatgggagctgcctcccccaccactaccccctgcgctcagtcagcttcctccctccccsacctctggccccccacccacccagctagcttgccctcggctaacactgcccgtgtcaccaccctagggaagacgacatgctagacatggcccccctcctccaggagaactcgcggctgggctgccagattgtgctgacaccggagctggaaggagcggaattcaccctkcccaagatcaccaggaacttctacgtggatggccatgtccccaagccccactgacatgaacacctggaccattccacattgccatggccccagggcccagattgagggaatagccaggtgccagccctgcccagagtgcggacaggcccgggagagacgtggaagcccctgtgaaggacaacacccctgcttgggagagagtcccatgtccaggctctggtggggacagggcccctagtggggtggccttccccaggcccctgagaatcagggtttgagtaggagtggactcatattggagctgcaataaatcgataacacaggccccagcatgttgagtgtccttgggggacagatctggggtctacaggtggctcacacctgtaatcctagcactttgggaagccaagatgggaggatcacttgaggccaggagcttaagaccatcctgggcaacatggcgagacctcgtctctataaaaacagtaaaaattagcgtggagtggtggtaagtgcctgtagtcccagctactcgggagactgaggtgggaggatcacttgagcccaggggatttaggctgcagtggagcggtgatcaggccattccactccagcctgggtgacagagtgaggccctgtctcaaaaaaaaaaaaaacaaaaacaaaaacaaaccacacctgcatctgctgtgctgggcccccggttctcttttccctctgggatctaagatgccgctggggatccaaggcagaggcctgggagcccccatttccgagggggagggctagcgtggaaggccccgccccggcagctgcggagggatttggtggggtccaggccgcccttgccacgcaggggtgcgcggatgacctgaaaaaagccagaaagaggaaaggtgccgccgaggctggtcgctctcagctggggctcatcgcatcctctaccaagagcgctcccaccacacaggtcccgcccctcccaggtgggtttcatcgggtgggcccagcgggacagggccgggtgaaattagggagggggctgggctggggcgcaatggaggccgagccaatcccggactcctcaatgccagcaaagcttctggcgccgccctgtctgaacctggagcggctgggaggatccccctcccaggagaagccgaggaccccaggatgctgcagaatcagtgagaggtgcgtaaggccaaaccccattccccggaccccgctagcacttcaccacctggctcagtgatcaaggggtyatgacctctctttgctggggttatcgagaagtggcaattttataatagttactgaaacttacaaagaggttctggtgcccagagacacttggggtcatctagggatcagaggccatgcaattccatgtctctggggctgatgtaggcactccccagggatcatccaggggttatggagggcaactcaataataatgaaaatgataaaaatcgtaatcatattatggcaagccagcggcgtggtggcgcgtgcctgtaagtcccagctactcgggaggctgaggcggaaggatcggtcgagcccaggagttctaggctgcactgagtcctgatcacgcccctgcactccaggcgggggtacagagtgaggctcggtctctaaaagaaacacaaagaaaaaaagtaacctttttctcgatcctgcagccagaggcttgatatcctgcctcggtcacctagggcggtccctgcctgggtgatctacgggtgccgtaaggggttgattgatgtggagggctgggcgtgcctgggaggcccacagtgggcgaggtgagttgcaattactgcaactcttaaaccttccacccagagttagaaatgactgaacctcaggtggggtgtgtagcctgtccaagggtacacaaagagccggcccaagttggaaccccctggccggctaaacccaggagtcacccaagaaaacgtgaccccactgcccttctccccaggtccctctggcctgcatgccaggagtcggtcaccgccctgtgcttcctccaagagacagtggagaggctgggtcagtcccctgcccaggacaccccrgtcctggggccttgctgggacccgatggctctggggactcagggccgcctgctgctggacagggattccaaggacacacagaccaggatcagccaaaagggccgccgtctgcagcccccggggactccctcggccccaccccagagaaggccccggaaacagctgaacccctgccggggcaccgagagagtggaccctgggttcgagggggtgactctgaagtttcagataaagccggactccagcctgcagatcatccccacgtacaggtaggggccggctggggccaggycgccctttctcccagttacaacgcaaacaccagtgtgggaggtaggggtgctcyctggcgtcggtgtggaccctcacctgtgctctacgttacacgtggcccagtctctggttgacaacttgagctggtgccagatacagtcctgccgctcctgactcagtggctccccactcccaatgtgagacctggtctctttaggaatcaggcctggccttgcttaggctgcagctgcggctgcggtgatttttcccaataatgctaacagctactatttgttggtagtgacaacaataagaggttaacaggcagtattttatgtgtatgggctcattcaaaagcctggggaggccgggcacagtggctcacgcctataatcccatcactttgggaggccaaggcgagcagatcacctgaagtcaggagtttgagatcagcctggccaacatagtgaaaccccatgtctactaaaaatacaaaaaattagctgggcgttgtagtgggtgcctgtaatcccagctgctcaggaggctgaggcaggagaatcgcttgaactcaggaggtgaagtcttcagtaagcagagatagcrccacctcactccagcctgagccacagagtgggactcagtctcaaaaaaaaaaaaaaaactagctgggaatggtaatgggcacctgtaatcccagctacttgggaggctgaggcaggagaatcgcttgaacccaggaggtggaggttgcactgagcagagatggcaccactgcactccagcctgggtgacagagcaagactccatccccttaaaaaaaaaaaaaaaaaagctttgggaagctgggcctggtggctcacacctgtaatcccagcactttgggaggccaaggtgggaggattgcatgagcccaggagttcaagaccagcctgggcaacatagtatgacccccagctctaatttttacctatttattgttattataaaaattataattatgacttttttaatcatgccgccaaaacaatatttttttttttttttgagatggagttgcactctgtcgttcaggctggagtgcaatgacacaatctcggctcactgcaacctctgcctcccggattcaaacgattctcctgcctcagcctctggagtagctgggattacaggtgcctgctaccacgcctggctaatttttgtatttttagtagagatggggttttgccatgttggccgggatggtctcgatctcttgacctcaggtgatccatctgccttgccctcccaaagtgttgggattacaggagtgagccgccaccatgcctggctgcttttttttgcttttgtttgtttgtttgtttttgagacagggtcttgctctgtcacccagggtggagtgcagtggcgcaatcatggctcactgcagcctggacctcccaggcccaagccatcctccctcctcagcctcccaactagctgggagtgcaggcctgtaccaccactcctggctattttttttgtttgtagagacggggtctccctatattgcccagactcccatctctttttaaaaatcaataaatcaaattttcaaagaaaaaaaaactgttgtattgggaagcccattttacagatgaggaaactgaggcacagagtaggagataatgtgtccaggctcacacagcaaggacatggagaactgggattggaacctggcaggctgtccctgtgcttactatttttcaaataataataataataattaggtcgggcacggtagctcatgcctgtaatccctgcactttgggaggccgaggtgggtggatcacttgaggtcaggagttcgagaccagcctggccaacatggtgaaaccccgtctgtactaaaaatacaaaaattagctgggcgtggtgtcgcgcgcctgtagtcccagctgcttgggaggctgaggctcaagaattgcttgaacccgggaggtggaggttgtagtgagctgagatgacaccactayactccagcctgggcaacagagcgagactccatctgcaaaaataataataataataataataatwttactaatgagaggcaaagccaggccattcagatattagttgcctcctcgggggatggctgataccttgatactaaatcttcatttcggagggctgttggggacaagctacagatcccccccagtgctaataccttgtctgccccacagcctgccctgcagtagccgttctcaggaatcccctgcagatgctgttgggggccctgcagcccacccaggaggcaccgaggcccactcagcaggcagcgaggccctgggtgagtcctgaaaacccaagagctataaatattttgggggccaatttcctgtcttccctgcctttctccctgccccccccttctccatcttgcttccccatttagagccctcagggaggagtcgcagcacccccctccacttgggctgagtcacccccacccccagcttcctcctctgcggaatgctgccatctgtctcccttcctggctttgctgtggcttagagctggcaactcccagggctgatccagagctaggtggggcctttactgagacccccacaaaatgcccgactccgcacaggcatcccgagctcacatgcttggcctctgacccctgccctttgacctctgacccttcagagccccggcgctgtgcttcctgtcggacccagaggaccccgctctggagagacgctgaagatgggacccctctctgcaacgcctgtgggatcaggtccttagaatggaggagggagttggggcgggggtccccaaatcagtccacgtgtaaccaggatggcctgtggggaaagcaaaaagcaaaacacctacctcttgggaaaagtggtttccttgtggcggtttccgggcccccactgcatcctaaatggcagtttcttgtcccccaaccctaggtacaagaaatacggcactcgctgctccagctgctggctggtgcccaggaaaaatgtccagcccaagaggctatgtggcagatgtggagtgtccctggaccccrttcaggaaggttaaacccagcttcaccctgctgagctgctgcttctgcctccgtttcaccagtgggagaatgggcagaagcagctctcctaggaggattggggaaagagccggcctgcctcctctctgccatytccagattcaaggatcccgggggaagacccaggcctcaggtggcagagcctgctaggggtcaccagccccttctccagtcagccttggccgaggccccctcaggagacgctctcaggaaggatgagcattgttacagcagggacaataaagtacagagatatgccgagagaaaaagcctgtgatttgggatcccgcctcctgtgcccctgtgccagcccaggaaggtggacaggtgttttctcgttggggttgtgaggggcgtgcacacacgtgcgcatgcacagagacacagtcttatccacaggcagcagcccccacacagggaattagccacatttaccacaatgtcccatgcagggaaacagccactacccacagacacacacaacagatacagaaagacacacacaagccgggtgcagtggctcacgcctgtaatcccaacactttgggaggctgaggcaggaggattgcttgaggccacgagtttgagaccagcctgggcaacatagtgagaccctgttatatacagaagggaaaaaaaaagacacatgtctagccaggcacagtggctcatttctgtaatcccagcactttgggaggctgatgcaggtggatcacctgaggtcaggagatcgagaccagcctggccaacatgatgaaaccccgtctctactaaatatgcaaaaattagccaggcgtggtagcatgtgcctgtaatccgagctacttgggaggctcaggcaggagaatcgcttgaacctgggaggttgaggttgcaatgagccaagatcgtgccactgcactccagcctgggtgacagagcgagactctatctcaaaaaagacacatgcaagacagccgtgcgtgctgacagacacatcagcagagacacacgtcgacagggatatgctgacacgtagctgagtcacacacagatacagcccacacaggacacatgcaccagacacacgtaaaacacacaagtagatggcacacactggcagcatataccagtggatccttcatctgtcacccaacccctgcctgcagtgtgtcactctccttagcccctgctgtgtcccctacccccttttaagatctccctaatccagccaaaatgtgtctcccgggcctgaagtcaaaagccccaagtcagaggcatctttcagcaggcgggacacacaggccaccagcactcacagggagggagggaggatggagagtcaagactggtggcgggctgggcatggtggctcacacctgtaatcccaacacttcagaaggcagaggtgggaggatcgcttgagcccaggagtttgagaccagcctgggtaacacagtgagaccccgtctctaccaaaaaatcaaaaaatgagccaggggtggtggtgcatgcctgtagtgccagctactcaggacactgaggtgggaggatcacttgagccctggaggtcaagactgcagtgaaccgtgatcgtaccactgtactccagcctgggtaatagagggagacttggggaaaaaaaaaaaagtagggtgggcatggtccttgctgtgggcgtgagtgagccacaaagccacacacccttatgagatcctctttgtctctcctgggcagccctgaatgggagaactggagtccagattcctctgccctcagatccctgaattatttgatcttacccttccttggcctgaaacaccctccctccacatctccccatggctgacaccttctaatcgcttgaggaggcctggccccaacatcagctcttcagagaagccttccttgaccactcagactaaaatagacacctcccccgactcaggccgggtgtggtggctcacacctgtaatcccagcactcagggaggctgaggtgtgaggatcacttaaactcaggagtttgaggctgggcttggtggctcacacctgtaattccagcactttgggaggccaaggcaggaggatcacctgaggtcaggagttagagactggttaacatggtgaaaccccacctctgctaaaactacaaaaaatagccgggcgtagtggcaggcgcctgtagtaccagctacttgggaggctgagggaggacaattgcttgttatctacagaatgaaaaaaacaagacacatgcccagccaggcagagtggctcattcctataatcccagcactttgggaaactgaggcaggtggatcaccggaggtcaggagttcgagaccagcctggccaacatggggaaaccctgtctctactaaagatacaaaaattagccaggcgtggtggcatgtgcctgtaatcccagctacttgggaggtggaggttacagtgagccgagatcgtgccactgcactccagccttggagacagagactccatctcaaaacaaaaacaaaaacaaaaaactaattaaaaaataaaataggccagatgtggctcacaggctcacacctgtaatccaagcactttgggagcccaaggcagcaagatcacttgaacccaggagttcaagaccagcctgggcaacatggtgaaaccccgtttctaccaaaaatacaaaaattagccggatgtggtggcatgcacctatattcccagctgcttgggaggctgaggtgggaggatcacttgagtctgggaagttgaagctgcagtgagccacgatcgtgccactgcactgctgcctgagcaacagagtgagaccctgtctccaaaaaaaaaataaaatagacattcccactctcaccctgtgtcagcctccggttcagctccttgctggtctccctcttagaacctatcagaatttccattgtctggaagccttccttgaccactcagtctaaaatagaaaggaaggcttatggttacattatccacatccatctcccctactgccccaggagttctcaagtctgaggtcgccacatctatgtccttgcccacgacaggcctctccagtgccaagtatagagaagctctctgcaaggacacaccttgaacacatatctgcaagctcgtggctgtctttacccacttattcaacatttattgagcaactgtgtgtgctaggacccaatgaggaccctcagtggtgaacagaacaaagatccctgctctactggggctgatgttctaggagacagtaaaaaaaaaaaaaaaaaaaactcagaggcaggacgcggtgcctcatgcctgtaatcccagcattttggaaggctaaggcaggcggactgcctgaactcaggagtttgagaccagcctgggcaacacggtgaaaccctgtctctactaaaaaacaaaaaatcagccaggtgtggcggcatgtgtctgtagtcccagctactcgggaggctgaggcaggagaattgcttgaacctgggaggcagtggttgcaaggttgcagtgagctgagagcacaccactgcattccatcctgggtgacagagagagactccctctcaaaaaaaaaaaaaaaaaaaacctcaggtgtatgtctaagaggatgttaagttgtgagctgggctacagagaaaaagtgtgcaaggaaataaaagagttaaggaggtcgggcgtggtggctcatgcctgtaatcccagcactttgggaggctgaggtgggcgaatcccttgaggtcaggagttcgagaccagcgtggacaaaatggtgaaaccccctctctattaaaaatacaaaaattaggcaggtgtggtggcatgtgcctgtaatctcacctactcagggggctaaggtgggagaatcgctttaacccaggaggcagaggctgcagtgagatcttgcctttgcactccagcctgggtgacaaagtgagactctgtctcaaaaaaaaaaagaaaaaaaaaaaaaaatgtcgggcaccatggctcatgcctgcctgtaatcccagcactttgggaagctgaggtgggtggatcaggagttcgagaccagcctggcaaacatggtgaaaccccatctctgctaaagatacaaaaattagccaggcatagtggtgggtgcctgtaatcctattgggaggctgaggcaggagagaatcacttgaacctgggaggcggaggctgcagtaagccaagattgcgccactgcactccagcctgggccacacagtgagactccgtctcaaacaaacaaacaaacaaacaaacaaacaaaaaaaaaaacagaaagaaaaagaaaaagtaattgcagtttttgccattactttttttttttttttttcctctgagacagtctcactctgtggcccaggctggagtgcagtggcgtgatttcagctcactgcagcctccgcttcagggttcaagcagttctcctgcctcagcctcccaagtagctgagactacaggggtgtgccaccatgtccggctaattttttttgtattgttagtagagacagggtttcaccatgttagccaggctggtcttgaactcctgacctcgtgatctgcccacctcggcctcccaaagtgctgggattacaggcgtgagccaccatgccctgcctgccattactttcaatggcaaaaacagcaattacttttgcaccaacctactaaaataaatatctcatctgaaggctctgaaagagaccttgaggtcagtaggagcggagagagatcattaagtagggagggcacaggcagaaaaggtgaggtgctgttagtggcagggactgcacctggctggtgcctttttgggtgttatacctggcccctggctccagcaccgagcactggcctgccctcttgtgccatttccccgtctcatctttgctcattacatgtttgcatgggactggcttccttctctagggctccgtgttcctgcttttgagggaggaggggcagaggaggaggctgtggggaggaggcccagctgctgtgccttatgctgttggggatgaggggggaaggtgccgtgtagtgggggttgcagcggataccctgtgtgtgtctgttctgaatcatgatgggctgagtggaaaggcagggtgggggtaaactgaagcactgtgggtggacacaggacaaaggaggcattgagggcggggcaggggtgccccctttaacagggaggacatgctaagggctgacacccatagcatcagccagtgcctgcccaggaaggtctcaccgaagtctcagggcaggggcacaacggagagggcctccacccaccctggcaaggcggcctcagctctgccggtaaccaggcctgggggaagcacctagcccccacctccaagagtgacccggatcagagggcagtgctgggtggaagagataagtaggaggaaggagtgaggcccccacccctgcccaagggtgtgaagagagcagaaaacaggcactgagagaggacgagctctaggtcacactgagaaaagacagccagccgggccaggcacagtggctcaggcttgtaattccagcacgttgggagaccgaggcaggtgaatcacgaggtcagtagttccagactagcctgaccaacatggtgaaaccctgtctctactaaaaatacaaaaattagccgggcgtagtggtggcgcgcgcctgtaatcccagctactcaggaggctgaggcaggaaaatcgcttgaacgtgggaggcagagcttgcagtgagctgagattacaccactgcactccagcctgggcgacagagagactccgtctcaaaaataaaaaaaagaaaaagaaaaagacagcttagattgtgcctgatgcatagtaggtgttcaaaaaaagtttttggattttttcgttgtttgtttttagagacagggtctggttctgtcacctgggctggagcacaatgacaatatcatagctggaagtggctttgacctcctaggctcaaaggatcctcctgcctcagcctcccaagtagctgggactacaggcatgcaccaccatgtctggctaatttttgaaaaatacaccaggcatggtggcttacagctgtaatcccagcactttgggagaccgaggcaggtggatcaccttaggtcaggagttcgagaccagcctggccaacatggtgaaaccctgtctctactaaaaatacaaaaattagctgggtgtggtggtgcatgcctatagtcccagctatttgggaagccaaggcaggggaattgcttg

SEQ ID NO: 8744 - DNA, 13575 bp, Homo sapiens
ggcttgagaggaggagggaggatcggccagagaccgaccccaggaggatggccggccaggcagcaggaccacccacccgtgctcctggaagcataggagcctggcacgggctggccctggggtcctggtctgtatcagtcctgaggaccaaccagacggcatccggtgaagtgcagtggctgggccccacagccgggcggggggctgcggaaggaaaaaaccttgttttggattcactcataattacaaatgccccctccagcaaggccggcctctgcctgtccagtcactcacggagaaaacaggcagaaagaaccttctaggacaggcgtggggtgccagtgggggtgggaggcagaggagccggcgagaggcccccacccatccacccaggactagccccatgagcaacgcccgcgtgggcagccacacaggcggaagggacaggctgggcagccatcgcctaaggtctggggttaaatctcaaacgaaggggaggcttcctctgggttgccacacagggctgggcagagcctgcagagaggggatcagaggtctgaggacatcctcccggatggtggcccttggaggtgaagccaaggctctcttcttggggcgttttggccatgctttcctctgctaggctcttgttggtttgaggaatatagtcaggaaggaaaaaccagcctagcagttattgaaacaatatttcaaacagagttcagacagagtgacagaatggctcaggtattttgtagccgtcctcacacctgcagcaccagactgtgttgccgcacgtgggcagctctggggttttccagcccccttggagctggggcttccctgaccacagcccctctctgggagccatgtggcatccagcagccctgttctctaggggtggggatagcacattagatctggaaggtgaaagaactcaacaggtgctcagagagtagcagccgttataaaggcagaggcgatagggatagggggtggggcctcgttccccccctaaacacactgcagctggggaaagaacggtgcgtgatgaaaactcgtggtactctgacactgaccccacaataaagcaatataacaagaatcaatattgcttcggttggatcaacacctttgtgcatgtgaaaggtacgaactgactctgcagggagaacagaggagccccatttgggctgcgtgctccatgtgtgtcctcccggtgacttccccttctctctctcactctatttatttttttagagacaaggtctccctatgttgcccaggctggactcaaactccagggttcaagtgatcctcctgcctgggcttcccaaagtgctgggattacaggtgtgagccaccaagcccagcctctcctttctttttttttttttttttttttcagagacagggagggcaggggtctccctatgttgcccaggctggtctcgaactcctgggttcaagtgatcctcctgcctcggcttcccaaagtgctgggattataggcgtgagccactgtgcccagcttccccttctcttgagctgagagctggtttgagatctgttattgcacccacataaagcttacgtagggccagatatggtggcttgtgcctgtggtctcagctacctgggaggccaaggtgggaggattgcttgaacccaggcaggaggttgaggctgcagtgagctgtggctgtgatcaacagagtgagaccctgtcttaaaaaacaaaaaaaggccaggtgcagtggctcacgcctgtaatctcagcactttgggaggccgaggtgggaggatcacttgaggtcaggagttccagaccagcctggccaacatggcaaaaccctgtctctactaaaaatacaaaaattagctgggagtggtggctcatgcctgttatcccagctactcaggagcctgaggcagaagaatcacttgaacccgggaggcagaggttgcagtgaactgagatcacaccactgcactccagcctgggcaacagagcaagactccatctcaaaaaaaaaaaaaatgcttaacgccactgttatctaggaggaggttttggccaggtgcagtggctcacgcctgtaatcccagcactttgggaggctgagacgggtggatcatgaggtcaggagttcgagaccagcctggccaatatactgaaaccccgtctctactaaaaatacaaaaattagctgggcctggtggcgtgtgcctgtagtcccagctactcgggaggctgaggcagaagaattgcttgaacctgggaggtggaggttgcagtgagccgagatcgcatcactgcactccagcctgggcaacagagcaacactctatctcaaaaaaaaaaaaaaatgcttaacgccgctgttatctagaaggaggtttcagcggggtgcagtggctcacgcctgtaatcccggcactttgggaggccgaggcaggcagatcacgaggtcaggagatcgagaccatcctggctaacacggtgaaaccctgtctctactaaaaatacaaaaattagccaggcatggtggcacgcgcctgtagtcccagctactcaggaggctgagggaggagaattgcatgaacccaggaggcggaggttgcagtgagccaagatatcgccactgcactccagcctgggcgacagagcaagactccgtctcaaaaaaaaaaaaaaagaaggaggtttcagcatcacggagccgcgtctctgtagaatggacacgtgtttcactcatgctgcagcgctaggagacagccaccttagcaatccacaccccatctgcatgagaaagcctgggttcagtgttcccaactctagatgtgcagctggaaccactgattaaattgtcccgtaggcagcaggcaccagtcttcgaggggctactttgatgaattctgctagtatatttcccttgaaatggacccaaattataccctagctcagtatgaaaaggcactactttagaacaacacattatttttcattattcatcgttctttcatcaacttggaactccaagcctgtctctaagctgtcaggccctcttccaagccagcatcagacccctatcactgaaatcagtgcagaatgggcttttgatggacgaaactctagttataagtgacaaaaaacaatgtggcttccaagcctcttctttttttttttttccccagagatgaggtcttgctctgtcacccaggctagagtggtgcagtggtgtgatcacggctcactgcagcctcaacttcctatgtgcgagtgttcctcccacctcagcctccagagtagctgggaccacaggcatgtcacaccattcccgggtaattttttaaattattattttggtagagacagggtcttgctttgttacccaggctggtctcaaactcctggcctcaagtaatactcccaccctgcctctcttatttttattttatttattgatcttttttttttagagtctcgttctgttgcccaggctggagtgcagtggcatgatcctgactcattgcaacctctgccttccgggttcaagcaattctcctgcctcagcctcctgagtagctgggactacaggcacccagcactatgcccagctaatttttttgtatttttagtggaggctgggtttcgccatgttggtcaggctgatcttgaactcctaacctcaaatgatcacccacctcggcttcccaaagtgctgggattacaggcatgagccaccgcaactggccctgcctctcttcttttaaacccatatgtaactacctggatccagtggctggaggaccagcaggcctggcccttgtgatgccagtgggcacagccctctgcgccaggctgatgacaccatctgccacctccactacagggctggggaagcagctggagccgtggctgagtcactgtcggagcagctgagcgtcgcgtatgctacaactgatttcacagcatttgacaaacgtccccccacagaaaatgaacctcactgagtttccctgtccaacaagtcaattcattaactcagggcattaggacactaatcccccctgggagactcaaagccactgttcgagtcaaacccccacattctaagggctctttcatggttggggccatgggttagaaccaggcaccttttcatttttcgtggacagtggtattgtttgtgagatgtggccatgattgggaggcagccaaagagctgggagctctcctccccaagcacaactcccaggcctgtgaggggctcagcacggtgacccagccttccccagcacctgcccagcgagcctggcggcccaacagggttccattctcagggaggcaggcaggcgcctccgaggccacaaggggtttctaagggacaagcttcttcggcagccgtgccttgggcactgcagcacctgcccagcatcctggatggtggctggaaatgatatcctggagaaacaacttcctcaaagggaaatgagttcgtgttttctagagtgaaagttcctccccggacaaagctgagacctgcactggctttgagtgactaaatgtctttctgggaggctttgactcactgggtaacgtggaatgggcagtgccctaggctgcaaggcttctccgacatcatcccggaaccagcctttgcttccttcctcacatcgcagagcgcacctgcagtgcccgttccgttccctccgacctgtgcatcctccccttcccttcctggtcccgctggcagcctgccacctgtgccaggacaaacagctgcacagggatgccctttcctgttgccatccagggcagagctcaccgtcttctcggtactcctgcagacaccagccacacatgtgcagacgtgcatggctatttgctgacctgtcttcccaccgttcagaaaacaaaaacccggggagctcactgcaagagttgttcctgggcttcaattcctggatctggcacctggcgcacagtaggtgcacaagcaaatacctgagtgaatgaatggatgtctcctctttggggatcacgtggaaaccccagaagtcaaggccccagtttggtcccatccagctgaaaacaggtgtaaataatgtaggctaagcccagcggagagaaaatctgcagcttagttagtcctttgctttgttgagctagattcagctgagtcaggaaatccttcgtgatggcaagacgggcttggggcaagctgggccgcacaactcaccctctcaacacagaccttggatgttgaaagtgaatacagtgcactgtcctcacaacggggaaaaggaggagaacggtatgcgggatcccctgtactagccttacaacttcctgtgaattttcatttcaaaataaaaggttacaatgtacagagaggatctatgaaagccttggggaggcaggtgtcagctccatatgacagcctttctgacaaagctgtctgaaaatggaatggggtgctttaaagacagccctcactccctagaatcagacagccgaccatagccaccctcccaagctgacagtgtccttcagcagtgagggcccagctctggagccagattgcctgggttcaaatcccagctctaaaagttacttattcgactatcctggacaagttatttcatttctacaagtcttcatttctgcattaaaaaatggtagctaggtcaggcccagtggctcacgcctataataccaacaagtcggacgctgaagcaggatgatcacttgagcccaggagtttgagaccagcctgggcaacaaagtgagattccatctaaacaaaaaaaaaaatttttcaattagccgggtgtgatggcgtgcgcctgtagtcccagctacttgggaggctaaagtgggaggttcacttgaacgcaagaatttgaggttgcggtgagctgtggtcattccactgcactccagcctgggagggcaaggccttgtctcaaaaaaaaagaaaaagaaaaaaaaagtagataaaaccacatgagactttattggcaattgtgagttactctttccacatggcgacagcctgcaatgggggctccagtttggcttgctggtctcttctgggcagcgggcactgctgtctctactttccaggatggcagttggcccgaggggctctaacctgccattggaacctcacccatagcccagaagcctcattcacaacccttcccagactccactccaacttagagaacctgaaaaatggacatgtrgacatgtatctgaaagaaagtctaggcggttgcrcttagacaagggcctacggctttattaacagatgtcgaggaagctttcaggtgctggyagccatgagggtctggttttaaggatggcctttaaggaaaggccgtggcaggcgggctgagaggggckgctccagctcagccctgcccacagcacaggctcacagaagccgagatccacatcaccgcctggcatgcaaaggagttgaagacaaaaccatttttttccagcttctctacaaagccaattactaagcaacagttattaaagtgaagtatccatttacagactgacacaaatatcaaaaataagcagcttagatgagtacagaggctggagtgcattttctgctaacaaaaaccactgtgatattctcccagtttagagggaaaagtctatctcaggccgactcagatgtggcakaaataagtgggtctgaagtgcattttcagttgtttctgcccggaaggagcccggatgatacaaacaggtctggggttcgtggctctggcaagcgcccagagacaactgcgtctctgccaggacgctcatcctcactgcggctgtctgggcagatggctgttggcaggctagggacgacgatgaaaaactgacaatattttaaaaacccagtagggtccacagcagtgtttgaaatgacaggctttttatttctcaggaacagccgagatgacctccagaggtttccagcgaagctgtaacaatccaccctgcagctctatgacagggaggagggcgaatcaaatccatcatcttacgccagacttcagccstgcgggagctgctgcctccaaagaaagcggggacctgggcggactgcgtctctcccccgtgtggagaacgtgacagatgtgaaggttgggctgacagacacacggcctgcagcagcccagccagtcccccacagcatcgagccaagtcatttaaaaaggatttaggccactgcctttttctgagggaggagcggccagcatgtgccccgcggctcactgggcctgtctaatcacacagcagtggcaaaaggagtatctgccagacgcttcctatcactctattctgtctcctcatccacctgaagttcaccccgtttccccaatgacttagaatggctttgtgcttagttttaattgtagtttgtgctattctgtgaattaacaattcaaacaaaataagaaagccatgttgttaaacagtagaggagccrgggactctgtctccattctctcatcacacacaagtcatgcatctaccaaaaaaaaaaaaacaaaaaaacacaacaacaaaaaaactgtcctctgaggaggcacaggtgtgacagataaggaacctgcagctcagattcaacaggcacctgccaagtccacactcaggactgtgacagcctcaacaacatgaggtccagacacattcactgtggaaggctctgcccacgcgaacaaagctgtcawctctagcaaaagggacactgccttcttcctccctcacttctcacctggtaagcccgggaatcaaaacagcaaaaatgagcccccaaaaaagagagagagagagagaagcagccactgttaccagcagcacccgctgcacaggcagaagcacctctggtgccactttcaagacaaaacaagagcacagttgaaacatctaatttgaaaatgttgatctcctttcctaagacattgctaaggggcccacaggaaggctggtggcaccagggaataaaccctggaagtggtgcagccactctgggaccaggcagctccggccagaggcctcaatccatggcagccagctgctcgatggcacggcgcactttctycgcagtttcctcaaattctttcttcttattgttggtttcctttgcctggaaataaagaatagacacatgacactgaaaccagagcttcccagtcacatcctgtagataagatgacaaaggaaaaaacaatcagggaacactgagagagcacctaaataaactgggcactgggctaggcagattcccagctacctgggacaaacatcctgattcagctcaactccctctagtttaagctgcctcctaatcatcgaataacaggaaacactgacggagtgcttggtatgcacccagcaccactctacctgcttcctccattaactgatttatgttcacagtgatcctgcgctgggtgctcccatatctctactatacaggtgaggaaaccgaggtccaggctgaaggagccactcaaagtacccagctagtctaggcaccccagctagtctgggcaccccagctagtctaggcaccccagctagtctaggcagagctctgctcttaaccactgccctacctttctcctgaaactcctggaggaaagtccagagccttcctcttcatgtccagttaaacagaccctggcaaacatcaggctcttcctcgaacagaaattcttttgcttccagtccctccctgaatctggcttccaattttttcattctgctaacagagctctctcctaaggggcaaatgacaatcacattagcaaatccagggacccccttccctaccatattttttataaaccctaactcctctactacattaaaaaacaaagacctttattgggttaaatttgtttgctgacagaggttaacttaaaaaaaattactttttttttgagacggactttcgctcttgttgcctwggctggtgtgcaaaggcacgatcttggctcaccgcaacctctgcctcccgggttcaagagattctcctgcctcagcctcccgagtagctgggattacaggcatgcgccaccaccccggctaattttgtatttttagtagagatggggtctctccatgttggtcaggttggtctcgaactcatgatctcatgtgatctgcccgccacggcctcccaaagtgctgggattacaggtgtgagccactgtgccagccaaaaaattacttttcaatatgtactttatatatcctaagttttacctcatgtataagtaataaaaatttgtcattttttaatataaatttataatttataaattattaaaagaaaatttaatttaaaaataataaattgataagaaaaaagaaaacagtgcaccgtttggtttttttttttttagagacagggtctcgctctgtcatccaggctggaatgcagtggcaagatcatggcttactgcagctttgacctgcaaggctcaaagtgatcctcccacctcagcctcctgagtagctgagactacaggcacgtgccaccatgcctggctaattttttgtgtattttttgaagagatgaggtctggccacattgcccaggctcgcctcaaaactcctgggctcaatgaatcctcctgccttggcctcccaaagtgctgggattcaggcacaagccactgcacctggcccagcagcgcacttataatggactgtgatggacaactctgcagtcccagggagcctcagctttactgatatggaaagatgaccatggcttttaaaatatatatacacacatggattattcagtttcttctctttcaaaaaagccttaaattagcgaagctcctttgcatacatgctataatttaaccaccccaatgtggaggtcaatatctccattttatacatttttccactaaaggtaggggcgaagcaaacacaactcttgctattgaaagacaaaacaggccgggtgcggtggctcacgcctgtaatcccagcactttgggtttgggtttgtaatcccagcgcctgtagtcccagctacttgggaggctgaggcaggcgaatggagtgaacctgggaggcggagcttgccgtcagccgagatcacgccactgcactccagcctgggcgacagagtgagattccatctcaaaaaagagaaaaaaaaaaatttaaaattagccaggcatggtggcatgcgcctgtagtcccagctactgggaggctgaggcaggaggattgcttgagtccaggaggtcgaggctatagtgagctgtgattgygccactgtactccagcctgagcaacagagcaagaccctgccaaagaaaacaaacaaaacactcctgccacccaggtctacaactcgcctctccttctagtgcttcgttttgtcctcatcacaagtatttaccaagtaaactcttatgaagaactaagttgttcagtttatttccacattaaatttatttcctgatcgattttcacactggttctaatttatttcattgtttcaaaagctaagcaccgaggcagcagcaggaacaagaatcagcgcccaatgcatcgccctggatggccgggcctcagcttccacagcagcgccctcctggcaccctggcaaggcagcagacaggggcatcctgccatcaaatctgggatcttgggaatccccagcatcaccagcaacagcatccttgtcttcaggatttgtatagcgcaacacacgcacctgtggtcccagctacttgggaagctgaggtgggagaatcatttgagcccagggggtcgaggctgaggtgagccaagatcacaccactgcactcagcctgggtgacagagtaagaccccgtctcaaaaaaacaacaaaaaaaagattatattgtttcaaaattaaagtaataaaaacaaatccataaaagtattctgtattctgaattggggaaaacaaacaaacaaaaaaaacagttcaaaataaaagccaagcagtttttaaatctccctacttttcttgcaggctgtaatgtctcccctctttccagtgtggctgggtctgactatcaggagatagagaccgagaggtctcctgcagggactgaggcctctacttctgcctactgcgccttcagctcacacatcatgaaagcctacttttttttttttttttgagacggagtctcgctctgtcgcccaggctggagtgcagtggcgcgatctcggctcactgcaagctccacctcccaggttcacgccattctcctgcctcagcctcccgagtagctgggactacaggcgcccgccaccacgcccagctaattttttgtatttttagtaaagacggggtttcaccatgttagccaggatggtctcgatctcctgacctcgtgatccacccgcctcggcctcccaaagtgctgggattacaggcgtgagccaccatgcccggccctgaaagtctacttttcttaatcacatcttccaacaggtgagtggactccccctaccagactgcatcttcatccctgtaaccctagagcggagcaccccgcagcgtccaccagcacttcagggctttctggaactggatggtgtcagatttcagttgctctatttgcaagggcaaaaaccctctgtctttctcagcgctctgggacctggtttccagctcacacctccacatccactctgctcctcccctgtgcccatgatggttccaggcacacaagctgctccttgtctaaaacagggcttggcaagcaagggcctgctgggccaaatccatacagcccgtcatggcctttttttgtccagcccacgggctaagaatgctttttatgtttctaaaaggttgtgaaaaacaacaaaagacaatatgcaacagagactctgacccacgagggctaagagatggtctatggcacgctgcagaaaagctggctgacccctgacctggaaaaagatgatccccagcccactttccagttcccacgctgcagctcccacaacctcaaccaggtgacaagctctctcacagcatgcttcacccacaactggcctcttcctgacaaaacacaatctcagtccttagcacttaaaagccactatattgaggccaggtgtggtggttcacacctgtaatcccagcactttgggatgccaaggcgggcagatcacttgaggccaggagttcgagaccagcttagccaacatggcaaaaccctgtctctactaaaaatacaaaagttagctgggcctggtggcacacacctataatctcagctacttgggagcctgaggcacgagaatcgcttgaacctgggaggtggaggtcgcagtgagccaagatcgcaccaccacactccagcctgggcgactgagtgacactctgtctcaaattaaaataaagccacatataaggacagaattattttacgctgatctctacaaaggaatacaattttcaagctgaaaagcaacctgagaaaccatgggatagggggtctaacctctatttagcaaggaaagcatgagcacgactggcttaaactcaaagtctgcaagtggcagagacagaactacaacatctcctgactctccacccagggctttgctacaaggatatggaatcccccagtacttattctgtgtggggctgccagacttagcaaataagaatatatgacgcccaggcctggtgcagtagatcacacctgtaatctcagcgctttgggaggccgaggcaggcagatcacttgaggtcaggagtttgagaccagcctggccaacatgatgaaaccttgtctctaataaaaataccaaaaaaaattagccaggcgtggtggtgggcacctgtagtcccagctactcaggaggctgaggcagaagaatggcgtgaacccgggaggcggagcttgtagtgagctgagatcgtgccactgcactccagcctgggcgacagagcaaggctctgtctcaaaaaaaaaaaaaatcaaaaaattttaaaaagaccacgcatggtggctcatgcctgtaatcccagcactctgggaggctaaagcgggcagatcacaaggtcaggagtttgagaccagcttggccagcatggtgaaaccccgtctactaaaaatacaaaaattagccaggcatggtggtgcgtgcctgtagtcccagctactcgggaggctaaggcaggagaatcgcttgaccccgggaggcagaggttgcagtgagccgagatcgtgccactgcactccagcctgggtgacaaagtgagactcgtctcaaaaaaaaaaattaaaaataaataaataaataaataaataaataaagcccagttacatttcaacttcagataaatgactaagtttctagtaaatactgacacaaaatgtgggatttacttataccggtatatacttataccggccacactccaggagctttaaaatcacacagacatcctaggggctttaaaaatgattcctagctgggcacggtggctcatgcctgtaatctcagcactttgggaggcccag

SEQ ID NO: 8745 - DNA, 16653 bp, Homo sapiens
ctgggcaacggagagagactctgtctcaaaaataagataaactgaaattaaaaaataggctgggctggccgggcgtggtggctcacgcctgtaatctcagcactttgggaggccgaggcgggtggatcacgaggtcagaagatggagaccagcctggccagcgtggcgaaaccccgtctctaccaaaaatataaaaaattagccaggcgtggtagagggcgcctgtaatctcagctactcaggacgctgaggcaggagaatcgcctgaacctgggaggcggaggttgcagtgagctgagattgcaccactgcactccagcctgggtaacagagcgagactccgtatcaaagaaaaagaaaaaagaaaaaatgctggaggggccactttagataagccctgagttggggctggtttggggggaacatgtaagccaagatcaaaaagcagtgaggggcccgccctgacgactgctgctcacatctgtgtgtcttgcgcaggagacactgtcggacattcgggaaggtgcgccgctaggggtccacctgccttttgtgggctactcctactcctgcatggccctcaggtaagcactgccctggacggcctccaggggccacgaggctgcttgagcttcctgggtcctgctccttggcagccaatggagttgcaggatcagtcttggaaccttactgttttgggcccaaagactcctaagaggccagagttggaggaccttaaattttcagatctatgtacttcaaaatgttagattgaattttaaaacctcagagtcacagactgggcttcccagaatcttgtaaccattaacttttacgtctgtagtacacagagccacaggacttcagaacttggaaaatatgaagtttagacttttacaatcagttgtaaaagaatgcaaattctttgaatcagccatataacaataaggccatttaaaagtattaatttaggcgggccgcggtggctcacgcctgtaatcctagcactttgggaggccaaggcaggtggatcatgaggtcaggagatcgagaccatcctggctaacacggtgaaaccccgtctctactaaaaatacaaaaaaattagccgggcatggtggcgggcgcttgcggtcccagctacttgggaggcgaggcaggagaatggcatgaacccgggaggcggagcttgcagtgagccgagatcatgccactgcactccagcctgggcgacagagcaagactccgtctcaaaaaaaaaaaaaaaaaagtatttatttaggccgggtgtggtggctcacgcctgtaattccagtgctttgggaggatgaggtgggtggatcacctgaggtcaggagttcgagaccagcctgaccaacgtggagaaacctcatctctactaaaaaacaaaattagccaggcgtggtggcatatacctgtaatcccagctactcaggaggctgaggcaggagaatcagaacccaggagggggaggttgtggtgagctgagatcgtgccattgcattccagcctgggcaacaagagtgaaacttcatctcaaaaaaaaaaaaaaaaaagtactaatttacaggctgggcatggtggctcacgcttggaatcccagcactttgggaggctgaagtggacggattgcttcagcccaggagttcaagaccagcctgagcaacataatgagaccctgtctctacaaaaaattgaaaaaatcgtgccaggcatggtggtctgtgcctgcagtcctagctactcaggagtctgaagtaggagaatcacttgagcctggagtttgaggcttcagtgagccatgatagattccagcctaggcaacaaagtgagacctggtctcaacaaaagtattaattacacaaataatgcattgcttatcacaagtaaattagaaaatacagataaggaaaaggaagttgatatctcgtgagctcaccagatggcagtggtccctggctcacacgtgtactgacacatgtttaaatagtggagaacaggtgtttttttggtttgtttttttccccttcctcatgctactttgtctaagagaacagttggttttctagtcagcttttattactggacaacattacacatactataccttatcattaatgaactccagcttgattctgaaccgctgcggggcctgaacggtgggtcaggattgaacccatcctctattagaacccaggcgcatgtccaggatagctaggtcctgagccgtgttcccacaggagggactgctgggttggaggggacagccacttcataccccagggaggagctgtccccttcccacagctgagtggggtgtgctgacctcaagttgccatcttggggtcccatgcccagtcttaggaccacatctgtggaggtggccagagccaagcagtctccccatcaggtcggcctccctgtcctgaggccctgagaagaggggtctgcagcggaaggtttagaaagagcagctcccaggggcccaaggccaggagaggggcagggcttttcctaagcagaggaggggctattggcctacctgggactctgttctcttcgctctgctgctccccttcctcaaatcaggaggtcttggaagcagctgcccctacccacaggccagaagttctggttctccaccagagaatcagcattctgtctccctccccactccctcctcctctccccagggacagtgaggtcccaggccccacacccatggaactggaggccgagcagctgcttgagccacacgtgcaagcgcccagcctggagccctcggtgtccccacaggatgaaacagtaagttggtggaggggagggggtccgtcagggacaattgggagagaaaaggtgagggcttcccgggtggcgtgcactgtagagccctctagggacttcctgaacagaagcagacagaaaccacggagagacgaggttacttcagacatgggacggtctctgtagttacagtggggcattaagtaagggtgtgtgtgttgctggggatctgagaagtcgatctttgagctgagcgctggtgaaggagaaacaagccatggaaggaaaggtgccaagtggtcaggcgagagcctccagggcaaaggccttgggcaggtgggaatcctgatttgttcctgaaaggtagtttggctgaatcattcctgagaaggctggagaggccagcaggaaacaaaacccagcaaggccttttgtcgtgagggcattagggagctggagggattttgagcagcagagggacataggttgtgttagtgtttgagcaccagccctctggtccctgtgtagatttagaggaccagactcagggatggggctgagggaggtagggaagggagggggcttggatcattgcaggagctatggggattccagaaatgttgaggggacggaggagtaggggataaacaaggattcctagcctggaaccagtgcccaagtcctgagtcttccaggagccacaggcagccttaagcctggtccccatacacaggctgaagtggcagttccagcggctgtccctgcggcagaggctgaggccgaggtgacgctgcgggagctccaggaagccctggaggaggaggtgctcacccggcagagcctgagccgggagatggaggccatccgcacggacaaccagaacttcgccaggtcgggatcggggccggggccggggccgggatgcgggccggtggcaacccttggcatcccctctcgtccggcccggacggactcaccgtccttacctccccacagtcaactacgcgaggcagaggctcggaaccgggacctagaggcacacgtccggcagttgcaggagcggatggagttgctgcaggcagagggagccacaggtgagtccctcatgtgtccccttccccggaggaccgggaggaggtgggccgtctgctccgcggggcgtgtatagacacctggaggagggaagggacccacgctggggcacgccgcgccaccgccctccttcgcccctccacgcgccctatgcctctttcttctccttccagctgtcacgggggtccccagtccccgggccacggatccaccttcccatgtaagacccctctctttcccctgcctcagacctgctgcccattctgcagatcccctccctggctcctggtctccccgtccagatatagggctcaccctacgtctttgcgactttagagggcagaagccctttattcagccccagatctccctccgttcaggcctcaccagattccctccgggatctccctagataacctccccaacctcgattcccctcgctgtctctcgccccaccgctgagggctgggctgggctccgatcgggtcacctgtcccttctctctccagctagatggccccccggccgtggctgtgggccagtgcccgctggtggggccaggccccatgcaccgccgccacctgctgctccctgccagggtacgtccggctgcccacgcccccctccgccgtcgcgccccgcgctccacccgccccttgccacccgcttagctgcgcatttgcggggctgggcccacggcaggagggcggatcttcgggcagccaatcaacacaggccgctaggaagcagccaatgacgagttcggacgggattcgaggcgtgcgagtggactaacaacagctgtaggctgttggggcgggggcggggcgcagggaagagtgcgggcccacctatgggcgtaggcggggcgagtcccaggagccaatcagaggcccatgccgggtgttgacctcgccctctccccgcaggtccctaggcctggcctatcggaggcgctttccctgctcctgttcgccgttgttctgtctcgtgccgccgccctgggctgcattgggttggtggcccacgccggccaactcaccgcagtctggcgccgcccaggagccgcccgcgctccctgaaccctagaactgtcttcgactccggggccccgttggaagactgagtgcccggggcacggcacagaagccgcgcccaccgcctgccagttcacaaccgctccgagcgtgggtctccgcccagctccagtcctgtgatccgggcccgccccctagcggccggggagggaggggccgggtccgcggccggcgaacggggctcgaagggtccttgtagccgggaatgctgctgctgctgctgctgctgctgctgctgctggggggatcacagaccatttctttctttcggccaggctgaggccctgacgtggatgggcaaactgcaggcctgggaaggcagcaagccgggccgtccgtgttccatcctccacgcacccccacctatcgttggttcgcaaagtgcaaagctttcttgtgcatgacgccctgctctggggagcgtctggcgcgatctctgcctgcttactcgggaaatttgcttttgccaaacccgctttttcggggatcccgcgcccccctcctcacttgcgctgctctcggagccccagccggctccgcccgcttcggcggtttggatatttattgasctcgtcctccgactcgctgacaggctacaggacccccaacaaccccaatccacgttttggatgcactgagaccccgacattcctcggtatttattgtctgtccccacctaggacccccacccccgaccctcgcgaataaaaggccctccatctgcccaaagctctggactccacagtgtccgcggtttgcgttgtgggccggaggctccgcagcgggccaatccggaggcgtgtggaggcggccgaaggtctgggaggagctagcgggatgcgaagcggccgaatcagggttgggggaggaaaagccacggggcggggctttggcgtccggccaataggagggcgagcgggccacccggaggcaccgcccccgcccagctgtggcccagctgtgccaccgagcgtcgagaagagggggctgggctggcagcgcgcgcggccatcctccttccactgcgcctgcgcacgccacgcgcatccgctcctgggacgcaagctcgagaaaagttgctgcaaactttctagcccgttccccgcccctcctcccggccagacccgccccccctgcggagccgggaattccgaggggcggagcgcaggccgagatggggaatgtgggggcctgcagaggaccctggagacggaggcgtgcagaagctcagtctcggggcggaggcttcgcgcccttagtcctcctggacggcccgttaccttctgcgttgtcccgatggggaaactgaggccctgagccagaagcacacgctggggggaggcagaaagcgcggccagaggcggagggaaaacaaagggagaatcacagacagacgggagggggacggacacacacaaggggacagagacccgagtggagagctggatctcgccttcccggcgtggggcgcagggtcggccagaaagaagatcgagaagagcggggagtgggggcgaaaaggggggacaggtgggggaggaggctggggaaagcccgagggaggaagagagggagggaggaacttcccaaagttgcaaaacatggctaccttgcctgcggagccgagcgcggggccggcggctgggggggaggcggtggcggcggcggcggcgaccgaagaggaggaggaggaagcgcgccagctcttgcagactttgcaggcggccgagggtgaggcggcggcggcggccggggccggggcgggcgcagcggctgcgggagctgagggcccgggatccccgggcgtccccgggtcgccccccgaggccgcttccgaaccgcccacgggcctccgcttctcgcccgagcaggtggcgtgcgtctgcgaggcgctgctccaggcgggccacgccggccgcttgagccgcttcctgggcgcactgcccccggccgagcgcctacgtggcagcgacccggtgttgcgcgcgcgggccctggtggccttccagcggggcgagtacgccgagctctaccggctactcgagagccgccccttccccgccgcccaccacgccttcctgcaggacctctacctgcgcgcgcgctaccatgaggccgagcgggcccgcggccgcgcgcttggcgcagtggacaagtatcgactgcgcaagaagttcccgctgcccaagaccatctgggacggcgaggagacagtctactgcttcaaggagcgctcccgcgcagcgctcaaggcctgctaccgcggcaaccgctaccccacgccggacgagaagcgccgcctggccacactcaccggcctgtcgctcacgcaggtcagcaactggttcaagaaccggcgacagcgcgaccggaccggggccggaggcggcgcgccctgcaagaggtgaggggcctcgggcggcgcaagtccagctctcccggggacatcccgtccaccagccctctycccccgtgcccactgctggggccggcgcgccgaggtcctcggacatctcccgggaccagmtcacaatctcaggcgcccgcggggcgcggggactaagtgtggacgggacaggcacccgcccgggccctctccccgcacgcgtctcctcttccagcggctccattccgagctccttcccaaatcccatcggtgttggggaatcacactgcggggggcactagagggactgaggaaaaaggacagggcctgtggccactccactccgcgtaggggctgcctcccagccccctttcttcactgaccgttactcttacccacccgcccccacactccctccgggcccggacggcgtggtccgtcttctgcctttgttgtgaaacgtgaacctttcccagctccggtttccctgtaacccaaacccttctcctcccaccctgagcgccggcctctcccttctctgacgccccgcggggagggcaccgggaactgggctggcggctgctgctccctctctccaggccactcgcccgctttccgcccaaccaaggaacttttagggcaacctgggagctcagcctctggggacccgaggccgaggtgggggagagcaagggcctcttccctccccagcgcttctctgcagtggtgtccacgcagggcttgcaaaaggccctggagtttggagtggtctcagagaggcgtcataacccctggaatgatccaccgaaacttgggccagggaaaggtgggggagcagctggctggctatgcgggaggccccacaggctaagggaccccagctgacagccatttctccggccagcgagtctgatgggaatcccacgactgaggacgagtccagccgaagtcctgaggacctggagagaggggcggccccagtgtccgccgaggccgctgcccagggctccatattcctggcagggaccggccctcccgcgccttgcccggcttcctcctccatcctggtgaacgggagcttcctggcagccagcggctccccagcagtgctcctcaacgggggccccgtcatcatcaacggcctggccctgggcgaggcctccagcctgggcccgctgctgctcactgggggcgggggtgcccctccaccgcagcccagccctcagggggccagcgagaccaagacctctctggtcctggaccctcagacaggggaggtgcggctggaggaggctcagtcggaggcccctgagaccaaaggggcccaggtggctgctccgggaccagcccttggagaggaggtcctggggcccctggcccaagtggtgcctggccccccgacggctgccacctttcctctgcccccggggccagtgcctgctgtggctgccccacaagtggtaccgctctccccacccccggggtatcccacgggcctgagccccacctccccactattgaacctgccccaggtagtacccacctcacaggtggtgaccctgccccaggctgtggggcccctgcagctgttggcagccgggccaggcagccctgtgaaggtggcagctgcagcaggccctgccaatgtgcacctcatcaactccggggtgggcgtgactgccctgcagctgccttcggccactgccccaggtacccccatctccctccctcaggcctaggtgagagccggggaggggtgcagtcatctcggagagggaggggctgtccctgggctcctggagggcatctcatccctggcaagtcccagtgccccaaggcccaccacaaggctccctccgcccgccctccagctgcacagtctccacttctctctggcttggcctgctctcctggctctcacctgcgctcggtccctctctccccacaggaaacttcctcctggccaaccctgtgtctggcagccccatcgtgacgggtgtggccstgcagcagggcaagatcatcctcaccgccaccttccccaccagcatgctcgtctcccaggtcctgccgccagcccccggcctggccctgccactgaagccagagacggccatctccgtgcctgagggaggcctcccggtggcccccagccctgctctcccagaggctcacgccctaggcaccctttctgcacagcagccaccccccgccgctgccaccacctccagcaccagcctgyccttctcccctgactcccctggcctcctgcccaacttcccggcgcccccaccagaggggctgatgttgtcacccgcggccgtgcctgtctggtcagcagggctggaactaagcgcaggaacagaggggctgctggaagcggaaaaggggctggggacacaggccccccacaccrtgctgaggctgccagaccccgaccctgaggggctgctcctgggggccaccgcagggggtgaggttgacgaggggttggaagctgaggccaaggttctgacccagctccagtcggtgcctgtggaggagcccttggaactgtgacccagtgtggccccgtggcctctcccgacattggtgctgaagayrcagggacaggaatgggaggggggagccccagaaatgcggttgctgaagaccccagtcaccacatccttctgcctgggtggcctctccaagccctggtggtgctgggggttgtatccccggccacctcctgtccaggtctccatccccctttggatgggaggcctctctgttacagccctccccatgctgtgccctgccatatacgtgggggactcagggtcctgactcaggggccctgccccctccacttggtactagctgtaagcggaacaccctgccccagggccggacttccagcccccagagccctctccctgtcactccctgaaacactattaatagctctgccgatagctggtgttgtcacaactgcctggaatccgaaggtggaggacaggcagccccgcgcccctgagactggagaccctccccagtgtggcatttcctgccaggggcggggggtggggcagctgtggggagacgggggtcttccttcaccagctcccctcgactcaagcccttgtcctcattatccggcccagaccaaagattccctcatccctgggggcagccctgccgctgtgtctcctttgtatcctaaatctttatttttctaggacatgttatgcctccattttcaattaaaataaagttatcggattacaccaccaccaggggtctggggtgccttccagtgtctgtccaaagcagcgctgaacacagagcccacctcgagacctggccttcccattgctgcctcccgaggggaagaggggtttgcattcagatgcacagagtggctggggagggggtggcactgaggcctcttgcaagccacaggcctccagatgagggtggacggagcaccccagtggggcagcagggggacgcaggagggcctgcccttgtctctcttgctggtaacaaaggttccacttgctttattttatttaaaacaataaatagtctaaaaatagaacaggagagggaggagtagggtgaggtgagcatgaacagggttgcaaccgagtggctctggggtggggaagggaaggggagaggggtgggtaaacttcaccttccgacaccccgcatttcattttgggtttccttcctaagcctgggggagaatcaaggcagctgtgggtgactctggtgctccaggcaaatgtgcccagcagttggggctaatcagtgcccccctccccagtcccatgggacctgcattctcaggggctggaggcccaggagggacaagttcatcgatgggtcctggcttccagcaagagccgcggttgccatgaggggtgaggggagcgaggcgaggggccgccctctcactggaggtgcgggggcagcggcaaggccttctcggccagcagctggtagaagggctttggcgtctcccagtcctcagcctcgctgctggagccgtcctgcttcacgatgcggttgtgctggcggctgaacctgcgagccttggtgctggggagacggtggcaggatggcctggcttcctcactcgcctcccgggcatccctgtaccactcccaawwctgtgtccccgcaggggcctgggccaccgttttagcctctattgggcgagccttgggtccaccaagtcccagtcagyaagatgggactcggccaagggctctgggatgtgttcaaagtcaggagccagggcaggtggcagctccttgaaggtggaggggacaggattcgggggagtcgaggtggccaagcgacaggaaaatcagaccacgccccgagaaagtcgtgtggcagagacagcaaaagaattgaggcaggggtccatgtctgggctcagctgttccccagcttagctgtggtggggtacccctacacctgtgtcacccccaagggtttcataagaaggggcaacacgcaaattcctcggcccagtctcccatgccatgacacccaaggctccagagacagagcagggttccggggtagggaggctcttccaccccccacccacacctcggggccggagcctctcaccagtatggcctccgctcctgctgggtcatcacccgccacagctgggccagctccttggtggcagctgtggaagcggttccagggcaggatctgggacaggaaggaggaggaggtaaggagaggtctgcaggacaccctgactgagaactcagacccttcctagccttgtgggtctacaaggcctccaagaccaccctctggagctgaggaggcagagggagctggactcagcggctgttcacaagggggcacctggtgtcccaggagagtgcaggggacctgtgggcaccgctcctggcccccacatctggatcttcctgtaaaggaactagctgttttccactgtggcttggggggggcctccccatcccctggctccaggcctggcagtgactggttcagggttggcaccggatctaccaaagtcagtcccaaggactttgcttaaaaccttagagacctctcctcctcccggggtcgcttgggtgggggacaggacccgagcctgtgcctcctggggtgaccccacctgccagagaatgaagccagcccggaagacagaggaactgggtgaaaaggacaaagattccagacagcctgtgtgagccctaaaaccagctatgtctcaaggcagtctatacccgcccttgttttctaggttatataagccaattcattttcttttcttgctgggcctgatggctcacacctgtaatcccagcaatttgagaggccgaggcaggcagatcacttgaggtgaggcattcgagaccagcctggccaacatggtgaaaccctgtctctactaaaaatacaaaaattagctgatggcgcgcctgttatcccagctactcaggaggctgaggcaggagaatctgagaggcagaggttgcagtgatttgagcccgggaggcagacattgcagtgagctgtgattgtgccactgcactacagcctgggcaatagagtgagactctgtctcaaaaaacaaaacaaaacaaaaaaaactcctttttttctgaagtctaaagcctgaattgggtttcagcgctgacaatggatggaccctgtccaatacaatggggccgggttcagttctggggaagaactgtggtccacgaagggtttgtggggtctcggagggggaaaaagtgtcagacagttgtgaggagcggcatggccaggctgcgggcagagaacgaagccagggccttccccagggccaaagacgaccccctacccaccggatgtactgcttccggttcatcctgcagaacatgatgaagccgttgacacacttcttcttcatctggggtgggcaggggcctttcttcttctccttgggcttcacaggggccctggctacttggcccttcgtggcctttttctcagctgccagcaggggtgaggccagccgggtgggggtccatgtggtgtcttcgtcctcttcgctggagcccggcgtgcccacagggttggcctgcatatcctgggggagggagagggtggtgagagaggaaggaggccctgctggccctggcatgcggccgtgtctctcacctctcgctgcttccacaggggctccgagtcgctgtcctccgagctggagctggagctggagctggagctggagctggatggcgccttgctgttcccgctcagcgagaggtagcagtggtccagcgagactgaggaccggtgcaggctgtgggactcaggagggtctttgggggccttggaggctgtgtcctggggcatgatgagggagaaagatgggaggggagacaagtggtgccccttcatccccccagtactgcttttctaggacataacatgagcattagcagcagctcagattggcagggtgtggtggcttacgcctgtaaccccaacactctgggaggctgaggcaggaggactgcttgaggccaggagttacagaccagcctgggcaacatagagagaccttgttctacaaaaaaaaaaaaaaaaaaaaaaaaaaataggccaggcgcagtggctcatgcctgtaatctcagcactttcggaggctgaggcaggaggatcacctgaggtcaggagttcaaaaccagcctggccaacatggcgaaactctgtctaaaaatactaaaaaattagccaggtatgttggtgggcgcctgtagtcccagctactctggaggctgaggcacaagaatcgcttaaatccaggaggcggaggttgcagtgagccgagatcgtaccactgcactccagcctgggtgacagagtgagactctgtctcaaaaaaaaaaaaagaaattgaattaagttaaatttaaaaataatttaaaaaaccagctgggcatggtggtgtgggagggtcatttgagcccaggagttcaaggcactgatctatgatggtgacactgcactccagcctgggcaacaaagcaagaccctgtctttctttctttcttcctttcttttcttttttttcttttctttcttttttttttttttgagacggagtcttactcttgtccctcaggctggagtgcaatggcaccatctcagctccattctccacctcttgggttcaagtgattctcctgcctcagactcctgagtaactggggttacaagtgcccaccaccacgcccagctaattttgtatttttagtagagagggggtttcatcatattggtcaagctaggtttaaactcctgacctcaggtgatctgcccgcctcagcctcccaaagtgctagaagtataggcatgagccaccacgcccggccacaccctgataatttctttttctttttcttttccttttttgagactgggtttcgctcttgttgcccaggctgcagtccaacggtgccatcttggcttactgcaacccccgcctcccaggtttaagcgattcttctgcctcagcctcctgagtagctgggattacaggcacgtaccaccacacccggctaattttgtatttttagtagagatagtatttcgccatgatggccagactggttggtctccaactcctgacctcaggtgatctgccctcctcggcctcccaaaatagtgggattacaggcgtgagccaccacgcccggacacttcttgtatttttagtagaaatggggtttccccatgttggccaggctggtcttgaactcctgatctcaggtgatccgcctacgtcagcctctcaaactgctgagattacaggtgtgagccaccgcgcccagcttagtcttttgatttcaatttccttatctgtaaaatggggccacaggagaccctgcttcgtagagtagttgtaaaatgatgtgggaagctgggcacggtggctcacacctgtaatcccagcactctaggaggccaaggtgggcggatcactcgaggtcaggagttggagaccagcctggccaacatggtgaacccccatctctactaaaaatacacaattagccgggtgtggtgacaggcacctgtaatcccagctactaggggggctgaggcaggagaattgtttgaacccgggaggcggaggttacagtgagccgagatcgcaccactgcaccccagcctgggcgacaacagggaaactcagtctaaataaaataaaataaaataaaataaatgaataaaatgatgtgagttttcttttctatgggcacctggcagcttttatccttttttatccattttgtccaattcgttccacgtgcccagcacagagccggcatctggtggccaccagtgagcgcagagagggtcggggggcggttttaaggatgaggagacgcatgagtggaaggacagatgggtagatggtggctgaaagggtgagggagtggatgagtgaatgaagccatgagtgacgtgtgtggaaagacggatggatgtgtctgtggacagaggggcagaggatgtctaccttttcctgtggagcctcctgcgtgtaggctgaaggtgaagactccagatctaagcacacttcttcaaagaaagccgctagggagggagaccagaggggcagccagagtggaaatgcttctcccacaccgcccagcttcagccacaccgtccctgctagccggagtccccgtctctggcgttctccttcaggatctcccaccctaggtccaaatcccgctcacagcccactcccctgggtcacctccaacacacagagtgagctcaagtcctgctatgggcttctaaagccacccatgcaccacaccagcctgtggctgctcccccactaggccgtgggctccttgaggcagggccagggcaggattcaccccgggcacccaggatggcccagcgcaggcctgggcaccgtatgtttcccgaatgaactaagcatcagggccaggcctgggcctcaccttgggtcaggtactccatgtcatcctccaagatctcgtctggcagcagtttccctggggagctgaaaaggctagggctgagcccgaggatctcacttgggtggcctgttccactccagacatcaatctggggaggccccaggaacagtgggctccctggaaagggaacagcagactcaggggtgtggccagagatcaccctctgccctagcacagcagctggcattgaggagatagtgcctgatgctacgga
